United States Patent Application Publication US 2017/0114356 A1 - sequence listing, part 88

SEQ ID NO: 141285 - DNA, 1625 bp, Zea Mays
gcttctgctcaggcacgtccgcgccccacgcccatcggctcccactctctcccaccaactttgaagcactcacttcactcgcgcttgcttcagcttcacccacgccaacgcaggcaagtacgcgaccattcccccctcgccaagcgcgcgggaagaaccaaccaaccagaaccatggccatggccacggccggcgccgtcatcgcggcatgcatcctggcgctgctggccccgccgccggcgcgcgcggcgggcggcgggcggtgcgcgggtgagtccttctccgcgaaccgcgcctacgcggcgtgcaacgacctgccccgcctcggcgcgtccatgcactggacctacgaccgcgcgtcgggcgacctccacgtcgcgttcgtcgccgcgccggccgcgccgggcggctgggtggcgtgggcgctcaacccgtcgggcgacggcatggcgggcgcgcaagcgctcgtggcggggcccttccccgacggcggcggcacgtgggccgtgcggacgtacaacgtgtccgggtacgcgctcggggagcccgggcccatcgcgttcccggcgtcggacctcgccgccgagctcggcgccgacggccgcgtcagggtcttcgggacgctcggcctcggcgccgccgccgtaggcggcgggggcgtgctgctgaaccaggtgtggcaggtcggcgccgccgtctccagcggcggcgtcccggcgccgcacgccatgggggcggacaacctcgccgccaaggccaagctggacctgctgagggcgaccaccgtagccgccggagccgacagcgccaccaggaagcgcaatatccatggagtcctgaacgccgtgagctggggcctgctgctgcccatgggcgccatcttcgcgaggtacctcaagacgttccgggcggcggacccggcgtggttctacctccacgtcacctgccagctgatcggctacggcgtcggcgtctccggctgggccaccggcatgaagctcggcaaggagtccaggggcgtcacctacaccgaccaccgcaacatcggcatcgcagtcttcgctctcggcacccttcaagttctggcgctgttcctgcggccgaagaaggagcacaagttccgcgtgtactggaacacgtaccaccactcggtggggtacgccgtcatcgtgctgggcgtcgtgaacatcttcaagggcatgagcatcctgggcgtggagcagcggtggaggacagcctacatcgccgccgtctgcgtgctgctcgtcgccgccgcggcgctggaggccgtcacgtggggcgtcgtcctcaggcggcgcaaggccgacggcaagaccttcagcagcgcacccaacggccacctgccgcattccgtctccgtgtgagtgggctctcgattgtatttaccggattgttatccttagtggcgtgtgtgactacgatagtaggtttagagtttgctggggttttggcctgccggcttgtattgtatgtccgttttggacggtcctctattgctctgcatacgtacatgcatacatggcatttttgtgtatgtgtatgcatccccttcccttcccttccagtgttgtgttgagctcatctagaaaatgggcacagctggg

SEQ ID NO: 141286 - DNA, 384 bp, Zea Mays
atgtgggagcaatacaatgcaattacacatgttgcagtaaagccgccatttgggtgcactaactggatcaagaatcagggtaccactacactcaggacaagcacaaactccctgagtgatcatagattgcttgcatgtcgggtgaggacaaaggaagcatggcatgccggcccctttcccaaccttgccggtgtcatcgagcttgagagcaccaaagagtttgtcgatgccttcaaatggaggacaattatagcaaaaagggcacagtgggaaagattttgcatcaggtcccaccatcgagaacaaaagcaactcaaaaccatcaagagggcatacgatttccttgtaaagctggaaagacaagaactattaatcaaagagtag

SEQ ID NO: 141287 - DNA, 387 bp, Zea Mays
atgagccctttgttcctgcatcaaaggcgcatcacggatccgttagtaacgagcgcgcagatctggtgcgtcgccggtacctccatctcatggagggaggaaggcagagaggcagagcacacctacgtctgcttggagaaggaggagggccccgcggcggaggcggaggaaggcgaacgcttgctgcggaagatcatgtacgccagcgggagcaccacgccggccatcatgatcgctgcccccaccaggtacctcgccggcgaaggcgcacccacctccagctccatccttgatctctgtcgcttcgctggatttggatctgggggtgggtttccctggaaacccggggcagagggagggagggaggggcgaccgggcgaggcttga

SEQ ID NO: 141288 - DNA, 168 bp, Zea Mays
ggtgcaccagagaccatccaagagaaattagttgatttacctactgcatatgtggagacatataagaaatacacacggcaaggttcttgggtcttggctcttgcatataaattgcttcctaagatgccttgtacttccataaagcccctggggtcacaacaaaagtaa

SEQ ID NO: 141289 - DNA, 109 bp, Zea Mays
ctacctctttaaaatcaaatccaggggtgaatttctgtacccgaggtgtgccgtcatgaacagttttcgtttcgagaagggtggaacactggaactgcttcccctgtaa

SEQ ID NO: 141290 - DNA, 103 bp, Zea Mays
cgtacatgcatcttatgggagctgaaactccccatcacaactattttatactggtattcgattaaggctgtcaaactgaaacaaaacgcaaaattgagagaga

SEQ ID NO: 141291 - DNA, 1368 bp, Zea Mays
acccaggctgcgtcctggtccttgctcttatcctatcctgcttttcttcgcttctctcttccccgctctctcattcttctcatacaagtctgttgttggagggacacacgtatccagcccaccaaagatttactcaatttatcccagacgagacacacactcgcaacgaccggaccgtcgaatctcgcgactccggcgacatgtcgacggcggtggcagaggtgcggccgccctacgggttccccggatccgggaaggggagcggcggcgggtatgggaaggaggcgcacttggccgcggccgggaagaggaggagcgacggcttcttcatagaggaggaggaggttgaagaagacgtgctgactgacaactcgtcgatcggggcgccgtctccctcgggatcgtcgatcggtgagaactcgtcgtcggaggccggcggggacgacggggaggaggaggtcgagagcaagctcaaggagggtgatgtgctcggctgcttggacgcgctcgaggactccttgccgatcaagtgagttcataaagcttttggttttttctgcgccttagatcgcgcatgctatttcgcttgattctgcgaagtgggatctttttaattgaaaaggagataattttttgggacgtaccaacattgctaaagcactccatggatttccgcctcttcatttataacagcgagcgaagagagagaaaaaagacagtagctttccccaaaatcggctcaaattgcgcatggtattaactcagacttataatttggttgatcaggaagggcctctcgagcttctactccggcaagtctaagtcgttcaccagcctcgccgaggccacagcggcggcggcggcggtcaaggaggtgctggccaagccggagaagcccttcaacaagcgccgccgcatcctggccaactggtccaggagagcctcctgcagctcgctggccacggccacctacctgcctcagctcttgggccccgaccacgccgtggccgaaggggacgagggcgaggaggacgactccgacgacgacgtggagtacagccaggtgccgcaccacggcaagaacgtcagggacgcgccgacatcgccactgccgctccctagactcggcggtgttggcagcatgcagaggaggaacggccttgggagcttcagatctcctaggtccttctcgctgtctgatctccgtaatagcagtgctgatggtagtgattagcggccacagatttgcttgcagctctggcctctcctggccagtaagtagagatgtagtagccacttgctatatggttccggtgtataagatccaaatttgttgtgttcaacctcctcctagctttctttaacctc

SEQ ID NO: 141292 - DNA, 1185 bp, Zea Mays
acccaggctgcgtcctggtccttgctcttatcctatcctgcttttcttcgcttctctcttccccgctctctcattcttctcatacaagtctgttgttggagggacacacgtatccagcccaccaaagatttactcaatttatcccagacgagacacacactcgcaacgaccggaccgtcgaatctcgcgactccggcgacatgtcgacggcggtggcagaggtgcggccgccctacgggttccccggatccgggaaggggagcggcggcgggtatgggaaggaggcgcacttggccgcggccgggaagaggaggagcgacggcttcttcatagaggaggaggaggttgaagaagacgtgctgactgacaactcgtcgatcggggcgccgtctccctcgggatcgtcgatcggtgagaactcgtcgtcggaggccggcggggacgacggggaggaggaggtcgagagcaagctcaaggagggtgatgtgctcggctgcttggacgcgctcgaggactccttgccgatcaagaagggcctctcgagcttctactccggcaagtctaagtcgttcaccagcctcgccgaggccacagcggcggcggcggcggtcaaggaggtgctggccaagccggagaagcccttcaacaagcgccgccgcatcctggccaactggtccaggagagcctcctgcagctcgctggccacggccacctacctgcctcagctcttgggccccgaccacgccgtggccgaaggggacgagggcgaggaggacgactccgacgacgacgtggagtacagccaggtgccgcaccacggcaagaacgtcagggacgcgccgacatcgccactgccgctccctagactcggcggtgttggcagcatgcagaggaggaacggccttgggagcttcagatctcctaggtccttctcgctgtctgatctccgtaatagcagtgctgatggtagtgattagcggccacagatttgcttgcagctctggcctctcctggccagtaagtagagatgtagtagccacttgctatatggttccggtgtataagatccaaatttgttgtgttcaacctcctcctagctttctttaacctcagattccgaagaagtgcatcgactgacctaacaactctggaggtatcattaacaaatggtgatcatggtagtca

SEQ ID NO: 141293 - DNA, 200 bp, Zea Mays
atgcatctccgtattggaatgaaagttgacctttggcgagcaaaacacaaagaagcaagcacatggcattctcgcttattctttggatcaaggtgtcagtatcctagacacagtagaaattttccaactaacaaggaaaatcgagagacaactgatctttatattagcaggtggatgcaatcaaaaccaaaatgcaaggt

SEQ ID NO: 141294 - DNA, 1731 bp, Zea Mays
atggcctcacccacggtcgcctccccgatccgggcgagccccgtcgacaaccccaccgtcgcgccctcactggcctcctgccgctgcgccttatcgctagatgctcgacatccccatccgcgcgctcgaggcagaggccagggacaccaagatgagcccgaccgcgaccgcctagccatcagctccaaagaagaagccaggggaccgatggacgtcagtgttccgtcgtggtggcccgctagatccatattcagcaagaaagatatctcgccatgccggcccagggccgcagcccgtcaccttcctccccccgcacccgccgtgacagccgcctccccacgcccgcttacccgactggccgcacaagatgcccacagtggcccccatcgcgcccacccgctccccccatccaccgcgacctcagccgccacgccgacgccatccccgtcctctagcgcgttgtcgccgtcgtcacaccgccaaaggtgcctgccccctgctaccgaggtcgacgaccagcagcggcaagctgccgagctcgacgacacgcacgccatgcttggccatatggacgagtccatcgcctgctacgagaaggggctccagatccagatgtccgcgctcgatgagcgcaatccctgcctccctgagacctgcaggtaggtgacaatgtcatcaagggcccctccccctttgtcgcttctcgatctagatctcgcctctccctaaagcacgggttgcacctccccccgtcacccactccttccttggcttctcccgggaaacgaccttcagtctttacaggtatgaggtcttattgtgtgccatcattttcttttgctattcattcccgaatccccactgtgccctccagtgatgatggggtatgagctctgaataacaaacaaggtaaatgtttactcttttgagtagctgaattttgctatgatgtagtaaattatactagtaaattatacttgtactgaatatgaatataagaaaaaaatactgcactaattatttttctacgctctatattgtaaaataataggaatataataaaaagctgacataaaagctaatttacaacatccctttattttactatgttttatgataaataccttgattttccttgtaagttgtatcttttagtgattttcaaagaaactcctatttgcttggtgctttttctgtaagcatatgttgattaaatctttgtgtattctttctgtacactaatttaacttatcattattctgtcatccagtatgttgtcttatttgaatggttcatttccttctttaggtgattgacaaggtttaggaggaaacttccaaaagccggtcaagtatggagtgcttaacatcactttggcaacttatatttttttacatgtttgctttgtttgttaacaacataatttatgggctgacaatgtgatcatgtattctttctggtagtcttcgtgtcactgcttgcagttgcaggggagggatcatggctttcttttattttccatgtgcaatgtttaatttaggtgatgaactccaaagcttatcccattgttttctagcaagagctaagcaatactggatggagaacatttatctttttaataacgagtaaaagcataatggcatgcttgtgtttagttctctgtttgttgaccaatcgctatatttaatcttgattttttttatctataacttgaatttcaaagattcaata

SEQ ID NO: 141295 - DNA, 643 bp, Zea Mays
tatataatcgttttgcactaatattttgttaatttttttgtataccgttgcaacgcacgggcacctaactagtatgagactatgagtacatcaagtgcattcccttagaactcttgttgtgtaaaaaaatgtgtaacatgtcttggtacagagattaatttggtttgtgttttttagactgcaattatatctgggttctcagccttgccatggttagtcaagcccctctatgattttatcagttgattcaggtggttgattatatggtggttcagagagctcgaggtgaatcacagagtacatatagatctctccactccagtcactatgttgggaatcctcagcctttggaggaatcatgagtgcatacttcagtggttctccagtcacttatggcgtaagatttgtctttggtgttacagcacttttgccactgttccgagtagcagagaaggacaactctggcaaactgtgaagaaaataaaagattttcacaagcggaatcttcagaatctgaataaaggagttcgtgggaatcagttgtaccaaaaactggttcagttttcgtattccaagcatactactggaagttcacactgatcggcgacaaactctcgcccaaggagaagttgaaggaggatca

SEQ ID NO: 141296 - DNA, 2152 bp, Zea Mays
gaagaaacagaagagttgagcaagatcacgctagagaataaggatattcagcttgatatcaatataagagtgtttgatggagccgaccctatggagctgcatgtttatgattttaaaggacctggtgtaaccttatcaatgtacaatagcgatgagtttattaggccttttgctaagtcctccatggatatggctctttcaaaaaagtcgtctcttcatctcagcaccaagaatacaatcatcaagaagtatgacgacaggcatggatcatctatgtttctacaagctcgcggtcacatttattaggccttttgctaagttcatggatatggctctttcaaaaaagtcgtctcttcatctcagcaccaagaatacaatcatcaagaagtatgacgacatgcatggatcatctatgtttctacaagctcgcggtgatcaacttgctattgggaaagaaactgcacgtcgtttgggaatgggtactaatatgtacccttcctctgctttactcagacagaataaggatgagtcaattgcttccttgccaattgatgaattgatcgagaaggctgatggctttgctggtgtctttccagaacacaagtatgagatcgtgaaaggcttgcaagcaagaaaacatatatgtggcatgactggggatggtgtaaatgatgccccagctttgaagaaggctgatattggtattgcagtagcagactctactgatgcaactcgtagtgcttctgacattgtcctaactgaacctggccttagtgtgattattagtgctgtgctgacgagtcgggcaattttccaaaggatgaagaattacacgatctatgctgtatcgattaccatccgtattgtgcttggttttatgcttcttgcgctgatatggaagtttgacttcccaccatttatggtcctgatcattgccatcctcaatgacggtaccattatgactatctcgaaggacagagtaaaaccatctccacaaccagacagttggaagttagctgagatttttgcaactggagtagttcttggtggttatttggccatgatgactgtcattttcttctgggctgcatacaagactgactttttcccgcggctgttccacgtcgaaagcctcgagaagaccgcccaggatgactttcagaagttcgcctctgccgtgtaccttcaagtcagcacggtcagtcaggcccttatcttcgtgacacggtcgcgcagctggtcgtttgtggagcgtcctgggttcttgctggtcttcgctttcttggtggctaagctgattgccactctgatcgctgtatatgccaactgggcgttcactgcgatcaagggcattggatggggctgggccggtgtcatctggctctataacatcgtcttctacttcccgctggacatcatcaagttcctcatccgctatgcgctgagtgggagggcatggaacctcgtccttgagcagaggattgcgttcacgagcaagaagaatttcggcacggaagaaagggagcgcaagtgggcgcatgcgcagaggactctccatgggctccagccgccagaagcatccatcttcgagaacaagacgacattcaatgagctgaaccagctcgcggaagaggcccgcaggagagccgagatggcgaggttgcgagaagtgagcaccctgaaggggaggatggagtcagtggtgaagcagaagggtctggacatctagaccatccagcagtcctacactgtgtgactgactgactgacgacgacggggtttatagaggtttcttcttatactatacaatctgtactaggtagcaataaggatcaaggaaggaacccctatatattggctgcggttcgcaggaaatgaatgatggtaatatttatgatgtcggtgtggtgcttctgtcgccaactctcgaccatactaccctcaactcacccccggcaccaccggcaggcattgatattcagagatgaggtatagtagtctgtagcctctagtagatgctgatgaattgatgatatagtacatttttgcttgctttcttgcttgtttgttgttttccttggttctgctctgggtgttttgatgcttgctggctttgtgctattcctgattcctctaaatctgaagtggtagc

SEQ ID NO: 141297 - DNA, 1693 bp, Zea Mays
aaaaacatttctcgaaccatataaatccaggaaccacccccgtgatttcgaaaatccaatctcgagctccctttccctctccactgcgactgcagcgtgctcctgttctcgattctcgaagcctgtatccgtctgtcgagccatggcgaagggaagggcacacccgtcgaagcgacccacccaccaacttctcgcggctgtcctatccgttttcgttctcctcccgctgctcgtgccggcggcggcaactgtggctgtggcggtggcggtggcggaggggggcgggaagcagttggcggtcgggaaggacgagggaaaactggtctcggagggggatgctggtggaggcgggttagtggaggagaatgaattcgcgggtggctttggctccctcgacagcatgctgcagtgggcgatcggaaattctgatccggagaagctgaaagagggggctgctgatgtgcagaagttatctgcagatgaactgctcgagcggcgtcaggagatcaaggagttgatggagaagttaaagatgccatcagacgctgacttaatgaaaatcgcaattgatgacttaaataattcttccatttcactggaggatcgccaacgcgcactgcaggaacttttagttcttgttgagcccattgacaatgctaatgatcttgaaaaacttgggggcctccttcctgtgattcaagagcttaataatgcaaatgaagaaatacggaccacctctgcatgggtccttggtacagccagtcagaataatgaacttgtacaaaaccagatccttggttatggagctttggtgaggttggtgaagatgggttattccacatctacagaagaagctgcaaaagcattgtatgctatatcatctttgatcagaaataatgtaaatggtcaagaagcattccattcagaaaacgggagtgcaatgttgcagcacatattggtcagcaacaatattgatgttaggctacagaagaaggcagtgtttttagtaacagatttggcagactttcagctaaattccggaatcgcgcaacttcctttcttgagtgaccgtctttttctgaagtcaatagtcgatatgttatcaaggtttgacctagaccttcacgaaaaagtattattggccatcaagagtctgctgaaactttcctcaactgatgtggaggattttgagttctatgatctcgatagtgtactgctcagactaggggtacagttggaggacttgacaccagaggatcaaaaggagttcgctgtggaggttgatgccctccggagagaagttcaaacactcttccaacagaagctcaagcagggtaaagcgacctcgacatgatgttcggatgaccaccagaagatttgcccgtctagatggaagtagaatggatcagcttttgtgggatgctacagctagatggcggacttgggttttcttcttgcactttggcaaggtacatgagggcatgataggttaggaagtaaggcacgtgcttatgactccattttggcaaaactatatgattctcgcaacgttctgtgatatgggcactgcaacgaaggaattttttttccttgttccgttgcagctgtagcttcattttgagaatgattgaacttgatgttgatcagatcatttgcgagggagctaaattgagaatcgctgtctgactatcta

SEQ ID NO: 141298 - DNA, 1806 bp, Zea Mays
cgaaaatccaatctcgagctccctttccctctccactgcgactgcagcgtgctcctgttctcgattctcgaagcctgtatccgtctgtcgagccatggcgaagggaagggcacacccgtcgaagcgacccacccaccaacttctcgcggctgtcctatccgttttcgttctcctcccgctgctcgtgccggcggcggcaactgtggctgtggcggtggcggtggcggaggggggcgggaagcagttggcggtcgggaaggacgagggaaaactggtctcggagggggatgctggtggaggcgggttagtggaggagaatgaattcgcgggtggctttggctccctcgacagcatgctgcagtgggcgatcggaaattctgatccggagaagctgaaagagggggctgctgatgtgcagaagttatctgcagatgaactgctcgagcggcgtcaggagatcaaggagttgatggagaagttaaagatgccatcagacgctgacttaatgaaaatcgcaattgatgacttaaataattcttccatttcactggaggatcgccaacgcgcactgcaggaacttttagttcttgttgagcccattgacaatgctaatgatcttgaaaaacttgggggcctccttcctgtgattcaagagcttaataatgcaaatgaagaaatacggaccacctctgcatgggtccttggtacagccagtcagaataatgaacttgtacaaaaccagatccttggttatggagctttggtgaggttggtgaagatgggttattccacatctacagaagaagctgcaaaagcattgtatgctatatcatctttgatcagaaataatgtaaatggtcaagaagcattccattcagaaaacgggagtgcaatgttgcagcacatattggtcagcaacaatattgatgttaggctacagaagaaggcagtgtttttagtaacagatttggcagactttcagctaaattccggaatcgcgcaacttcctttcttgagtgaccgtctttttctgaagtcaatagtcgatatgttatcaaggtttgacctagaccttcacgaaaaagtattattggccatcaagagtctgctgaaactttcctcaactgatgtggaggattttgagttctatgatctcgatagtgtactgctcagactaggggtacagttggaggacttgacaccagaggatcaaaaggagttcgctgtggaggttgatgccctccggagagaagttcaaacactcttccaacagaagctcaagcaggcacatagctgaccttgtaccttaaactggagtccagctccagcaatttgctatgctaacttgcatctcttctgcttacaaccagggtaaagcgacctcgacatgatgttcggatgaccaccagaagatttgcccgtctagatggaagtagaatggatcagcttttgtgggatgctacagctagatggcggacttgggttttcttcttgcactttggcaaggtacatgagggcatgataggttaggaagtaaggcacgtgcttatgactccattttggcaaaactatatgattctcgcaacgttctgtgatatgggcactgcaacgaaggaattttttttccttgttccgttgcagctgtagcttcattttgagaatgattgaacttgatgttgatcagatcatttgcgagggagctaaattgagaatcgctgtctgactatctacctactgtttgctgtttcacacgtgtgtcgtactgtagccacaagtcctggaacaaaacagcagggtgaatccttt

SEQ ID NO: 141299 - DNA, 261 bp, Zea Mays
atgaagctgctgttgtccaacccctacggcttcagcagctccgacgacgacggcgaaaccgacgtcttcagcagcgacggcgaggacgacgaccgcgccgccggccgcggcagcaagaggccgggcgagtcggcggcggagaccttcttctcctcgtcacgaagcttctcgtcggactcctccgagttctacaccaataagaagcagcacaagaagaagacgacgacgaaggcaaaggcgaagggaatgacgaggaggtga

SEQ ID NO: 141300 - DNA, 106 bp, Zea Mays
tttgtttctacctataggtcatctattgtgcctagctatagcctgagtgactacaaagctatgatgtatgggaaataccgaaattccaacggtaaatttgaatgta

SEQ ID NO: 141301 - DNA, 925 bp, Zea Mays
aaagttcccgtggtcgtcccacactcccacccctaccaacgctctgcgccaacgaacgcgtccgcaagtcaaaccaggcccggagccaccagcaaccaaccgagcgcatggaggccgcggcggcgaccgcgctcccgttcgcggcggccgtccccactgcctggagggtgcgcgcgagcccgcggacgcggcggcgctccgtggcggcgaagctggagcgcgggctcggcaagggggttcccaccaccaactacgtggtgccgctcgacaaggccaccgggatgacgcgcccgctcgtcgagatcctgcgggacctcaacaagcgcgtccccgacaagatcatcgaccccgacactaacaccgtcaactggtaccatgccaacagaatgcttagcttttacgcaccaggttggtgtggagaagttcgtgatgttatctattctgagaatggaactgtaaccgtggtatatcgagtgatacttaaaggaactgatggagaggcatacagagatgccacgggcacagcacagttacatgaggggcgcagggaagatgctgttgcagccgcagaggaagctgcattctgcaaagcctgcgcacggttcggttttggcctgtacctgtaccaccaggatgattctcattacgacgaccacttccattgaggctcagtctgcaaaagagctgttcataagctgcaacatgcgttggatatgcctctcgaaaaacttcgcatctagaatcaatttttgctctttgcgtagtatcatactcataacacaaagaagtgaacctatgtagatgctattcgaaaccttctttttattaatattagaattcttattaatattattgtataattatttttttaatgtatatgtgtcggacacaatctattgattgatctatattctggcagtctact

SEQ ID NO: 141302 - DNA, 1033 bp, Zea Mays
acgcgtccaggctccaacagcacgacgcaaccgaccccacattccctttacgcgaagaagcatcaccgcgagtcgtcctcctctctgtcttcgctcggcgatctatcaaggaggccaggagggtgagggggagatggcggagaacccgcagctgtttgggaacgggatgccggtgccgttctacggcgagatgttcgtcctcgtccgggacggcgtcgagttccacgtcgacaagatcccgtcagctcctggaggtcatgtgaaaacaaaaggcacaatttacctgtccaatataaggatggtgtttgttgccagcaagcctgttggcaacttctttgcttttgatatgccactgttgtttgtgcatggtgagaagttcaatcagcccatatttcactgcaacaacatctctggattcgttgaaccagtcgttccagacaatcagaacagggccctgtactcaactcacaccttcaagatcttgttcaaggaaggcggctgtggtactttcgttcctctcttccttaacctgactgcatctgtgcggcgctacaatgagtttgaagcccagtctgctgctaacatggcaccgcgtgtggatcctctgcaagctgtgcagactcctgtcgatgatatgatgcgtcatgcgtatgttgacccaaatgatcctaccaagatttaccttcagcaacctgccccagaatcgcagctgaggaggagaaactaccacggcccagctgatgcgaattagcgcttgctggattggcaaaactcatggccaatgaactgttgtatctgtttgaacattttatcacaactggcttcaatatccgggagcccccgtatactgcgagtctgtggccgttacatcgtacataatgttgtgagttcgctcaataatgatgtacataagcagtggtgtgttcaaataatattgtagtgttaagtaactgctccgtgttgctgatttgctggtgtttcgtgattgctgcagacatagaaatcgtatatagttcaaatgatttgaattgaa

SEQ ID NO: 141303 - DNA, 473 bp, Zea Mays
ttctgtaatcagtcatcgtcttttgtcgacaagcccacaagcgttttcctctccgagtcctccctggcctctcaaccactcatcatcgccttcgcaggcatcgccctctcgccgggccgtccgattccgccatggcttccgatgagagcaaaaattcaaaaccagagaagccatcttcagcagctggtgcaggcctccccaatccgtttgatttttcttctatgagcaacttgctcaatgtatctctcttgctattgccttaatatgttttgattaagaatttaagatgcttatgttgtacatagttttttctgccggctgaaccacattcagattcatttggaattgttaattttactatagtgttgtatgctcgtcatgtgcaggacccatcgataagagagatggctgagcaaattgcaagtgaccctgtgttcaaccagatggctgaacagcttcagaaaagtgctcag

SEQ ID NO: 141304 - DNA, 1349 bp, Zea Mays
ttctgtaatcagtcatcgtcttttgtcgacaagcccacaagcgttttcctctccgagtcctccctggcctctcaaccactcatcatcgccttcgcaggcatcgccctctcgccgggccgtccgattccgccatggcttccgatgagagcaaaaattcaaaaccagagaagccatcttcagcagctggtgcaggcctccccaatccgtttgatttttcttctatgagcaacttgctcaatgacccatcgataagagagatggctgagcaaattgcaagtgaccctgtgttcaaccagatggctgaacagcttcagaaaagtgctcagggtgctggagaacagggtattcctgcattggatcctcaacagtatatggaaacaatgcaacaagtcatgcaaaaccctcagtttgtgtcaatggcagagcgtcttgggaatgcccttatgcaggatcctgctatgtccagtatgcttgagaacttgaccagtccagctcataaggagcagcttgaggagaggatggcccgtatcaaggaagatccatccttgaagccaattcttgatgagatagagaatgggggtccatctgcaatggtgaagtattggaatgaccctgaggttcttcaaaagattggccaggcaatgggtgttaaccttcccggagattctagtgtgtccactgtgctctctggacctgaagagactgaggaggaaggaggggatgacgatgagtccattgttcatcacactgcaagtgttggtgatgaagagggtttgaagaaagctttagaaggtggagcagacaaggatgaagaagatgccgagggaagacgggctttacattttgcatgtggctatggtgagttgaagtgtgcagaaattctccttgaggcgggggccgcagttgatgccctagataagaacaagaacactccgttgcactatgctgctgggtatggtcggaaggaatgtgtggatcttctgttgaagtatggtgctgctgtcacgctccagaatctggacgggaaaacccccatcgaggttgccaaactcaacagtcaagatgaggttctcaagttgctagagaaggacgctttcctatagagaagagaaccgccgaataaagtgtatcaagccgtcaaactattggttttgcattggtttatttatctcggtctggtatggttgtctgtagcttgtgaatttgatgttcttttcatagcgaatgccgtttttgaaccagtacttgtgtaagaagtacctaggcttgttcttgtcctccatatatgaatctttcacacttgtcaagaattgattacagttattttcaaggctatttcctccgttccc

SEQ ID NO: 141305 - DNA, 2528 bp, Zea Mays
attcacagaccgcgtatctccctcccactcttcgccatggaccccagcttccggttcgacccggacagctccgacgatgaggcgtcgggtgccccagcccggggtcgcctggcgcagtcgccgtgggagttctccttgtacgcggagtccgtggcggcggagcacgcgcggcgccgcaccacctctatcgacgagaagatcttgcacctgcgccagggatgcgggaagccggtcctctccgatggctcggagagcgacgtgagcggcagcggggaggatgacagcaacgagaaggagatagaggaggagagcggtgacgaggaggacgagcgggagatcgagggggttggcgacgaggaggagagcggagatcgggaggggggtgaggagggaggaagcgagctgggagaagagaaagatgcccatgaggaagaagatacggtcgagcagaatgaaacgagtggaccagttgatccttctaattttttcgcttcttcagagggggcaacttttcatgcaaattcgttccttgagcttaacttgtctcgtccgctagttcgagcttgtgaagcacttggctaccagaagccaactccgattcaggctgcttgtatacctctggcattaactggaagggacatctgtggtagtgctattacaggatctggaaagacagctgctttctctttgcctgtgctggaacgtctactttttcgtccaaaacgtgtacctgcaattagggtgcttattcttactccaactagagagctggctgctcaggttcatagtatgatcgagaagttagcccaattcactgatatcagatgttgtctcatcgttggtggtctttcaactaaggttcaagaagttgctctaagatcaatgcctgacatcgttgtagcaacccctgggcgtataatagaccatttacgcaactctctttctgttgggcttgaagatctagctgttgtgatccttgatgaggctgatcgcttgctagaattgggtttcagtgctgaaattcaagaactgattcgtatgtgtcctaaaaggaggcagactatgcttttctctgctacaatgacagaagaaattgatgaacttataaaactttcactaaacaaacctgtacgtcttgaagctgatccttctctgaagcggcctgcaacgttgactgaagaggttgttaggatacgacgagcacgtgagtcaaatcaagaagcggttcttcttgcgctctgtttgaagactttcaagcgaagtgttatcatttttagtggcacaaagcaatccgcacacaggttaaaaataatatttggtctctctggcatgaaagcagctgaacttcatggcaaccttacacaggcccagcggcttgaggctctggaacttttcaggaaacaagaagtagattttctgattgcaactgatgtcgctgctcgtgggattgatattgttggtgttcagactgtaataaattttgcatgcccaagagatgtgaaaacttatcttcatcgtgttggccgcacagcacgggcaggaagagaaggctatgccgtaacatttgtaaccgatgatgatagatccctcttgaaagcaattgcaaagaaggctggttcacaactgaaaagccgcattgttgcagagaaacctgtggctgagtgtgcacaactgattgagcaactagaagatcagatttccatcatcattcgagaagaaaaggtggaaagagaagcgagaaaagctgaaatggaaattgcaaaggcagaaaatatgatagctcataaggatgagatatactcacggccaaagagaacctggtttgctactgaaagggaaaagaagcttttggtagcagctgctaaagaatctttgggtcaaggtaagagtacctctggaattattagtgctaagcaggctgaagacctccgtctgaaggagaaaaagagacgagagcatgagaaggacctaccaaggaagaaacgccgaagattagaggcccagcgagagatgctggaagatgaggatgaagatgacgaggaagcaaaggaaagtgatagagggaagaaactgaagaaaggccagtctctagtggatgctgcttaccgaaaggcaaagtcattgaaggcggctagcaaacggggtcctggtgcaagcaaaggaaagaaagagaagaatgcaagacaatattctgagaagactcctaacaggcatgaggagatgcgtgagctgttccagaatgatatgagtgaatggaaacagggacgctcctcaaagaaaaacaacaatttcgcgcacaaaaaatcaaaagcttttaatagcaaagcaagatacaagcgccgcaaatagaagactcggccatccccggatttatttacattctcgtctcagttttgactgactgaccctgaagaaatctctgggatccagatgtttccagttaccatgcgtttgcttgttgtaaacttcgtcatatcatgtattgaaacttaccgttttctgatgtctcattgatcttgggagagcta

SEQ ID NO: 141306 - DNA, 444 bp, Zea Mays
gcttgttgtaaactttgtcatatcatgtattgaaacttaccgttttctgatgtctcattgatcttgcgagagctatcctcagtttcgacatgtgccgttgctggtttcgtaggtcgtacttatctcaaaacttacttgccagacgttgttgtgtggaaacgtcgaccagcttgttatgttcctacgcctcgcatgcaatgacaagcttgcacccagtattccagcttttgcggatgtgtgatgttggtctttccgaaagcagattctcatttcaagagctattttagtgaaaattgttgtaaccatcttaaaaatgagtcaggtgaagcagtagtggaaaatggttctttttttggttatatggatgagaaaagcggtggagagccatctcatcgtgatgagctagttatgtttaatgggccaacaatcacatcatctccaatc

SEQ ID NO: 141307 - DNA, 781 bp, Zea Mays
ctgtattgttgcctggcccattctcgtgactgcttcctcgactcgaaaatcctccgaacagaacgcaggcaggcggcggcggagacaggatcaggttcctcgcggccggcgttaagtagggcggccgccctacatcgtcccacctgtaggtacgacactgcgccgcttgaaggaggctttgcggcgatggaccgggtcggcggcggcgaaaagcaactggaggattgcacagtagccaatgctctaggaacttggttcttctcagttgcgggtgctcttgttgctattcctgtgggcataaagaagaaatccttagccccactcgtcttcttcggcactactggaaccatgctggacattatcatgggcattacccagtgtgagcgagagcatgctgagcgggaaatgaagattttggaagcccagaaattttcggtcgatgcttcagctcagaacgaaagctctgattcctttggcagtgctgacaagtgaaacacttctcctgttttccctcacttgtgacctggcttcacctctgttaattagagttgttgctcagatgccaatttgacacctttaaatttctgaatacactattcctactccctcaataacgtgcaattgtgcatttgatcaaccattagtttttatatatattgtgaattgaaaacaaaatataaaaggttcagtcttgctcctcaagcaagattgccacatggtgaaaatagctcaatccattgtacggcttggtatgggactatatatatataatgtttttttt

SEQ ID NO: 141308 - DNA, 2186 bp, Zea Mays
ctgtattgttgcctggcccattctcgtgactgcttcctcgactcgaaaatcctccgaacagaacgcaggcaggcggcggcggagacaggatcaggttcctcgcggccggcgttaagtagggcggccgccctacatcgtcccacctgtaggtacgacactgcgccgcttgaaggaggctttgcggcgatggaccgggtcggcggcggcgaaaagcaactggaggattgcacagtagccaagtcagtgatatccccgctcgctctctctctctctctctgtacctcttcctccctgattgatggattagatagttaggtatatcttcccctgttggtagtaggtgcatgatcgggatttatttgtacttcgcatcgactgtcttccttattaggacgctaattgttgtggaggcgataagctggacccgtatttatcctatgatgctgctagcgatggcttctgttcgaaatgtttgctacgattttgtagcttgcttgtactgatagatgcattcttgtgcactgtgctgcgtgactgggaaaaaaaataactgacgtccctttgcagtcgtgcctctggaaatatatctttttacaaagatatagctaaattttatttgtgcacctcaatctcgttgcgtgaaagacaattcgttctgtcaagtcccctctgagctgactctctgagaggggacttactaggctgaatgtacttttgagttaccatcatagagatgctactgcttttacaaacaggcagggtgcaaaccacacaatcctcaatggaaaattagaaactgtttgccgttgtatgaaatgggctgcataatctttctagcttgctggtgacttaacagatttgttttgaggaaaaaaaagtctattgcttatcacaggaacatgctcattgaatcaaaagcatcgcaagaagtttgatctaacaatgtcagataaaagaaatttcagatgctttgcaataatgtgagtctgcagaaggtgtaaatgcttgcccctgaaacagaatttctaactaagaaaccagtaatatgtttgatgcatttgtcagaatgaaactgaggctgatatcagaaatggggaatgtgcacctatcaggttatatagaggatttcaaggaaaaatattgaattagactaaaataagatttgcaacatcttattttctgaaataaaaaggggctgtattctgggccatacgagttcctcagtattgtttgattactacagaaatacatttcgacttcatttctttactcctaagtttggtaaacctttcagcatttttcctgactgttaagtattgctgatacatccatggtagtttgcaaagcaaaagtctgtccgaaggtttacttacaatatgagatcttcaggctggatctcagtttgatttagggccagctggtttagttcagacttcaaattcagccattctttactgaggcatgttcatctaaattcacttgggaactgcattatgtctaagttttcactgtgtggggaatttgttgttcatggctatctaataatcaattggcaacacatttattgtgctacgttccttatatcatagttgggcacatgccaccgggagatggctcggtggagtcagcttgtggggaggagagtgctctaggaacttggttcttctcagttgcgggtgctcttgttgctattcctgtgggcataaagaagaaatccttagccccactcgtcttcttcggcactactggaaccatgctggacattatcatgggcattacccagtgtgagcgagagcatgctgagcgggaaatgaagattttggaagcccagaaattttcggtcgatgcttcagctcagaacgaaagctctgattcctttggcagtgctgacaagtgaaacacttctcctgttttccctcacttgtgacctggcttcacctctgttaattagagttgttgctcagatgccaatttgacacctttaaatttctgaatacactattcctactccctcaataacgtgcaattgtgcatttgatcaaccattagtttttatatatattgtgaattgaaaacaaaatataaaaggttcagtcttgctcctcaagcaagattgccacatggtgaaaatagctcaatccattgtacggcttggtatgggactatatatatataatgtttttttt

SEQ ID NO: 141309 - DNA, 108 bp, Zea Mays
atggggacatactactacaatgtgctcaaggttttgggtgatccccagaagagggcggcatatgatcagtatggcaaggaagggctgaaggcctttgcagatatctag

SEQ ID NO: 141310 - DNA, 333 bp, Zea Mays
atggataaagcagacaatgccataggaaggaagattgatgctacaggagatgattatggcgatcctgacttgttttctgtgatcatgttatgtggcattgttctcattggtgaaattggaggtatggctgaggaggatattgcaacattcatccaggtggtgagccggtgtacgggtattccaatgactcgacttggccataacgataaggagaggctggtcgtccttgctgacaggagggtggccatcgcattgccactgctgatgtacctatcaaatgttgagaagggtggccatcacattgccacggttgatgtacctatcaaatgttga

SEQ ID NO: 141311 - DNA, 1332 bp, Zea Mays
atgctcggcgcggcgctccgcctccgcgtccgcgtgctccgccgccgccgctcccaccgcgggcgccgtcgaggcaggcggtctctcggtcgggtcggggatgacgacgacgacgagggaggccgggagccggtgctgctagtgtccgggatgggcggctccgtgctgcacgcgcgccgccggtccaactccaagttcgacctccgggtctgggtgcgcatcctcttcgccaacctcgacttcaagaagtacctctggtcgctctacaacgccgataccgggtatgtggagccgctggacgacgatgtggagattgtcgtgccggaggacgaccacggcctgtttgccatcgacattcttgatccttcctggtttgtagaacttctccatctgtctatggtgtatcacttccatggtatgattgatatgctcataaactgtggatatgagaaagggaccacactatttggatatggttatgattttcgccaaagcaacaggatagacaaagcgatggctggtttgagagcaaaacttgagacagcttataagacctctggagggaaaaaagttaatttaatctcacattctatgggtggattgctagtacgctgcttcatgtctatgaatcatgatgtattcactaagtatgtcaacaaatggatttgcattgcttgtccattccaaggtgcccccggatgcatcaatgattctctacttactggattgcaatttgtttatggttttgagagcttctttttcgtatctagatgggcaatgcaccaattgcttgtcgaatgcccatcaatctatgaaatgttaccgaatccagaattcaagtggaaggaaaaaccaattattcaggtttggcgtaagaaccctgaaaaggatggaactgtggagcttgttcaatatgaagcaactgattgtgtgtccttgttcgaagaagctttaaggaataatgagctcacgtataacggaaagaaagtagcactaccattcaatatgtcagtcttcaaatgggccaccaagactcgccaaatcctagacaatgctgaattaccagatactgtgagcttttacaatatatacgggacatcttatgaaactccatacgatgtatggcttataggttgtcaatgtataaagttcaaggctgatgggttctctgcgaaagaaagagttggcgtcaaggccgaccaccgtggcctgctgtccgatgagaacgtattcaagcttctcaagaaatggctcggtgtgagcgagaagaagtcagagtggcgttgcgtgtctaaatcctactccaaagtgggtaattgggttgccctgtag

SEQ ID NO: 141312 - DNA, 105 bp, Zea Mays
gctcttttttctatttctagcgcgaaagcctttgcgcgttagtcacgcgcatcctaacttgctagatccgttgcgctgaagcgcagccgttttcttgctgcatcc

SEQ ID NO: 141313 - DNA, 442 bp, Zea Mays
atgacgttggaatcacggggagggggcgcgcgggcgggggcatgggcaagagagcgtgagcaggagcacaacgcagacatcgagatgtgggagaggggaaggcgagggcacgcccgcagcattcaaaacaggtggctgaagctacattcattttcatccctacctacgttctcctctgccactggactcgtcttcgtccagccgcgattctctttctcctcaaaggtaatgtatctcctccagtccccacccctgtgattctctcgttttttcttgttcggtatcgctgcagtgccaaatggtgggccgcatggttcaaacttcaaagcaaacttcggtttgcatctctccggttgagtttcatatgcgcgttgcctacggctgggtgtgtgaggcccttagaaggtaacctggaactctggaaggatgggccggccaatct

SEQ ID NO: 141314 - DNA, 129 bp, Zea Mays
gtttgtttgagttacaacttttgagtttttttttcctcaaaatatggctttctagcttttggtttatatctattggattttttctattgatttttaatagattttagcttatcaacacaccaaaaaaaa

SEQ ID NO: 141315 - DNA, 1227 bp, Zea Mays
tgcctctgcttctccccacgccaccgaggcagtccaggccaggacagggtgccacaaaaccaaaaccaaaccccaccaccactccgcacgagatcatttcgccagctcatcgccaccgccctcctccgctcccgcgtctccttcccctcgtcgtcgtcgggttggtgggtccacctctcgccgtgccccgccgtcgacccgcctcagaatcaaagataagtcaaaggaaaggtcggtatgcgccggtggttttgctgcacgaggtttaatgcttcatatcgtgaacatgaaaatgaacgtcccatcactccagaggagaaagaaggaaatggtttttctgttaaaagtgatcccatcaaggcaccaccttccattgaagtccctgaattatcatttgaagaattgaaagaaaagaccgacaattttggttcaaaggctttgattggtgaggggtcatatggaagagtatattatgctattctggacagcggaaaacatgttgctgttaaaaagcttgacgcttcaacagaccctgaacttgataatgagtttttgacacaggtatccattgcctcaaaactaaaacatgataattttgtggagatgcttggatattgtgtggaaggaaatcagcgtctagtggtctatgaatttgcgacaatgggttctctgcatgatatcttgcatggaagaaagggtgttccaggtgcacagcctggcccagcacttgattggatgcagcgggttaagattgctattgatgctgctaaagggctagagtatcttcatgaaaaggtgcagccttcaatagtccaccgggacatacggtctagcaatattcttctgtttgaggactacagagcgaaaattgcagatttcaatctttcgaatcagtctccagatatggctgctcgtttgcattctactcgtgtccttggaaccttcggctaccatgctcccgagtatgccatgactggccagctaactcagaagagtgatgtatatagctttggggttgttcttttagagcttctaacaggaaggaaaccagtagatcatacaatgcctagaggtcagcagagtctggttacatgggcaacacctagattgactgaggacacagttaaacaatgtgttgatccaagattgaagggagaatatcctccaaagggagttgccaaggtctggcttcaatccttccataccttgtgtgcgtgcgcttccatg

SEQ ID NO: 141316 - DNA, 1907 bp, Zea Mays
tgcctctgcttctccccacgccaccgaggcagtccaggccaggacagggtgccacaaaaccaaaaccaaaccccaccaccactccgcacgagatcatttcgccagctcatcgccaccgccctcctccgctcccgcgtctccttcccctcgtcgtcgtcgggttggtgggtccacctctcgccgtgccccgccgtcgacccgcctcagaatcaaagataagtcaaaggaaaggtcggtatgcgccggtggttttgctgcacgaggtttaatgcttcatatcgtgaacatgaaaatgaacgtcccatcactccagaggagaaagaaggaaatggtttttctgttaaaagtgatcccatcaaggcaccaccttccattgaagtccctgaattatcatttgaagaattgaaagaaaagaccgacaattttggttcaaaggctttgattggtgaggggtcatatggaagagtatattatgctattctggacagcggaaaacatgttgctgttaaaaagcttgacgcttcaacagaccctgaacttgataatgagtttttgacacaggtatccattgcctcaaaactaaaacatgataattttgtggagatgcttggatattgtgtggaaggaaatcagcgtctagtggtctatgaatttgcgacaatgggttctctgcatgatatcttgcatggaagaaagggtgttccaggtgcacagcctggcccagcacttgattggatgcagcgggttaagattgctattgatgctgctaaagggctagagtatcttcatgaaaaggtgcagccttcaatagtccaccgggacatacggtctagcaatattcttctgtttgaggactacagagcgaaaattgcagatttcaatctttcgaatcagtctccagatatggctgctcgtttgcattctactcgtgtccttggaaccttcggctaccatgctcccgagtatgccatgactggccagctaactcagaagagtgatgtatatagctttggggttgttcttttagagcttctaacaggaaggaaaccagtagatcatacaatgcctagaggtcagcagagtctggttacatgggcaacacctagattgactgaggacacagttaaacaatgtgttgatccaagattgaagggagaatatcctccaaagggagttgccaagcttgcggctgtggcggcactgtgtgtgcaatatgaatctgaatttagacccagcatgagcatcgtagttaaggcactctcaccccttcttcaacataaaccgcaaccaccggcagccactactgacgctacagcaccgtcagatgcctgactttctcaaggagctatgaatcatgaatgttaagagaaccattttctcttcggtgcgtgcgctgttctagatcactatcgtgtgcctatgaagtgatcagtgtcacacaagcaacagcattgtgggctaaagcatatctccacctttacttagcttggtacaggcaggagacttcccattgtcattaccgtgttctatgctgagtcatgtgctgctttcgttggccgggtgaggtgtgcttgttggccagcggtcgtgaccacctaattaccgtgttatggtcatcactgtaacatgcgaaggttctaatttttttttcatggtttgtttttcctcgtttttttgatggatcgtttttccttattttgtttgcctgtcgtctgattttgaactggcgcctccactgtacaacccactctgaatcgcgagactactcgtgtgcatgtttatgcgtgagaattgtgatgagatcatgcgcattgattaactactcgtgtgcatgtttatgcgtgagaattgtgatgagatcatgcgcattgattttattttcctggaaatacgcaggagagctaaac

SEQ ID NO: 141317 - DNA, 2713 bp, Zea Mays
ctcgtcactcggtcttttgtccatcaatccctctctttcccatcgccagatcacctggccggccttctcctgcaatggatgctaccatggcgttcacctccggaagccctacccccacgcgcttctactcttcagctttgctatcgttgcgcacccccaagagcctctctgtctacggcccatggcgatggcgtgggcgtgggcgccccctcctcgcgctccggcatcggtcccaggcccaggccgccgcagcggcggccggggcggccgaagcctcccaccacgatgttgtagttgtgggcgctggaatcgtagggcttgccatcgcgcgccacctcctcctccacacttcgctctccgttgccatcgccgacgctgccgtcccctgctctggtgccacaggcgcaggtactcttccttcggcgcctgcgttgatgcttcggtgcttcaggctttatggagttggatgtaatacatcctttggcgagcctctggcttcgggtttctaccttgggtggggttcgttgtgtgcagggcagggatacatatggatgtcgcaccggacgccggggactgacacgtgggagctggcgctgcggagtaagcaactttgggaggagctggcgaccgaggttgacggccagggaggcggcggagcacgggagaaattggggtggatgaggacaggaagcttgctagttgggagaagttcggaagagctgggcacattggacgaaaggaccaaggctctgtctcaggcaggcatacatgcggaattcttgtcagcatcttcattacatgcattagaaccggcactcagtgtagggaaagatggcggtgctatgttcttgccgcaagactgtcagattgatgcattccaggctgtctctttgattgagaagaccaataactcgtattcctcagaaggaaggtatagggagttctataatgatcctgccatgtcattaataagatcggacgttactggaaaagttgaagctgtccaaacttccagaaacatattgtatggcagaaaagcttttgtaattgcttctggtgcctggactcgatccttattgcatagtttcgtagaaccagctttgacgttggatattcctgtcaagccacgaaagggtcatcttcttgtgttggagaaattcgacaaggttaagttaaatcatgccctaatggaggttggatatgttgaccatcagattacaaagtcaaatagcacacacatagcttcagaatctagtgaagatgagcttggtgctttatcagtatcaatgactgcaaccttagatacaaagggaaatttagttctaggaagcagccgggagttcaaaggtttttcgagggaggttgatagatccgttgttcagtgtatatgggaacgtgcaggagagttttttcctgcaatgaagaatgtttcttttgatattgatcagaatactcaaatcagaatagggcatcgtccatacatgcctgatggaaagccagttattgactttattcctaatctctcaaatattttgattgcaactggacacgaaggaagtggacttactttggcactaggcactgctgaaatggtcactgatatgattcttgggaatcctggaaaagtgagctactcacctttttccatcaaacgcagattttcaggtaattttggtaaataaggctgaattattttcttttcttttcttgaaaaatattcttgtttttgtgattcagacttctgttgtctctctccaatacagtttaaaatcaggactgattttctatgtcttgaaagctaatttcaagacaattttatttatgtactctagttctttagttgcacacaatgtttttaaaataaagaactgctggattgcagatcaaaccaatttatacttagcttctgatttgtgttgtttactcgagttcatgtcagattaatccatcacatttcaaggtgctgtgcactccatcgtttgtgtaaaatgctgtttggacgaaagtactgttctttcctctcagcaacttgatgctcttttgatctattaatgttggggtattttaattctaggcactcagatggacatcttcttttctttatatatttgacagtagtaaaatgccaaattttggttagtggattgcatggatgctggggcatcctttacatctgtctatgtctaagtcatgtattctattggaatagtaaattttacttccagagcaaaggacaatgccagagggcttgctagttgacgaagtttgtcaagcatgcaactggtatatgtgatctccttcaacccttatttccaccagatccagtaatcctgcttttgcgttgtcttctgatgctgtttagttgagggtgtggtacttcagtcagtaattgctgcttggaaactactttcttgtttcataaagtatctttgcacagtttttgactgaggctgctgaaattctctgttgagtaacgtctagaggcgttcctccagtccgatccacttttcatcatcaattcaaactctgggtaactgatgcgaccatcctgttcaatatatttataaaatgtcaggtatgctaaataagaatgtgttgtgcaatccaggacaatgaataaaaacgtagatggaaccctccaaccagtcttttagatttatactgaccctcgccatagtttgttatcttttattttgtcaaaaactagtttgta

SEQ ID NO: 141318 - DNA, 2587 bp, Zea Mays
ctcgtcactcggtcttttgtccatcaatccctctctttcccatcgccagatcacctggccggccttctcctgcaatggatgctaccatggcgttcacctccggaagccctacccccacgcgcttctactcttcagctttgctatcgttgcgcacccccaagagcctctctgtctacggcccatggcgatggcgtgggcgtgggcgccccctcctcgcgctccggcatcggtcccaggcccaggccgccgcagcggcggccggggcggccgaagcctcccaccacgatgttgtagttgtgggcgctggaatcgtagggcttgccatcgcgcgccacctcctcctccacacttcgctctccgttgccatcgccgacgctgccgtcccctgctctggtgccacaggcgcagggcagggatacatatggatgtcgcaccggacgccggggactgacacgtgggagctggcgctgcggagtaagcaactttgggaggagctggcgaccgaggttgacggccagggaggcggcggagcacgggagaaattggggtggatgaggacaggaagcttgctagttgggagaagttcggaagagctgggcacattggacgaaaggaccaaggctctgtctcaggcaggcatacatgcggaattcttgtcagcatcttcattacatgcattagaaccggcactcagtgtagggaaagatggcggtgctatgttcttgccgcaagactgtcagattgatgcattccaggctgtctctttgattgagaagaccaataactcgtattcctcagaaggaaggtatagggagttctataatgatcctgccatgtcattaataagatcggacgttactggaaaagttgaagctgtccaaacttccagaaacatattgtatggcagaaaagcttttgtaattgcttctggtgcctggactcgatccttattgcatagtttcgtagaaccagctttgacgttggatattcctgtcaagccacgaaagggtcatcttcttgtgttggagaaattcgacaaggttaagttaaatcatgccctaatggaggttggatatgttgaccatcagattacaaagtcaaatagcacacacatagcttcagaatctagtgaagatgagcttggtgctttatcagtatcaatgactgcaaccttagatacaaagggaaatttagttctaggaagcagccgggagttcaaaggtttttcgagggaggttgatagatccgttgttcagtgtatatgggaacgtgcaggagagttttttcctgcaatgaagaatgtttcttttgatattgatcagaatactcaaatcagaatagggcatcgtccatacatgcctgatggaaagccagttattgactttattcctaatctctcaaatattttgattgcaactggacacgaaggaagtggacttactttggcactaggcactgctgaaatggtcactgatatgattcttgggaatcctggaaaagtgagctactcacctttttccatcaaacgcagattttcaggtaattttggtaaataaggctgaattattttcttttcttttcttgaaaaatattcttgtttttgtgattcagacttctgttgtctctctccaatacagtttaaaatcaggactgattttctatgtcttgaaagctaatttcaagacaattttatttatgtactctagttctttagttgcacacaatgtttttaaaataaagaactgctggattgcagatcaaaccaatttatacttagcttctgatttgtgttgtttactcgagttcatgtcagattaatccatcacatttcaaggtgctgtgcactccatcgtttgtgtaaaatgctgtttggacgaaagtactgttctttcctctcagcaacttgatgctcttttgatctattaatgttggggtattttaattctaggcactcagatggacatcttcttttctttatatatttgacagtagtaaaatgccaaattttggttagtggattgcatggatgctggggcatcctttacatctgtctatgtctaagtcatgtattctattggaatagtaaattttacttccagagcaaaggacaatgccagagggcttgctagttgacgaagtttgtcaagcatgcaactggtatatgtgatctccttcaacccttatttccaccagatccagtaatcctgcttttgcgttgtcttctgatgctgtttagttgagggtgtggtacttcagtcagtaattgctgcttggaaactactttcttgtttcataaagtatctttgcacagtttttgactgaggctgctgaaattctctgttgagtaacgtctagaggcgttcctccagtccgatccacttttcatcatcaattcaaactctgggtaactgatgcgaccatcctgttcaatatatttataaaatgtcaggtatgctaaataagaatgtgttgtgcaatccaggacaatgaataaaaacgtagatggaaccctccaaccagtcttttagatttatactgaccctcgccatagtttgttatcttttattttgtcaaaaactagtttgta

SEQ ID NO: 141319 - DNA, 2575 bp, Zea Mays
ctcgtcactcggtcttttgtccatcaatccctctctttcccatcgccagatcacctggccggccttctcctgcaatggatgctaccatggcgttcacctccggaagccctacccccacgcgcttctactcttcagctttgctatcgttgcgcacccccaagagcctctctgtctacggcccatggcgatggcgtgggcgtgggcgccccctcctcgcgctccggcatcggtcccaggcccaggccgccgcagcggcggccggggcggccgaagcctcccaccacgatgttgtagttgtgggcgctggaatcgtagggcttgccatcgcgcgccacctcctcctccacacttcgctctccgttgccatcgccgacgctgccgtcccctgctctggtgccacaggcgcagggcagggatacatatggatgtcgcaccggacgccggggactgacacgtgggagctggcgctgcggagtaagcaactttgggaggagctggcgaccgaggttgacggccagggaggcggcggagcacgggagaaattggggtggatgaggacagttgggagaagttcggaagagctgggcacattggacgaaaggaccaaggctctgtctcaggcaggcatacatgcggaattcttgtcagcatcttcattacatgcattagaaccggcactcagtgtagggaaagatggcggtgctatgttcttgccgcaagactgtcagattgatgcattccaggctgtctctttgattgagaagaccaataactcgtattcctcagaaggaaggtatagggagttctataatgatcctgccatgtcattaataagatcggacgttactggaaaagttgaagctgtccaaacttccagaaacatattgtatggcagaaaagcttttgtaattgcttctggtgcctggactcgatccttattgcatagtttcgtagaaccagctttgacgttggatattcctgtcaagccacgaaagggtcatcttcttgtgttggagaaattcgacaaggttaagttaaatcatgccctaatggaggttggatatgttgaccatcagattacaaagtcaaatagcacacacatagcttcagaatctagtgaagatgagcttggtgctttatcagtatcaatgactgcaaccttagatacaaagggaaatttagttctaggaagcagccgggagttcaaaggtttttcgagggaggttgatagatccgttgttcagtgtatatgggaacgtgcaggagagttttttcctgcaatgaagaatgtttcttttgatattgatcagaatactcaaatcagaatagggcatcgtccatacatgcctgatggaaagccagttattgactttattcctaatctctcaaatattttgattgcaactggacacgaaggaagtggacttactttggcactaggcactgctgaaatggtcactgatatgattcttgggaatcctggaaaagtgagctactcacctttttccatcaaacgcagattttcaggtaattttggtaaataaggctgaattattttcttttcttttcttgaaaaatattcttgtttttgtgattcagacttctgttgtctctctccaatacagtttaaaatcaggactgattttctatgtcttgaaagctaatttcaagacaattttatttatgtactctagttctttagttgcacacaatgtttttaaaataaagaactgctggattgcagatcaaaccaatttatacttagcttctgatttgtgttgtttactcgagttcatgtcagattaatccatcacatttcaaggtgctgtgcactccatcgtttgtgtaaaatgctgtttggacgaaagtactgttctttcctctcagcaacttgatgctcttttgatctattaatgttggggtattttaattctaggcactcagatggacatcttcttttctttatatatttgacagtagtaaaatgccaaattttggttagtggattgcatggatgctggggcatcctttacatctgtctatgtctaagtcatgtattctattggaatagtaaattttacttccagagcaaaggacaatgccagagggcttgctagttgacgaagtttgtcaagcatgcaactggtatatgtgatctccttcaacccttatttccaccagatccagtaatcctgcttttgcgttgtcttctgatgctgtttagttgagggtgtggtacttcagtcagtaattgctgcttggaaactactttcttgtttcataaagtatctttgcacagtttttgactgaggctgctgaaattctctgttgagtaacgtctagaggcgttcctccagtccgatccacttttcatcatcaattcaaactctgggtaactgatgcgaccatcctgttcaatatatttataaaatgtcaggtatgctaaataagaatgtgttgtgcaatccaggacaatgaataaaaacgtagatggaaccctccaaccagtcttttagatttatactgaccctcgccatagtttgttatcttttattttgtcaaaaactagtttgta

SEQ ID NO: 141320 - DNA, 2071 bp, Zea Mays
actcggtcttttgtccatcaatccctctctttcccatcgccagatcacctggccggccttctcctgcaatggatgctaccatggcgttcacctccggaagccctacccccacgcgcttctactcttcagctttgctatcgttgcgcacccccaagagcctctctgtctacggcccatggcgatggcgtgggcgtgggcgccccctcctcgcgctccggcatcggtcccaggcccaggccgccgcagcggcggccggggcggccgaagcctcccaccacgatgttgtagttgtgggcgctggaatcgtagggcttgccatcgcgcgccacctcctcctccacacttcgctctccgttgccatcgccgacgctgccgtcccctgctctggtgccacaggcgcagggcagggatacatatggatgtcgcaccggacgccggggactgacacgtgggagctggcgctgcggagtaagcaactttgggaggagctggcgaccgaggttgacggccagggaggcggcggagcacgggagaaattggggtggatgaggacaggaagcttgctagttgggagaagttcggaagagctgggcacattggacgaaaggaccaaggctctgtctcaggcaggcatacatgcggaattcttgtcagcatcttcattacatgcattagaaccggcactcagtgtagggaaagatggcggtgctatgttcttgccgcaagactgtcagattgatgcattccaggctgtctctttgattgagaagaccaataactcgtattcctcagaaggaaggtatagggagttctataatgatcctgccatgtcattaataagatcggacgttactggaaaagttgaagctgtccaaacttccagaaacatattgtatggcagaaaagcttttgtaattgcttctggtgcctggactcgatccttattgcatagtttcgtagaaccagctttgacgttggatattcctgtcaagccacgaaagggtcatcttcttgtgttggagaaattcgacaaggttaagttaaatcatgccctaatggaggttggatatgttgaccatcagattacaaagtcaaatagcacacacatagcttcagaatctagtgaagatgagcttggtgctttatcagtatcaatgactgcaaccttagatacaaagggaaatttagttctaggaagcagccgggagttcaaaggtttttcgagggaggttgatagatccgttgttcagtgtatatgggaacgtgcaggagagttttttcctgcaatgaagaatgtttcttttgatattgatcagaatactcaaatcagaatagggcatcgtccatacatgcctgatggaaagccagttattgactttattcctaatctctcaaatattttgattgcaactggacacgaaggaagtggacttactttggcactaggcactgctgaaatggtcactgatatgattcttgggaatcctggaaaagtgagctactcacctttttccatcaaacgcagattttcaggatgatcgtttatccggaaaccctccttcagctcttcaagtgacaaactaccgtccttgtttttgtccattgtatggaacatctctttgaatttgccaatctcttccatcggtaaattcatggcgacgacctgcattaatcattggcaaaaaaaaaaagagagagatcagtcggcctgtcgcttgaaggaattaagggtagtaacagcgagttatctgcaacttactccaagtgccttcttcttaagcttgttcatagacgacaactgcttcagcctcgaccgaacaacctctccgagtgacacatttgaagccttatcagcattcttgagccaagggtgctctgtttttttccacgataaagtgcttatggttaaatacgcagcatgattaaaccatttcggttttttttcttcaatgatggcaataacaggctcttcaagaaaaaccttgtttttttttctaggaacggatgcagcctgcccgttctatttggttttcagtaaacttataagattgaacttaaggctactaaccaa

SEQ ID NO: 141321 - DNA, 1759 bp, Zea Mays
gtccatcaatccctctctttcccatcgccagatcacctggccggccttctcctgcaatggatgctaccatggcgttcacctccggaagccctacccccacgcgcttctactcttcagctttgctatcgttgcgcacccccaagagcctctctgtctacggcccatggcgatggcgtgggcgtgggcgccccctcctcgcgctccggcatcggtcccaggcccaggccgccgcagcggcggccggggcggccgaagcctcccaccacgatgttgtagttgtgggcgctggaatcgtagggcttgccatcgcgcgccacctcctcctccacacttcgctctccgttgccatcgccgacgctgccgtcccctgctctggtgccacaggcgcagggcagggatacatatggatgtcgcaccggacgccggggactgacacgtgggagctggcgctgcggagtaagcaactttgggaggagctggcgaccgaggttgacggccagggaggcggcggagcacgggagaaattggggtggatgaggacaggaagcttgctagttgggagaagttcggaagagctgggcacattggacgaaaggaccaaggctctgtctcaggcaggcatacatgcggaattcttgtcagcatcttcattacatgcattagaaccggcactcagtgtagggaaagatggcggtgctatgttcttgccgcaagactgtcagattgatgcattccaggctgtctctttgattgagaagaccaataactcgtattcctcagaaggaaggtatagggagttctataatgatcctgccatgtcattaataagatcggacgttactggaaaagttgaagctgtccaaacttccagaaacatattgtatggcagaaaagcttttgtaattgcttctggtgcctggactcgatccttattgcatagtttcgtagaaccagctttgacgttggatattcctgtcaagccacgaaagggtcatcttcttgtgttggagaaattcgacaaggttaagttaaatcatgccctaatggaggttggatatgttgaccatcagattacaaagtcaaatagcacacacatagcttcagaatctagtgaagatgagcttggtgctttatcagtatcaatgactgcaaccttagatacaaagggaaatttagttctaggaagcagccgggagttcaaaggtttttcgagggaggttgatagatccgttgttcagtgtatatgggaacgtgcaggagagttttttcctgcaatgaagaatgtttcttttgatattgatcagaatactcaaatcagaatagggcatcgtccatacatgcctgatggaaagccagttattgactttattcctaatctctcaaatattttgattgcaactggacacgaaggaagtggacttactttggcactaggcactgctgaaatggtcactgatatgattcttgggaatcctggaaaagtgagctactcacctttttccatcaaacgcagattttcagtaaattttacttccagagcaaaggacaatgccagagggcttgctagttgacgaagtttgtcaagcatgcaactggtatatgtgatctccttcaacccttatttccaccagatccagtaatcctgcttttgcgttgtcttctgatgctgtttagttgagggtgtggtacttcagtcagtaattgctgcttggaaactactttcttgtttcataaagtatctttgcacagtttttgactg

SEQ ID NO: 141322 - DNA, 2089 bp, Zea Mays
gtccatcaatccctctctttcccatcgccagatcacctggccggccttctcctgcaatggatgctaccatggcgttcacctccggaagccctacccccacgcgcttctactcttcagctttgctatcgttgcgcacccccaagagcctctctgtctacggcccatggcgatggcgtgggcgtgggcgccccctcctcgcgctccggcatcggtcccaggcccaggccgccgcagcggcggccggggcggccgaagcctcccaccacgatgttgtagttgtgggcgctggaatcgtagggcttgccatcgcgcgccacctcctcctccacacttcgctctccgttgccatcgccgacgctgccgtcccctgctctggtgccacaggcgcaggtactcttccttcggcgcctgcgttgatgcttcggtgcttcaggctttatggagttggatgtaatacatcctttggcgagcctctggcttcgggtttctaccttgggtggggttcgttgtgtgcagggcagggatacatatggatgtcgcaccggacgccggggactgacacgtgggagctggcgctgcggagtaagcaactttgggaggagctggcgaccgaggttgacggccagggaggcggcggagcacgggagaaattggggtggatgaggacaggaagcttgctagttgggagaagttcggaagagctgggcacattggacgaaaggaccaaggctctgtctcaggcaggcatacatgcggaattcttgtcagcatcttcattacatgcattagaaccggcactcagtgtagggaaagatggcggtgctatgttcttgccgcaagactgtcagattgatgcattccaggctgtctctttgattgagaagaccaataactcgtattcctcagaaggaaggtatagggagttctataatgatcctgccatgtcattaataagatcggacgttactggaaaagttgaagctgtccaaacttccagaaacatattgtatggcagaaaagcttttgtaattgcttctggtgcctggactcgatccttattgcatagtttcgtagaaccagctttgacgttggatattcctgtcaagccacgaaagggtcatcttcttgtgttggagaaattcgacaaggttaagttaaatcatgccctaatggaggttggatatgttgaccatcagattacaaagtcaaatagcacacacatagcttcagaatctagtgaagatgagcttggtgctttatcagtatcaatgactgcaaccttagatacaaagggaaatttagttctaggaagcagccgggagttcaaaggtttttcgagggaggttgatagatccgttgttcagtgtatatgggaacgtgcaggagagttttttcctgcaatgaagaatgtttcttttgatattgatcagaatactcaaatcagaatagggcatcgtccatacatgcctgatggaaagccagttattgactttattcctaatctctcaaatattttgattgcaactggacacgaaggaagtggacttactttggcactaggcactgctgaaatggtcactgatatgattcttgggaatcctggaaaagtgagctactcacctttttccatcaaacgcagattttcaggatgatcgtttatccggaaaccctccttcagctcttcaagtgacaaactaccgtccttgtttttgtccattgtatggaacatctctttgaatttgccaatctcttccatcggtaaattcatggcgacgacctgcattaatcattggcaaaaaaaaaaagagagagatcagtcggcctgtcgcttgaaggaattaagggtagtaacagcgagttatctgcaacttactccaagtgccttcttcttaagcttgttcatagacgacaactgcttcagcctcgaccgaacaacctctccgagtgacacatttgaagccttatcagcattcttgagccaagggtgctctgtttttttccacgataaagtgcttatggttaaatacgcagcatgattaaaccatttcggttttttttcttcaatgatggcaataacaggctcttcaag

SEQ ID NO: 141323 - DNA, 1772 bp, Zea Mays
ccagaaaaccccaactcccgcggcgcaaaaccctagtagaggttgcgcgggacactgctgtggttccggtgatggagggggaaggcgacgccagtggtagcgatgaggtggtgcagctggaggacgcggtggagctgctggtggagcacctcgtggtgccggtgctgccgcgcggccaggtagaccgggaggaggccctgtcgcctgaggctcaggaggctgtggcgcgtcaggtccacgcgacggttctcctgtacaactactaccaccggaagcagttcccgcagctcgagtttgccaaccccgaacggttctccatgtctgcctccctcagcgtcaccaacaaaaatctgctcatgtacctgaaccaggcgcagaaccgcctcggcaacggagtgggggccgggctctcggtcactgacaaggcaatcgtcgacgcctgcgacatcgctgaggcgctcgaccccacgaaggactcccccgagatgaccacgtggccgatctccaaggtcgctgttctgcttctcaatcggacaaagaaagagtgcgtgctcgagcatggctccgaaaccaagggcgtctggtcgatgtttgagaaagagatcacgacggcattgggtggttcgctcagcagtgacatgccagtgcaggggtcgagtaataaatccgtgggacttccttcggaaccgtacgtgcttcagcagattgcatattcagaggtggaactcaaaacaggtatgaagcatacaaatttgcgctttatcgaagaacatcgggtgtactcactgagtaagaaggggacagctaccatgttgttccttctgcactatgatcagactgtcgatagcaagcttaaggaaatgcctttagatgccctgatcgaaaggatgagtggtcctatatttcaaagtggtccgtacccaacaacgacatctgtagttgaatactatcatttactgccatataaggaggtcttgttaaacgtcctgaacagggactggcctttgtgttcttcactgagcgtgccaaaggagcaggtatttcaaaatgggaaatcttcatttccctctgaaatagaagaaagtttgaaggaacaagaagctaatagtaatagcaagactaaaatgaaaaaaatgccaacagacgtttctactccaaagaaaaataagcaggtagtaaaagcagttcgtgacagtggcaccaacgaaagcagcaccagcaaaaacaaaaaaggcagcaacacgaactgcaaaagaacatctgaagcctgcaagactaaagttgctacctacgcagagcatggggatggtcagagccctacaaaagacttacaagccagtgcccaaatggacaagagcagaacagagaagaacactaaaagtagaaatgtgccccaaaatatctttctgacaccagatgttggtcctgtaaataatgaccatgccttgaaaagccaaaaggagaaagtcactgataagtctggtggcatcacaggtaacatgaatgttcagaagtatgcgactctgcaattactttggaagatgcgagatgatacactccatgagcattttatgcttggagatcgatgtgctgagtacgaaatggacattcaaacaatcttgacagatatgtaccaggccagtgtccaccttatgggcccagacttcaacttgagtgtagatggtgatgtgagggttacccctcacgaggcacgagactcagcagcgtccaacatgctgtctcagcttcagcagaaggcaagggaaggctag

SEQ ID NO: 141324 - DNA, 101 bp, Zea Mays
cgacctttgtgagttctgttttgtatatattcaggattcggttgcttgccattgtagcgttatagaggctacaagtttaatggaatctgctgttcttgacc

SEQ ID NO: 141325 - DNA, 816 bp, Zea Mays
aacattgaactgcggtaattgcaacgggattccacattacagcatccattacactccacattcaaaagaacaaaagttaaccaatggcaggtttttcccatcaaactattattcttcatcaaatccgtaacataaaagggtatggcagaggcgcacaagcttgaccgagccaggggaatgaaggaaggctcacagcgtcgaaagccgcaccttgccattcgtcgcggcaggccattacgggatgtcccacggcttaggctcggggacagcgacgaccatgccatgcagctccggcgtgaggacgacctggcagcccaggcgcgcgtgcttgttgagctcgcggttcctggacgcgcgcgtgagcacgtaccgctcctcgtaggacggtggcggcagcttgtcgagccactcctgcgcgatgtggacctcgcactcggcggagcacgcgtcgatatcctcgaggcggtgggaggccggctcgatgagctccgcgttggcgagcgcgcggaggagtgtctgcccggagaggccgacgacctcgcggcgcgccccctcgagatcgatggcgaggacgcgcacgatgcgatcggcgaccttggcggacgccggggcggccgaggcggacgccggggcggccgaggcggcggccggggaaactgcgcagaaagagcgagcgagcgaggggtagaggtggagcgggaggcggcgcaggacgcgcgccgcgatcgccatggctgatgctcgggtagggttccccggtgggagatctggggagaccagaagaccggaggccgatgaggacctggggactgggag

SEQ ID NO: 141326 - DNA, 612 bp, Zea Mays
aaagggtatggcagaggcgcacaagcttgaccgagccaggggaatgaaggaaggctcacagcgtcgaaagccgcaccttgccattcgtcgcggcaggccattacgggatgtcccacggcttaggctcggggacagcgacgaccatgccatgcagctccggcgtgaggacgacctggcagcccaggcgcgcgtgcttgttgagctcgcggttcctggacgcgcgcgtgagcacgtaccgctcctcgtaggcggagcacgcgtcgatatcctcgaggcggtgggaggccggctcgatgagctccgcgttggcgagcgcgcggaggagtgtctgcccggagaggccgacgacctcgcggcgcgccccctcgagatcgatggcgaggacgcgcacgatgcgatcggcgaccttggcggacgccggggcggccgaggcggacgccggggcggccgaggcggcggccggggaaactgcgcagaaagagcgagcgagcgaggggtagaggtggagcgggaggcggcgcaggacgcgcgccgcgatcgccatggctgatgctcgggtagggttccccggtgggagatctggggagaccagaagaccggaggccgatgagg

SEQ ID NO: 141327 - DNA, 103 bp, Zea Mays
gtgcttgcaatttatcaaatcacagtaaaagaatcccacaattataacaacagaagattgtcgttgtcggcaaaatgcattccttaaccacaaaatcctcact

SEQ ID NO: 141328 - DNA, 2124 bp, Zea Mays
atggggtatgaagagagcaaaaaacatctcctcagtctcagctaccctgagctgcaatgtttgtgcaaaaggtataaccttcctgctaagaagacccactctcagttagcaagttcgctcgcctcgctgcttgaggcatctccatctcctgctcctcctcctgtccaattagcaaatatgaaagaagcatccacatgcaatcatgctaacaacaaaagaggcccatacaatggcagggatgatggtaaaccacttgtgcatgcgaaacatcaaaaaggagatcagacacctgttgatgaaacatctaaaaaggggattgacactggtacgagtatacctccagtttctatgaaccatggaagaccagaatatcatggccatctatcttctgacctgagaactgctcataatttacagtcccaatgtgacgtgggaattgcaactaatacaacaaatctagaatttgttggcaaacatgattgttcacctgctaacgtaattgatcaaatctgtccccctattattcaaaaatatccttctaatggtaatggtcaggcttccactaagttcggccgtatgaatgataacacagaaaagggttgtcggctgtctgataagatatcagcaaatgctgctgctgttcaattttctgtaatgtcagatgagggcattgatcttcttgttgatctgaactccagttcagcaacatgggccaagaacttcatggcagaaatgcacattacccctccgtctgaacatgggaatttctctagcttcattagcagtttgtcaactaaggatgatcatagcactgcgtcaccatctggaaatatcattgttgacattcagaacaagggagctgagaacattgttccttccactgattcatcacttgcttcagatgttggtgagagctcccgttcagtgctctatccagttgatacgactactgtgaactcagtgtcatccacgtctacagtggctggtaccccagttgaactttctgggtatcaggagggtgctccagtggtatgttcttcatgtttaacagctgatgttcagaacaatgtgacatctgatatgccaggtgcttcggataacgaggtgcttcctccagaacctgctgatgtctttttgcagtctgaaagaatcactgcaccagctgtatgtggttcagtgcaaccaattggcaataaatgcacaatgagttctggggatgaggttagaagtggctccaatgaagactcctgtccaaaatcttcaggaaaacaaactggagatgaaaccctaatggaaaatgaacctgtgaaggcagtagcagtggaagaaaatataggtcgtgatgacagtttgtccatttcttatcaactagcctgtaagacagtagcagaactgcctgttacagatgcccagtcgcctgctagttcttctggtcattttattgctggaaattttgacaacacacatccaacatcttccgccacttcggacaatgctattaattctctgacttcaaagttcggtgcagagctagcacaaagtcatgattctacggacaaaaagggacagaatgatgctgaggaggttgaggagttagagagtatgacaccagcagcctatagtgaacctcccagaaatatacaacttagcttacgaagtgcttccgctaaggtcaagccttctacactaccaagacgatcagcgaggcttcttcctaagcatctgtttcctctggtctgcgacttgttggatgatgtcttctgtgttttatatcaatgcaatataactattggtgcaggagcaatgatatttccgattccacaagttaaccggaaatcttcatgggtgatagctgtgtcagattctttcgcgcatagtgatagctgtgtcagtttacccccattttcttgggcatcacttgtctcaaatgaagttcattggaggttcgcaatttatgttccgtggcatcacaccggcacctacctatttgctggttatctaattttacatacggaggacctggattgccacctgctaattgctatcgcggccttgaccaaaaaggtaagagcatcccttctcaatcagagccgtggaaccatagccaaatttgccaagtgttaa

SEQ ID NO: 141329 - DNA, 160 bp, Zea Mays
ggtaattttacttaacttgacaaataaaactggatttttaaggatccactttagtaagcatttctgcaaaacagagtctttgattattgaaaagcctttccttgactcccttaagccagcatacccttgagagtcttttctttagtcgggtaagacttgc

SEQ ID NO: 141330 - DNA, 4099 bp, Zea Mays
cacccctctccgcttcgaaacccccgacgcgaaggaagctagggaaccctcgcgagtcgcgttgcctcgcccccgtccccttcagctggcccgccgccgcctcgaatccgccctggctcggagggcctcgcgcccccacggatcggattctcgaggttggtggatttggggctagggtttggggattgactacaatcgtggggttgtttggcgtaatttgaggagcaatgtacaacatggttaggaagtggacctgaggaggacggagggatggtggcgatggagggtaagggggacgcgtcagtgacgccggtgaggactagtgaccggctgcggcagcgtccaaagtactatgctcgtggctatatgtactacaatccagccatgaggaagaaggttaagtctaagaagcgaactgctgcatcacagattgctaagaaactgcttcgcaagccagctgcacggccaccacctgccgattgtgttgcagcaaatttgcgccgttcaacgagaaagcgaaggatttctgtaaatctggagggctatgatacagatagttccagtatggaagatgacgatcttatgagacctagatatcgatcttcaaagagtaaggggggaaacaatgctgcacataatgaagtgtcagctagaccaaagcgccagaagttgtctaactccatacctcgtcgtgaaggtttacggcctagaagatctttgcgaggacaaagactgcatccataccatgaatctgaggatgaccaggaaagctctgatgaacaaggtgcagaagatcaaagagaaaatggcaatgagattgaagaggatgttggtgatgaggaggaggttgatggaggtgatgaagctgaaggagatggagatgacgaagatggtgaggaagagcaagaaggaaggaggagatatgatttaagggaacgttcagaggttcgtagaccatcccctcgtaaggaaggaaagcacagaccacaatctcctcgtagagtactagttcacggaattggtccaaagaacagcaagtatttaaaaaaaggtgggtcgcgcatgcataagcgccctcgtttctctttgccagatgattcagatgattcccttcttgtggatgagccggacgagggcccatccatgccatggatgcgcagtgggaggggaagtatgccatggttgatgggtgggttggacatgcatagtccagcagcatggggcctgagtgttggagcatctggttggggtcatcagggtgacacttctacttcactcatgcctggggtgcaaactgctggaccaagttctaagggaggagccgacattcaacctctgcaggttgacgagaatgtgagctttaaagatataggtggactttcggagtacattgatgctctaaaggaaatggttttctttccattattgtatccagatttttttgcaaactatcacatcactcctcccagaggtgttctgctttgtggcccaccaggcacaggaaaaacattgattgcccgtgccttagcctgtgctgcctctaaagctggccagaaggtcagtttttatatgcgcaaaggagctgatgttcttagtaaatgggtgggtgaggctgaaaggcagctaaagttactttttgaggaagctcaaaagaatcagccgtcaattatattttttgatgaaatagatggcctggcacctgtgaggtctagcaagcaagagcagattcacaattcaattgtttcgacattgcttgctttgatggatggccttgattcacgtgggcaagttgttttgattggagcaactaacagaattgatgccattgatggagcattgcgtagacctggccgatttgatcgtgagttttattttcctttacctggctatgaggctcgagcagaaatactggatattcatacaaggaaatggaaggatcctccaccgaaggaactaaagatggaacttgctgctagctgtgtgggctattgtggagctgatttgaaggcattatgtacagaagcagctattagagcatttagagagaagtatcctcaggtctacactagtgatgacaagtttgtcattgatgttgattcggtcagtgtcgagaagtaccactttttggaagctatgtctacaataactcctgctgctcacaggggatctattgtgcattcaaggccactttcaacagttatcgctccatgtctgaagagtcatcttgagaaaataatggaacatatttctgatattttccctttcctttcatccatagattttagcaagttctctgctctctcctatggatcttccatccctcttgtttatagacctcgccttttgatatgtggtggtgaaagtgtcggactggatcatgtgggaccagctgttttgcatgagcttgagaagttctctgttcactctttgggactgccgtctcttctctctgatccaagtgcgaagacacctgaagaagctcttgtgcatatctttggggaagccaagagaacaaccccgtccattctatacatacctcagttccatctttggtgggatacggcacacgaacaactaagggctgtgttgttgactctgttgaacgagttgccctccaaccttccagttttattgcttggaacatcatcagtggtttttactgaccttgaagaagagtgtgcttccatattctcttctcgcaatgtgtatcaagtggatcaaccaagttttgacgatagattgaggtacttcagtatattgtttgagtcattgctctctttccaaatggaagaatcaagaaacaagtcaaagaaacagaagtctgctattgaccttcccaaagccccgaaagaagtggagggccctaaggtttctgagctaaaggctagggcagaagctgagcagcatgctgttcgtcgaatgaggatgtgcctccgagatatctgtaatcgcattttgtacaacaaaaggttcaatgtatttcacttcccagtattagaagatgaggtgcctgactatcgatcaataatccacaagcctatggatatggctactgtcttgcagcgggtggactctggacagtaccttaccagggcagcatttataaaggatattgatcttattgtctcaaacgcaaagacttacaacggggatgactacaatggatctaggattgtcagtagagcatgtgaactcagagatgtggtccaaggcatgttgtcacaaatggacccatctttggtgtccttctgtgataaaattgcttcacaaggggggccactgcaggctgtggatgatgaagatagagctattcttcaagcagcacctgttgctcagctggtttctggtactagaataagtgcaaggcttcgaaatgtacagcctgaagtaaacctgtcacaaagttatgaagtgctaaggcggcaaaagaaaagtgcagaaaatgaacaaagcatgactagagatgaaaagtctcctgaagatgtagatttgtcgaagccaactgacgcagaagaagctgcaaaagaaccagagtcaaatggcactacgaaagaagccaacgattcaccagccaaagaaccagaagtatctacttcccctgaacccatggagagtgacaacggcaaaattgccgcggctactggcgacgacttgttagaacagctagaagccctgaagcaacgcttcatggaactcactgcaagctatggcgtgccgcagctcgagaggctgtattccaagataatgaaaggagcaatagagttgacaagtaaagaaagcaacgaggatcataggcggttagtagttaggtatttgtggacattcgttgagaacagcaacaatttttaacctggcgccaataagattcttgttttccttgtacatcctctttggaacgaaacaatagtagccgttcatcttgggagttgtccccgttccatgccttgtaacaaatcttccaaatgctctagtgtcagtgacacagttttgccatgaaatgatgtagcaagtgaacccttcctagatttgtacctcagtttgatgaatttatgaggtggaattccctcttaatgcataacatgtgttaccatgcttgtta

SEQ ID NO: 141331 - DNA, 1167 bp, Zea Mays
aagttgcagctactgaccaagtgacctataactagggtggtataaacttatgaactaaggtggatcatgtgacgatttagtggatgaatgtcttctgcaattgggtttggttaacaattcattcaacgaccacaaaaattaagtgttttagcagtagaacagaaagacagcatggcggtagcgaattaagcaagaaacaggacaattgacaacagcaagtcctaaatagagataataataactacaacactatttttcaatgaataaaatcctatagtggtgggctggtggcttccctgctgtatttcccgttaaaaaacgactacaactactaagagaaagcagcaagcgagtgggcactgaccgttgaggaggcggcgcttggaagctggacgaaggcgccaccggatccgggccgcgcacgcgttcaccacttccagcatctctttgtacggccccgccgccgctgccatctccgcagcgaaagaacttaaaccgatcacggaggcatttcccccgtcctatatggaaatcaacggctgagatggatcaaagaacgagaaaacctcaagctaaccgtccgatctcctcagctgtgaatggggacaggggagcggggaattgcggcttcaactgctgctgcgagcctacgacctccgaggaggcggagcaatgctgcaatggagttatccatcccttgctagaactgcggtcatggccctcgtcagccccaacctcaaggtgagcgattccctcagtcggatgcttctctgcgtggttggggtgcaacttcaatgccaatttactcatagactgccatttgtagcttgttcaattggtctaaacacacaaccttcacaaagaaccaaccataatgattgtcgtttgcttcatgtgcagggtacagaaaacctgatgcagtcgttagtatctttcagtgacttctctgtttcagtgtgtactgaagagaatagtctgataaagctacaggtccatgtatctggcacaataacagattccatcttcaagaaagttttcacaaagaatgttgccgccgcacaaccccttcctggttttcgacgaatgaaaggagggaaaactccagacgtaagttcacattcaaaagtattgatttcagtttatataagttcgaactcatttgcatat

SEQ ID NO: 141332 - DNA, 202 bp, Zea Mays
ataccgaaagaagtcgctctacacttaattgggccatcaaaagtgaagaaagaaaccataatgaaaattataaatagcacggttgttgagtatgttcgaaaggagggcctgactgcatcaaagaatctgagtgttcagcatagctacgaagaacttgaagcagcatttgagccagggaaagaattatgctttggcgcgacag

SEQ ID NO: 141333 - DNA, 621 bp, Zea Mays
gggatgatgatgaaggcaataagatagggaacatgaaaccattggggcggcaatacagttttcttcgttacaaaatccggaaggtcaatttcgtgatatttgttgttgatggtgttgctgtcctcgagtcaatggatgacagcaataaaggatacactgagatacttcgtcaaacttttatgtatccgttcttgtcgattggagatgataaacctgttgttgttgtcacacatggtgatagactgttgatacagcaacgtgttcacgttcaagctgagttagcagagctactagatattcctgcccagcaaatttatgatataccaggatccaatgatgaccaaactgatatggttgtactggatatgctacattactgtgtccaacatgcagagcagaacctccctgttaagttaaactaccatttggaggtgcttgggcgtgaaactctcaataaaatggcagagcaattgatgggcttagatgcagtcattgaagccgccatattttcctatgcatcctggtcctgttgcttcgattttccgataaattagtgcggccgtagctacgttctgcacttgggttgtaactaagaaaacatcatggtgactacttgtcctc

SEQ ID NO: 141334 - DNA, 971 bp, Zea Mays
gggatgatgatgaaggcaataagatagggaacatgaaaccattggggcggcaatacagttttcttcgttacaaaatccggaaggtcaatttcgtgatatttgttgttgatggtgttgctgtcctcgagtcaatggatgacagcaataaaggatacactgagatacttcgtcaaacttttatgtatccgttcttgtcgattggagatgataaacctgttgttgttgtcacacatggtgatagactgttgatacagcaacgtgttcacgttcaagctgagttagcagagctactagatattcctgcccagcaaatttatgatataccagagcagaacctccctgttaagttaaactaccatttggaggtgcttgggcgtgaaactctcaataaaatggcagagcaattgatgggcttagatgcagtcattgaagccgccatattttcctatgcatcctgcgacttcctgctcgatttgctgtataataaatactacgagaggatgctggtgtttcataagataatcgtgcaactcatgaaaatccagtgttggtcatcattttcctgtctggttgcattgcctcttcttgttattcttgcagtcagcatgagcgaggtcgaggcattgtacaagctgttcaagaagatcaacaacgccttcatcgatgatgggctgattaacaagtaccattgccaaagatgtggaggcttgttctacagcagttgtacccagcaaaggatgatattacgtggacaagatgaactcaacatcgaagatgcaaatattgtgccattcaagtgcatacaagatcatcaaataaaaatcggtctaaaaacacaaaaagataacaatttaagaaaaacagatttgactcatgggtctgaggtgtcagcgagaggagcatgtgagacagttgtgtctgcgcgatacgacgagggcggggagaaggttgcacgcacgagagttgcgtga

SEQ ID NO: 141335 - DNA, 711 bp, Zea Mays
atggtggatgaaggcggcaaaggagaggcgcagccgcctggattagacccaagaacccgccgatctgcggcgaccagggcgaccggcgacatggatggcggtggccgaggagaggagtgggagggccccccggctacgtgctctcgctcccgacggcggcgctgcccctgcccgtcgccgtctcctgcctggacgccaccgtccggcgcaaggggcgcagccatatccgccaccgtggccatccgtcgggctgcaagtagcaacacgagaggaaagaatttggccgtgagtcgcgaccagggagctgtgcagatgccgaccatcatcgtctcggtggacctggaatgcagctgctgtcgtgccaagatcgagaaggtgctcaacaggatccaagaaagtcaacctttgagcaggtataagcctggggactggattgagggagtcggaggcgcaaaggctggacattttgtcttgcctgaggtcaccacattgctcctggtgggccctagaggttctggcaagagcacacttgtaaaccgaattactagggtctttgacaaggatgatgatccttttgcaccagatcgagcacaggtgtcatgcaattcaaaatcaaatggtacaatgtttcttcgcgagtatccaattccaaggaattcaagtgtcctgtcaccagctgtatacagattgcagaatgaggctgattcttag

SEQ ID NO: 141336 - DNA, 234 bp, Zea Mays
atgcgcccagcaccgcgcaccgggcgctcggctactccttgcctcatctacaccaggccatggctccctgatgtactccccattccggccatcgatccctagtgttggtgctccctttctcctgtgctcgctaggtattcggtgggacgcctgagccatgtgattgacgtcgttcttgtgtattcggaattgattgatgttggtaagatgaattgttatttcctactattgaat

SEQ ID NO: 141337 - DNA, 255 bp, Zea Mays
atggctttgtcgtcgaggcagctcgcggcggccctcgtcgccgtgctggtggcgctcgccttccttactgcgtgcgcgagcgccgcaaggccggcgcctgcagcgagcggcggcggcggcggggaggaggaggaggccacggccacgacgacgcccgcgtacctgcggcaggtgtacccggcggtggtggagacggtggagatgctcttggccaggctgccggccgggcccagcccgaagggccccggtcactag

SEQ ID NO: 141338 - DNA, 881 bp, Zea Mays
gtcgggtgtgtccccactctccatttctcagcgtgcgcgctctcttctctctcttttgtggtaactggcggcggccgacgccgacgccctagctcacgtcttcgtcggtcccttcccagccttcgtcgcgtccttcgccgtcgacgagaacacacgaggactgaagaatagagaaacatgtcgtctggtggtgtgaaagatttttaccggcagaaaaagaaaggaggcgtggcgaagacagcttcatcctcaaagaataagacacggcattacactggtggggcttctgttggtgcctcagatgcagctcagacatcagctctagtttctcatggctcctgggatctcaaagatgactttggtgatgaagaagagcagctgcgacagtttgacgtggacatgaagtttggtccttgcatcggtgttactcggcttcagcgctgggagcgagcctctgccatgggcctccagccaccagctcatctccgggacctcctactgcacgcggcatcgacaaagaatcgcggtggcggtagcccctctgtcgagtgcctttgggagggtaaagtctagaagaaatatcttctaatcccccatcccaggtcaacttcaggtggttaactggagacgcttgttgtaccatgcagcctcttgttgatgtatgttggcactcgtttgtttctccaaggcacgtgttcggtaacagtatatagatggctacctgtgcgtatgttggcgcacttcatgctgaattctcttctcgtattgagatcctgttgcgttgtctgtatctgagtgcgtcaagcacgcacatgaacacatctcctatgtgctgccagttgcattgtgatcgaccgttttgggtgctgcgatttgacgct

SEQ ID NO: 141339 - DNA, 826 bp, Zea Mays
gtcgggtgtgtccccactctccatttctcagcgtgcgcgctctcttctctctcttttgtggtaactggcggcggccgacgccgacgccctagctcacgtcttcgtcggtcccttcccagccttcgtcgcgtccttcgccgtcgacgagaacacacgagaaaaagaaaggaggcgtggcgaagacagcttcatcctcaaagaataagacacggcattacactggtggggcttctgttggtgcctcagatgcagctcagacatcagctctagtttctcatggctcctgggatctcaaagatgactttggtgatgaagaagagcagctgcgacagtttgacgtggacatgaagtttggtccttgcatcggtgttactcggcttcagcgctgggagcgagcctctgccatgggcctccagccaccagctcatctccgggacctcctactgcacgcggcatcgacaaagaatcgcggtggcggtagcccctctgtcgagtgcctttgggagggtaaagtctagaagaaatatcttctaatcccccatcccaggtcaacttcaggtggttaactggagacgcttgttgtaccatgcagcctcttgttgatgtatgttggcactcgtttgtttctccaaggcacgtgttcggtaacagtatatagatggctacctgtgcgtatgttggcgcacttcatgctgaattctcttctcgtattgagatcctgttgcgttgtctgtatctgagtgcgtcaagcacgcacatgaacacatctcctatgtgctgccagttgcattgtgatcgaccgttttgggtgctgcgatttgacgct

SEQ ID NO: 141340 - DNA, 892 bp, Zea Mays
ccccactctccatttctcagcgtgcgcgctctcttctctctcttttgtggtaactggcggcggccgacgccgacgccctagctcacgtcttcgtcggtcccttcccagccttcgtcgcgtccttcgccgtcgacgagaacacacgaggaattcaaggaaacacttgcaggactgaagaatagagaaacatgtcgtctggtggtgtgaaagatttttaccggcagaaaaagaaaggaggcgtggcgaagacagcttcatcctcaaagaataagacacggcattacactggtggggcttctgttggtgcctcagatgcagctcagacatcagctctagtttctcatggctcctgggatctcaaagatgactttggtgatgaagaagagcagctgcgacagtttgacgtggacatgaagtttggtccttgcatcggtgttactcggcttcagcgctgggagcgagcctctgccatgggcctccagccaccagctcatctccgggacctcctactgcacgcggcatcgacaaagaatcgcggtggcggtagcccctctgtcgagtgcctttgggagggtaaagtctagaagaaatatcttctaatcccccatcccaggtcaacttcaggtggttaactggagacgcttgttgtaccatgcagcctcttgttgatgtatgttggcactcgtttgtttctccaaggcacgtgttcggtaacagtatatagatggctacctgtgcgtatgttggcgcacttcatgctgaattctcttctcgtattgagatcctgttgcgttgtctgtatctgagtgcgtcaagcacgcacatgaacacatctcctatgtgctgccagttgcattgtgatcgaccgttttgggtgctgcgatttgacgct

SEQ ID NO: 141341 - DNA, 1382 bp, Zea Mays
ctggatcgaaggggatcaaaccaaacaagcccggtacggttgcagtttaatttgaaaagacatcgggattcaaccgaacatccaatccgtgctctggaagcgcaatggattggcgaccgaggagcatttctaatgtttccttcaggacatgagcatgatgattgtcattattcaagatcgttctttcttgaaaacattgcctatgcatatccaagtgaccataatatatatgatgataatattagattactgctacattagatccgactgtatgcattttagctctactacaatgatgctaacagtttagtgaacagtgactggaccaatgtttcactacctaagggctgactatatgcaaattggttatattgcaatgatgctagcagcttcgtaaacatcgaccgggggtccggggccagtgtttcactacctacagcagtacagctgcccattttcagttctttatttacacaatagtacaataccatgtttcatgctcaggattagagctcttgatgttagggtttctggtggctctttggatgcactcttgtagtgtaggagtatatatacctttcaaccaaaggggaaaaaaaatccagagtaggtctgattccaaattttctgctggaaggaattcaaggaaacacttgcaggactgaagaatagagaaacatgtcgtctggtggtgtgaaagatttttaccggcagaaaaagaaaggaggcgtggcgaagacagcttcatcctcaaagaataagacacggcattacactggtggggcttctgttggtgcctcagatgcagctcagacatcagctctagtttctcatggctcctgggatctcaaagatgactttggtgatgaagaagagcagctgcgacagtttgacgtggacatgaagtttggtccttgcatcggtgttactcggcttcagcgctgggagcgagcctctgccatgggcctccagccaccagctcatctccgggacctcctactgcacgcggcatcgacaaagaatcgcggtggcggtagcccctctgtcgagtgcctttgggagggtaaagtctagaagaaatatcttctaatcccccatcccaggtcaacttcaggtggttaactggagacgcttgttgtaccatgcagcctcttgttgatgtatgttggcactcgtttgtttctccaaggcacgtgttcggtaacagtatatagatggctacctgtgcgtatgttggcgcacttcatgctgaattctcttctcgtattgagatcctgttgcgttgtctgtatctgagtgcgtcaagcacgcacatgaacacatctcctatgtgctgccagttgcattgtgatcgaccgttttgggtgctgcgatttgacgct

SEQ ID NO: 141342 - DNA, 142 bp, Zea Mays
tttaattttagctaggcgtcggctgtacgggggaatggaaatgggaatgggctttgcggggagggggaatgagaatgatagatatagaatggtggcagaacatgggaatggactgtgcgcgaggagtagggaatcggaaagg

SEQ ID NO: 141343 - DNA, 285 bp, Zea Mays
gccgacaaggcgctgacggccttcctcaacggcccgctgatggactactccgtgaaccgcaagaaggccgacaacgccagcacgtagctgctgtccccgtacctgcacttcggtgagctcagcgtccggaaggtcttccaccaggtctggatgaagcagctcatgtggagcaacgacggcaaccacgccgacgaggagagctgcaccctgttcctctgctccatcagcctgcgggagtactcgaggtacctcaccttcaaccacccctgcagccacgagaagccc

SEQ ID NO: 141344 - DNA, 580 bp, Zea Mays
cagactttctatgcttcaagatctaaattgttctgaacaatataaagtaccaccttaagaaaacaagaggaaccgactatgattgaatcctacaataacaagagaacagttggctgatctggtggcgaaggagttacatctacgctaaccatggaggaaccgactatgattaaatcctacaataacaagagaacagttggctgatcaggtggcgaaggagttacatctacgctaaccatgctcaaggtcattggtgatggtggtgatccaaatggccactatgacaaggatgatcatcaatgaggccttgcgtcgataattataataactttgtgaaaacatggctttgccccatctttgcaacatcatattgtcctataatattgtaattgataagtgtttgtgcatgaagcaggttaggtggtgttctacacctatgaattatgcaatcacatatagattgtttctaagggtttttagtcatgtactgtagtgaatctttattactggcatacaacatctcacaacagttctaataatgagcaataaactgatatgtatttactggttttggtggtaa

SEQ ID NO: 141345 - DNA, 1855 bp, Zea Mays
cccggcagcccccaagtcccatcgccgagcagaaagtcaggaacagaactcaggcgttggcgattggcatctccctcccctaagccatggctaccgggcggcccgtacgactcgtgctggatgcctccctcctcctcgacccctcctccaccagggaggcggcggcggttgcgctactccaacctgagcgtggcaatctgctatgcagagggcatgccaactaatgagtcagactttcttgaaaaggtcgcaagctcacacttgtttggatctatagtacttcttgcaaaaagtgggaatctttctccaattgaattaatgatagaatggagccgaacaagtttttgtttttatgcgacttcaagagttgacaaaggtttaatttctgagctccagaatcagaactggagagttctttctgtagctaatgaatgtagcatagaggttcctggtgttttaaatgttcaaaggcttcaggagttgcttctcaccttggctactctaatgaaaaaggaactttgtggctcatctgttctggtgattggatatataatgaaaaaatcccgtgaggaagacttcgcaaagagaggagcatttcccatatatcctagtaagggcagtcttatctttgttcccctctctttcgaaattccattaagtttgcaactgcaagaagttgatatggtcctccacaaaataactgatgagattgtcaagatcgatccaaactgctccattgattttccaaaagggatttcattttctgcaggaatgtctgaaattataagatttgtggaagagcaccctgatttttgtatcatggacccatttaaaaacatttacccattgcttgaccgtcttcaaatccaaaaaatccttgtccggttgcaagaacttggcactgaaggaaagccaaaacttcgagcaccgtattcttgcaaggttgacagttttcataatggtgaattggataagcatctagtagaagctaatttatccttcccactcattgtgaagccacaagtcgcttgtggagtcgctgatgcccacaatatggcactggtttttcagattgaagaatttagcaacctcagtgtgccccttcctgctgtgctacaggaatacgtggatcacggatccaagattttcaagttctatgtgatcggagacaaggttttctacgccgttagagactcaatgcccaacgcgcgcttcctgaagccgtcgtcaggaggtgaagctcttacatttaatagtttgaagactcttccggtggctacgaatgagcagcgaccgcagaccggcgcggaagatggcaagctgttagatgccgatctggtagaagaggccgcaaaattcctgaaggggctgcttgggcttacagtatttggattcgatgtcgtcgtccaagaaggcaccggagaccatgtcatagtggacctgaactacctgccgtcgttcaaagaggttcccgactcggaggcggtgcctgcgttctgggacgcggtcaggcaggcgtacgagtcgacgcgcgggaatgcgaatgcccagggttaataaggtgtcaaggctcttcccgaataagtgaatctacgtggagtggagcgcagcagagagaggagagccgcagtggttgtaatggttctggagcagactcggagtaatgttcggctgtagctgtgggaataagcgaaatcgggagcggaataataattaacaacaatccgccatgtttagctgtcgatctcgtcgccgtggtgtattctgtcaccgtgtcggttccatgtgaatctgcgcgcccttgtggaaactgctagcgctagctgctggtttcacaatccagccggcgaccggg

SEQ ID NO: 141346 - DNA, 438 bp, Zea Mays
atgggggttggcctgggcgccgccgccatgggacatgcagctgccaccgtggggattgggcggggggcctccgccataggccgcgtagtcggcaccgcagaccacgcagctgtcgccgcagggattggccgtggcgccatcgggctcggtggcagttcaacagctcctgtggcgttcaattgtaatggcgatgtttgttattacagagaaggagacaaaggctatgttccaccattcgacatggctgacgaccagttctacggccttgacatgaatggagacagtagctactttcgtggtcgtggtcatagccgtagccgaggccgttccagtgggcatacacatgcacgcaaggctccatcagcttgctcatgtccgaggacgtggtcgtggtcgtggcatcaatataggccaaactgcaaatgctactatggttaa

SEQ ID NO: 141347 - DNA, 920 bp, Zea Mays
atggggttccttgacgtcgtcaagcccaaggtggcgtcggcagcactggtagacgacgctgcgggcctcgaggcctgcaaggtggagcccgacctggaggagagtggcgttgcgttcggtgctggtgccgcgccgccgccggccctcgcgtccaagaagaagagggtcgtggggatgtcgtccaagaacctgatggccgagcgccgccgccgcaagcgcctcaacggccgcctctccatgctacagtccgtcgtgcccaagatcaacaagatggactggacgtcaatcctgggggacacgatcgactacatgaaggagctgctggagaggatcaagctgctgcaggaagagatcgggcagcagcagcaggaggcgtcgggcatgctcagcgtcttctacgagctcaaccccaatgagatggtggccaggaacaccccaaggagggagatgagctacggtggaaatctgatgttatggaattctaagaaaagtctagatttccacaggtcagagccttgcttcctagctgtagctagaaggcatagcgttatgcttttatcagctttgcttggcctctacatcacacaagttgtctgtcttgagggcattcattcatgtgaccaagtgttggtttgtgatctcccttgctggtttgactgggcttttgggcccggggagtcatgtgttgtgatctcatcactcaactatcatcttggcgacctgcacttgaatgttgaagtactagaagacattgggatcttgaaaatacccttcactcaacttaaggaggaggagctggacgggccggctaccgcggcggcggagcgggagcagatgtagtccgtcctaccacggctgtcatcggacccatgggcatccacgtccacgacgtgatcatcaaggacaacaccaagatgcag

SEQ ID NO: 141348 - DNA, 798 bp, Zea Mays
acttctcttgtttccgtatgcagggagcgtccatgctaatggctacagctccttcctgtttctggagataccaagcacgagtgcagcaatggcgcatcccatgcctcccctctcagcatcacagagcacaatcaccaccgttctgaagatccttccaaaacctcctgctgctccggagagcagaagcaataattgtgcttttggggccaaattcgacagtaggagggcacttctatgcggcttggtcgctgctgctgctgctgctggcaccatgctgggcgctgacatcgctggtgctgcttcgaagaggcggcctccaccgccagcgccggcagaggcgaagaaagacccgaacgtcagcggagtgcaggctaaagtgcttgctagcaggaagaggaaggaggccatgaaggaagctgtggccaagctgagggagaaaggtaagccggttgataagtgaaggccagaaccagtgacccttgatcaagaaatgtaacttattgttaaataatatactccctctattcttctaaagtaataagccattaatttgaatagtctactcactttatgtgtacagatgagaataaaaatacaactattttgcttgtatgtattttgtcccagcctatctgttgcgtgtaatccagtttttgccacatgctctgatttggcgaaaaaactaatcatttttttaatcgccgtgcaatgaaactaacaaaaagcacaaaaaaactatgtcaatctatcagatttatagttctaattcattatatattaagggataaaaaacagaaa

SEQ ID NO: 141349 - DNA, 780 bp, Zea Mays
ttctggctcacctgtcttatttgttaatttagaaccttatcaaataaagcaatttttttggtttgttctgccatcccacccaatgaagtgttaggattcttttcaataaaatcctatgtagtcataggttttgtcgttcccacagcttctcctttaatggttaggtttgaatcctgcaatggagctttcaatttttttcgagtcaattttcttagttttattaacccggctgctctttatttattgctttatatttttatttgttgtttcaaaagtcaagttacgatttcgaattatctcttttgttgagaattttattatattgatgctttatcacattgccttttttatgatgtaattcatagaccatacatatgggaatcctatatctttcttattcttcttccttctatctatcatcccttcttttatccacatccctttagttttgcttcacagcctagaatcaggtttcttttgtagagaaaaaatgcagttgctacaactatatgatagatctactcatttttgatagatgtatttattcacatagtgactgtttcttagttaggatctcgacaatacgaagcaataggttggttattagttaattttctatcattactaaggttttttttccatttttgaccctaaagaaaaactaacgagtcacacactaagcatagcaattatattaaaagatttcttaattttcattaaatcttatagaaagaggggtacttttttcttttttagggatttttggaaaaaacaaggttc

SEQ ID NO: 141350 - DNA, 2465 bp, Zea Mays
cgcaccgtcgaattccccgtccgaccccactggtcccggcctctgcagggtggcccacccatgacccatcccgcgaccgcgacccgaccgctcccaccttccccgcctcgtcgtccccctgcataaccaccaccccaccaggccaccattccttcctcccctggtcgcccccgcctccatggccctcgcgtgcgcgcccataccgctcccgagtccctaggacgcggcacgcacccttctcgcgggcgcgggcgcgggcgcggggcgcgggagcaggcatggcgtcgcaggtcgctgggtcaaccccggcggtggcggcgcttgggttccttctcccgaccttctgggagatcgaggtcacgtgcgccgccgcgatgatcctcgtggcgctttacgttgcctacgagctcctcaacccgcgctcctcgcaggcggcagcggcgggcgacgccgacgagctcctcgtgcgggggctggacggcgccgacaagttcaaggggggtgtgagcggcccctctgcctatgtagtgaagctcgaattgttggctgcaaaaaatttgatggcggcgaacttaaatgggacatctgacccatatgcattgatcacttgtggtgcagagaagcgtttcagctccatggtccctggctcaagaaacccaatgtggggagaggaattcaatttttttgttgatagtcttcctgtaaagataaatgtcacgatatatgactgggacattgtatggaaaagcacaatccttggctcttttactgttactgttgaatctgaggtaccgagtggaccaatttggcatacacttgacagcacatcaggccaggtgtgtcttcatattaaagtaatcaaggttcatgaaagttcctccagggcaataaatagctcagctgaggctggtgctcgtagaaggatttccttggataagcaaggtcctactgtagttcatcaaaagccaggtcctttgcagacaatttttgaactgcctccagatgaggttgttgaccacagttattcatgtgcacttgaaaggtcatttctgtaccatggacgcatgtatgtctcttcatggcatatttgctttcattcaaatgtcttttcaaagcaaatcaaggttgtgattcctttgagagatattgatgagataaggagaagtcagcatgcagttattaatccagctattacaatttttcttcgaatgggagctggaggatttggtgttcctccgttaggatgtccagatggaagagtcaggtacaaatttgcatcgttttggaacagaaaccatacatttagagcattgcatcgagctatgaagaacttcgtaatgatgatagacgctgagaaacaggaacgtgctcagtctgcattacgtgcacacagtagttcaagaaaaaatagcaagaaggagataaatgtaccagaagattgtgctgcattaacagggaagttacaaccttttgtcaaagaagaagttttggtccctgtattcaatggaacttttccctgtactgcagaacagttcttcagtattcttttaagtgatgattcaaattacataacagagtatcgaacggatcggaaggataaagatataaatctgggccaatggcacgttgcagatgagtatgatggccaggtgagggaacttaattgtaaatcaatatgccatagtccaatgtgtcctccttattcagcaatgacagagtggcagcatatagttctttcagctgacaaaatggatctggtatttgagacagtacagcaagtacatgatgttccatttggttccttctttgaggtgcactgtaggtggtgtgtgaaaactatcagttctaactcgtgcagtctcaacataagtgctggtgcgcatttcaagaaatggtgcatcatgcaatctaagataaagagtggtgctgtggatgagctgaagaaagaagtgaaggtgatgttagactttgcgcaggggtatatgctcaaagttagctctcctgaccaagagaacagtaatctcgcgcagcaagacaacacggcgccggatgcgccttctgatacagggtgacagccgccatcacatgacaacgaatcatgccattacgatgttatacacagaagggcaggtggaccagtaactagtagtccacatgaaccacatctaacatgttaagctgacttccaaaagaatgggtggaccgtgtgtagcgtgttaagttcgtttcctgccattgctctatccgtttttggcagtttggctgatgtatatatatagctgtaaacacacgcaaatataaagtggtggctgtggcaggccagtgtgttgtttgagtataaaaacaaagaaagaaacggaagagagaaatatttgccacagaaccaacgcttctcgagtcacagactcacaggggggcatatgttgtgcaaataaaagcttgatgtcctagaaacaactttgcaa

SEQ ID NO: 141351 - DNA, 999 bp, Zea Mays
cctccgcttggcggctcgccggctccctcctcctggcgcggtgcacggcgaactccggcggctccctgctctctcggtctcggggtccttccttttggcgcggtgcacggcgaactcaggtgctccctcctcccctcctccccggcgcggcgtacgtcgatctccggtagctccctcctccctgctgctcaaggtatcatataattctggagtcaaacattttatattttggcaggtatcttctataatttcaattgttgtgcatgtctgaactgaaaaaacatagacatcttctgttttttgtattattgaacatttaagggatcaccacatggacatatttttagtctctttgtcctggtgcagctctgcggtagcaacggaaataatgaatactacattggaactggagtggatagctgtgtttgagttcgatttttactgcatacatatttttgttgctacttttagctactactaattgagtgataaaattgatgcagcttgcaggttttcagatggaagttgttaaaactactcatgcactgtttgtattatagtttagacggttcatattatatttcgttaggaataattatgttatttgctagctcactatttatagctctacaggtgctcaatggtctatgcactttcaggagtgatagagcagaagctgtatcaattccagttggaataattcctgcagggtctgacaactcacttgtctggactgttttgggagttagagatcctatttctgcatcattattaattgttaaggctggtttcacagctctagatatcttggttgtcgagtggaccaagaccttgaagaagcatttgaaggactttatcttaatgacccttagagcttaggccctacactttgtaatctcctactattcttcttgttcctactctattctagtgatctggacatctggtgatgtaaactgtactctctgtatttaagatctctttatctctgatgtcatc

SEQ ID NO: 141352 - DNA, 1119 bp, Zea Mays
cacacagccaacttggctggagaaagaggtgtagagagactcgtctctagctctctgctcctctcggctggagcgagcggtccactccagggctggaggcagccacagccaagccgaaggcaacgagtggagaccggacaccggagccgcggagcgggagaccatccttgacttgttttttccgccccttggatgtgacgactgaccggatgagacgcgcgcggccgcgcctctccccactccgctgaccggacctgcgtgccctgcgaccgcaccagcgcggagctgcgtatcccgccagcggtgagccggtggaaggaccccgcccgccctgctcttctctgctccaaatccaaaccagcctttttccccctccgtgcgcccacagcaaagcccgatgaggagacgagagtgaagaagaagaagaaaccactaggcgcggcaaggatttgctccgagagagtgatgcgcttaaggattcacgacaatggcttcattggtgcccggtgtcctcgtgaagctccttcagcatatgaacacggatgtaaaagtcgccggcgagcatcgctcctcgctccttcaggttgtcagcatcgtcccagcgctcgccgggagcgatcttttcaccaacaaaggcttctacctcaaggtgtcggattcatcccatgcgacctacgtttcccttccagaggaacagcatgatctcatcttgagcgacaagattcagctgggccagttcatccatgtagaccgtctagaggctgccactcctgttcccatccttagaggagttcgcccagttccgggtcgccatgcttgcgttggcacccctgaggatcttgtggtgaccagctcctccagttttcatggcagcaagaaagcgcaaccatcaaatggaacgaatgatgccagcatcttgtcgctagaaaaggaaacgagcaaattggagaaaataaatgcttcacgtaagcttaccgggacggaaaataagaagccgatgctcaccaaatcaaactcttcactgtcaagacaagctttgaatgtgattggtgataagaaggaagcggttaaatcaaagaggaacagagtaaaaggagcagagaaagcttcatcttctag

SEQ ID NO: 141353 - DNA, 3138 bp, Zea Mays
cacacagccaacttggctggagaaagaggtgtagagagactcgtctctagctctctgctcctctcggctggagcgagcggtccactccagggctggaggcagccacagccaagccgaaggcaacgagtggagaccggacaccggagccgcggagcgggagaccatccttgacttgttttttccgccccttggatgtgacgactgaccggatgagacgcgcgcggccgcgcctctccccactccgctgaccggacctgcgtgccctgcgaccgcaccagcgcggagctgcgtatcccgccagcggtgagccggtggaaggaccccgcccgccctgctcttctctgctccaaatccaaaccagcctttttccccctccgtgcgcccacagcaaagcccgatgaggagacgagagtgaagaagaagaagaaaccactaggcgcggcaaggatttgctccgagaggttccattccgtatccggatcaccgtgcggaaattcttggttggtatggtatgagtaaatgcgatctgcagtgacttgtgagacaggtttctgcacattagattcacgaaaaagttgcgacctttattgcattcaggagtgttggtcggaactgccagagtgatgcgcttaaggattcacgacaatggcttcattggtgcccggtgtcctcgtgaagctccttcagcatatgaacacggatgtaaaagtcgccggcgagcatcgctcctcgctccttcaggttgtcagcatcgtcccagcgctcgccgggagcgatcttttcaccaacaaaggcttctacctcaaggtgtcggattcatcccatgcgacctacgtttcccttccagaggaacagcatgatctcatcttgagcgacaagattcagctgggccagttcatccatgtagaccgtctagaggctgccactcctgttcccatccttagaggagttcgcccagttccgggtcgccatgcttgcgttggcacccctgaggatcttgtggtgaccagctcctccagttttcatggcagcaagaaagcgcaaccatcaaatggaacgaatgatgccagcatcttgtcgctagaaaaggaaacgagcaaattggagaaaataaatgcttcacgtaagcttaccgggacggaaaataagaagccgatgctcaccaaatcaaactcttcactgtcaagacaagctttgaatgtgattggtgataagaaggaagcggttaaatcaaaggtgaagccagctattaccaggtctacaccttcatcaccaaccagtgtctattctttacctgcgtcattcgacagattctctaatgatctgaaacagaggaacagagtaaaaggagcagagaaagcttcatcttctaggctttccttgttagaaaaggctgcttctgttttgaaggctactagtgccgggagaaagccctctgctgccaattcgatcagtagctctgtgttaagtattggatcagggccaaaggccttgagaagaagctgggaaggaaacacggatattaaaggaaaaggcaattcagaatcaaagacagccaaacctgacaagaagtctgataacaagatgccaatgactcctagacgaaaatcaccagtggaccagaaggtgccacctaaagatgatagccagaaagctgctaggaagagcaccgcaagtgctccctcagatgacgctgacaaagcagccaagaagcatattcctactgtaaagagaacatctggggtcttaggaaactcgaatgttacaaatctagtgaagattcctcccaaccgcaaaaaactaacagatattagcacttcatggacatcactccctccatcacttgccaaactaggaaaggagcttcttaagtacagggaatcggcacaaatagctgctgctgaagccatgcaagaagcttccgctgcagagagcttgctcagatgtttgagctcgtacgcggaggtgagctccacggcggaggagcacaacccgcagccagccgtagagaagttcttcaccctccacgccgcgctttcgcgcgccacggtgatcaccgacaccctcaccaagtctgccacatctgcagcatcgccagattgctcggcagctagcgacgctggaactgtgggctccgctacagacgaggagaccgctgccgtcacagccgagcgccggcgccgagctacgtcctgggtgagcgccgctctcgctacggacctgtccgccttcggcatctacaacctcaaaccggtccccgccaccgtctcctcgccgctggccgtggtcgtcgttgacgagtccgcgaagccggcgacggccgcagccacggctacgaaatcatcgccgtcgccgaagtcgcggatgtcccctgcgaaggggaaagcgaggacgggcgctgcgacggcagcagcagcggcgctgacgaagacgtccgcgccgacggagtgggagagaggagaaggggcagaggagaggggcgaactggcgaaacggctcggagaggagtcaaggggttggttcctcggcttcgtggagcggttcctggactctgacgtggcggcgtccgcgccgtgggaccgcgagcgtgcggccaggatgctcccgcagctaaagcgggtcaacgactggctcggcgagatcgcaaagcgcagcgagactcagtcgctgccgcctgccgacgcggacggtgaggcgaccaccacgagcaccgcccctgtccccccgaacgacggctgcggcgtgcccgaggagacgatagagcggttaaggaagaagatctacgaatatctcctcaccaatgtcgactctgccgccgcaatgcttggcggtggcggaggcagcgcggcggccgccctgacgaacgggaaaaagggctgacgcgtaaacgggacgaacgggaaaaagagctgacaggtaaacgtgtggtctaattgggccgttagttgtgtggaatttgattgggccaaaaaatgggctggatgagctaatgtaggcttagtttctgttgtttctttgctgggctttgagcctttctgcttctcttagtgtttcttattatggctacagggaaaaaaaaggtggtgaaaatttgacttgtattcccctttctctcaaattataagtcattttattttt

SEQ ID NO: 141354 - DNA, 3363 bp, Zea Mays
cacacagccaacttggctggagaaagaggtgtagagagactcgtctctagctctctgctcctctcggctggagcgagcggtccactccagggctggaggcagccacagccaagccgaaggcaacgagtggagaccggacaccggagccgcggagcgggagaccatccttgacttgttttttccgccccttggatgtgacgactgaccggatgagacgcgcgcggccgcgcctctccccactccgctgaccggacctgcgtgccctgcgaccgcaccagcgcggagctgcgtatcccgccagcggtgagccggtggaaggaccccgcccgccctgctcttctctgctccaaatccaaaccagcctttttccccctccgtgcgcccacagcaaagcccgatgaggagacgagagtgaagaagaagaagaaaccactaggcgcggcaaggatttgctccgagagagtgatgcgcttaaggattcacgacaatggcttcattggtgcccggtgtcctcgtgaagctccttcagcatatgaacacggatgtaaaagtcgccggcgagcatcgctcctcgctccttcaggttgtcagcatcgtcccagcgctcgccgggagcgatcttttcaccaacaaaggcttctacctcaaggtgtcggattcatcccatgcgacctacgtttcccttccagaggaacagcatgatctcatcttgagcgacaagattcagctgggccagttcatccatgtagaccgtctagaggctgccactcctgttcccatccttagaggagttcgcccagttccgggtcgccatgcttgcgttggcacccctgaggatcttgtggtgaccagctcctccagttttcatggcagcaagaaagcgcaaccatcaaatggaacgaatgatgccagcatcttgtcgctagaaaaggaaacgagcaaattggagaaaataaatgcttcacgtaagcttaccgggacggaaaataagaagccgatgctcaccaaatcaaactcttcactgtcaagacaagctttgaatgtgattggtgataagaaggaagcggttaaatcaaaggtgaagccagctattaccaggtctacaccttcatcaccaaccagtgtctattctttacctgcgtcattcgacagattctctaatgatctgaaacagaggaacagagtaaaaggagcagagaaagcttcatcttctaggctttccttgttagaaaaggctgcttctgttttgaaggctactagtgccgggagaaagccctctgctgccaattcgatcagtagctctgtgttaagtattggatcagggccaaaggccttgagaagaagctgggaaggaaacacggatattaaaggaaaaggcaattcagaatcaaagacagccaaacctgacaagaagtctgataacaagatgccaatgactcctagacgaaaatcaccagtggaccagaaggtgccacctaaagatgatagccagaaagctgctaggaagagcaccgcaagtgctccctcagatgacgctgacaaagcagccaagaagcatattcctactgtaaagagaacatctggggtcttaggaaactcgaatgttacaaatctagtgaagattcctcccaaccgcaaaaaactaacagatattagcacttcatggacatcactccctccatcacttgccaaactaggaaaggagcttcttaagtacagggaatcggcacaaatagctgctgctgaagccatgcaagaagcttccgctgcagagagcttgctcagatgtttgagatggtccaggacatggatcaacacgtttctgaactgtctccgaatgctattgtactgcataatgatgcttacagatgctgtacaggaagtttctcctgctgtacttgtagctgcatgctgttgtcttctactgaaagtacctgtttatttacattgctagctgtatattctccagttaatccaatggttgataatctcgaaatcactgtatagatttcaacttggtgtcttgagtcagaagaacctgccacttttagcttaccgcgattatttgtgttggaaagttcacggcagagctgcagcatttttttttgctaccaatgttgattccagttactaaccgtacatatatctaactgcattgtatgtattggccggagcagctcgtacgcggaggtgagctccacggcggaggagcacaacccgcagccagccgtagagaagttcttcaccctccacgccgcgctttcgcgcgccacggtgatcaccgacaccctcaccaagtctgccacatctgcagcatcgccagattgctcggcagctagcgacgctggaactgtgggctccgctacagacgaggagaccgctgccgtcacagccgagcgccggcgccgagctacgtcctgggtgagcgccgctctcgctacggacctgtccgccttcggcatctacaacctcaaaccggtccccgccaccgtctcctcgccgctggccgtggtcgtcgttgacgagtccgcgaagccggcgacggccgcagccacggctacgaaatcatcgccgtcgccgaagtcgcggatgtcccctgcgaaggggaaagcgaggacgggcgctgcgacggcagcagcagcggcgctgacgaagacgtccgcgccgacggagtgggagagaggagaaggggcagaggagaggggcgaactggcgaaacggctcggagaggagtcaaggggttggttcctcggcttcgtggagcggttcctggactctgacgtggcggcgtccgcgccgtgggaccgcgagcgtgcggccaggatgctcccgcagctaaagcgggtcaacgactggctcggcgagatcgcaaagcgcagcgagactcagtcgctgccgcctgccgacgcggacggtgaggcgaccaccacgagcaccgcccctgtccccccgaacgacggctgcggcgtgcccgaggagacgatagagcggttaaggaagaagatctacgaatatctcctcaccaatgtcgactctgccgccgcaatgcttggcggtggcggaggcagcgcggcggccgccctgacgaacgggaaaaagggctgacgcgtaaacgggacgaacgggaaaaagagctgacaggtaaacgtgtggtctaattgggccgttagttgtgtggaatttgattgggccaaaaaatgggctggatgagctaatgtaggcttagtttctgttgtttctttgctgggctttgagcctttctgcttctcttagtgtttcttattatggctacagggaaaaaaaaggtggtgaaaatttgacttgtattcccctttctctcaaattataagtcattttattttt

SEQ ID NO: 141355 - DNA, 2766 bp, Zea Mays
cgcctctccccactccgctgaccggacctgcgtgccctgcgaccgcaccagcgcggagctgcgtatcccgccagcggtgagccggtggaaggaccccgcccgccctgctcttctctgctccaaatccaaaccagcctttttccccctccgtgcgcccacagcaaagcccgatgaggagacgagagtgaagaagaagaagaaaccactaggcgcggcaaggatttgctccgagagagtgatgcgcttaaggattcacgacaatggcttcattggtgcccggtgtcctcgtgaagctccttcagcatatgaacacggatgtaaaagtcgccggcgagcatcgctcctcgctccttcaggttgtcagcatcgtcccagcgctcgccgggagcgatcttttcaccaacaaaggcttctacctcaaggtgtcggattcatcccatgcgacctacgtttcccttccagaggaacagcatgatctcatcttgagcgacaagattcagctgggccagttcatccatgtagaccgtctagaggctgccactcctgttcccatccttagaggagttcgcccagttccgggtcgccatgcttgcgttggcacccctgaggatcttgtggtgaccagctcctccagttttcatggcagcaagaaagcgcaaccatcaaatggaacgaatgatgccagcatcttgtcgctagaaaaggaaacgagcaaattggagaaaataaatgcttcacgtaagcttaccgggacggaaaataagaagccgatgctcaccaaatcaaactcttcactgtcaagacaagctttgaatgtgattggtgataagaaggaagcggttaaatcaaaggtgaagccagctattaccaggtctacaccttcatcaccaaccagtgtctattctttacctgcgtcattcgacagattctctaatgatctgaaacagaggaacagagtaaaaggagcagagaaagcttcatcttctaggctttccttgttagaaaaggctgcttctgttttgaaggctactagtgccgggagaaagccctctgctgccaattcgatcagtagctctgtgttaagtattggatcagggccaaaggccttgagaagaagctgggaaggaaacacggatattaaaggaaaaggcaattcagaatcaaagacagccaaacctgacaagaagtctgataacaagatgccaatgactcctagacgaaaatcaccagtggaccagaaggtgccacctaaagatgatagccagaaagctgctaggaagagcaccgcaagtgctccctcagatgacgctgacaaagcagccaagaagcatattcctactgtaaagagaacatctggggtcttaggaaactcgaatgttacaaatctagtgaagattcctcccaaccgcaaaaaactaacagatattagcacttcatggacatcactccctccatcacttgccaaactaggaaaggagcttcttaagtacagggaatcggcacaaatagctgctgctgaagccatgcaagaagcttccgctgcagagagcttgctcagatgtttgagctcgtacgcggaggtgagctccacggcggaggagcacaacccgcagccagccgtagagaagttcttcaccctccacgccgcgctttcgcgcgccacggtgatcaccgacaccctcaccaagtctgccacatctgcagcatcgccagattgctcggcagctagcgacgctggaactgtgggctccgctacagacgaggagaccgctgccgtcacagccgagcgccggcgccgagctacgtcctgggtgagcgccgctctcgctacggacctgtccgccttcggcatctacaacctcaaaccggtccccgccaccgtctcctcgccgctggccgtggtcgtcgttgacgagtccgcgaagccggcgacggccgcagccacggctacgaaatcatcgccgtcgccgaagtcgcggatgtcccctgcgaaggggaaagcgaggacgggcgctgcgacggcagcagcagcggcgctgacgaagacgtccgcgccgacggagtgggagagaggagaaggggcagaggagaggggcgaactggcgaaacggctcggagaggagtcaaggggttggttcctcggcttcgtggagcggttcctggactctgacgtggcggcgtccgcgccgtgggaccgcgagcgtgcggccaggatgctcccgcagctaaagcgggtcaacgactggctcggcgagatcgcaaagcgcagcgagactcagtcgctgccgcctgccgacgcggacggtgaggcgaccaccacgagcaccgcccctgtccccccgaacgacggctgcggcgtgcccgaggagacgatagagcggttaaggaagaagatctacgaatatctcctcaccaatgtcgactctgccgccgcaatgcttggcggtggcggaggcagcgcggcggccgccctgacgaacgggaaaaagggctgacgcgtaaacgggacgaacgggaaaaagagctgacaggtaaacgtgtggtctaattgggccgttagttgtgtggaatttgattgggccaaaaaatgggctggatgagctaatgtaggcttagtttctgttgtttctttgctgggctttgagcctttctgcttctcttagtgtttcttattatggctacagggaaaaaaaaggtggtgaaaatttgacttgtattcccctttctctcaaattataagtcattttatttttaaaagttaaaata

SEQ ID NO: 141356 - DNA, 3487 bp, Zea Mays
gatttttttcccttttccctttccttccctctccgagcgcttcgcttttgcgggtttttgccttctcttttgcacccaatcgactctctctctctctctctctctctctctctcttcccccgaaatattactatttgccattgcttgccttgccgcttcctccgacaaggaagaacacttgttcaggacaaccctggggtgagggttggtgcgaagtgtctgctccttgctgttatatcctccgctaattgctttgcgtccaaggttgtttaaggttgcacgaattgattgggcaaccggcggtagtacttttcgtgcgcaagatttggttggtggtgttcttaccctctctcgcaggatagctgctctctctctctctctctctctctctctctctctctctctctctctctctctctctctctctctctctctctctctctcgaagattttctttgtcgagggaaaagttgggtttggggacgacaggaccaccgccgcctacattgatgacttctgctacgtactagtatgtggagtacctcttgtcgtgttgagcatgtttcgggttggaccgagttcaattcgtttccttacaagcaaagacatatattccccaggcgtactccctccagtccagaaccaccgccggagtattccgagcggcatttcctgcataaacaccggtgccaatcaggagggttctgtgtgtttctgtcagtttagtgatagtactcttcaatagaatcgcgcgattttgttcatctgtgtcctttctgaaatcatcgtttgtctccgtgcaattcttaggttccattccgtatccggatcaccgtgcggaaattcttggttggtatggtatgagtaaatgcgatctgcagtgacttgtgagacaggtttctgcacattagattcacgaaaaagttgcgacctttattgcattcaggagtgttggtcggaactgccagagtgatgcgcttaaggattcacgacaatggcttcattggtgcccggtgtcctcgtgaagctccttcagcatatgaacacggatgtaaaagtcgccggcgagcatcgctcctcgctccttcaggttgtcagcatcgtcccagcgctcgccgggagcgatcttttcaccaacaaaggcttctacctcaaggtgtcggattcatcccatgcgacctacgtttcccttccagaggaacagcatgatctcatcttgagcgacaagattcagctgggccagttcatccatgtagaccgtctagaggctgccactcctgttcccatccttagaggagttcgcccagttccgggtcgccatgcttgcgttggcacccctgaggatcttgtggtgaccagctcctccagttttcatggcagcaagaaagcgcaaccatcaaatggaacgaatgatgccagcatcttgtcgctagaaaaggaaacgagcaaattggagaaaataaatgcttcacgtaagcttaccgggacggaaaataagaagccgatgctcaccaaatcaaactcttcactgtcaagacaagctttgaatgtgattggtgataagaaggaagcggttaaatcaaaggtgaagccagctattaccaggtctacaccttcatcaccaaccagtgtctattctttacctgcgtcattcgacagattctctaatgatctgaaacagaggaacagagtaaaaggagcagagaaagcttcatcttctaggctttccttgttagaaaaggctgcttctgttttgaaggctactagtgccgggagaaagccctctgctgccaattcgatcagtagctctgtgttaagtattggatcagggccaaaggccttgagaagaagctgggaaggaaacacggatattaaaggaaaaggcaattcagaatcaaagacagccaaacctgacaagaagtctgataacaagatgccaatgactcctagacgaaaatcaccagtggaccagaaggtgccacctaaagatgatagccagaaagctgctaggaagagcaccgcaagtgctccctcagatgacgctgacaaagcagccaagaagcatattcctactgtaaagagaacatctggggtcttaggaaactcgaatgttacaaatctagtgaagattcctcccaaccgcaaaaaactaacagatattagcacttcatggacatcactccctccatcacttgccaaactaggaaaggagcttcttaagtacagggaatcggcacaaatagctgctgctgaagccatgcaagaagcttccgctgcagagagcttgctcagatgtttgagctcgtacgcggaggtgagctccacggcggaggagcacaacccgcagccagccgtagagaagttcttcaccctccacgccgcgctttcgcgcgccacggtgatcaccgacaccctcaccaagtctgccacatctgcagcatcgccagattgctcggcagctagcgacgctggaactgtgggctccgctacagacgaggagaccgctgccgtcacagccgagcgccggcgccgagctacgtcctgggtgagcgccgctctcgctacggacctgtccgccttcggcatctacaacctcaaaccggtccccgccaccgtctcctcgccgctggccgtggtcgtcgttgacgagtccgcgaagccggcgacggccgcagccacggctacgaaatcatcgccgtcgccgaagtcgcggatgtcccctgcgaaggggaaagcgaggacgggcgctgcgacggcagcagcagcggcgctgacgaagacgtccgcgccgacggagtgggagagaggagaaggggcagaggagaggggcgaactggcgaaacggctcggagaggagtcaaggggttggttcctcggcttcgtggagcggttcctggactctgacgtggcggcgtccgcgccgtgggaccgcgagcgtgcggccaggatgctcccgcagctaaagcgggtcaacgactggctcggcgagatcgcaaagcgcagcgagactcagtcgctgccgcctgccgacgcggacggtgaggcgaccaccacgagcaccgcccctgtccccccgaacgacggctgcggcgtgcccgaggagacgatagagcggttaaggaagaagatctacgaatatctcctcaccaatgtcgactctgccgccgcaatgcttggcggtggcggaggcagcgcggcggccgccctgacgaacgggaaaaagggctgacgcgtaaacgggacgaacgggaaaaagagctgacaggtaaacgtgtggtctaattgggccgttagttgtgtggaatttgattgggccaaaaaatgggctggatgagctaatgtaggcttagtttctgttgtttctttgctgggctttgagcctttctgcttctcttagtgtttcttattatggctacagggaaaaaaaaggtggtgaaaatttgacttgtattcccctttctctcaaattataagtcattttattttt

SEQ ID NO: 141357 - DNA, 2901 bp, Zea Mays
ccgagttcaattcgtttccttacaagcaaagacatatattccccaggcgtactccctccagtccagaaccaccgccggagtattccgagcggcatttcctgcataaacaccggtgccaatcaggagggttccattccgtatccggatcaccgtgcggaaattcttggttggtatggtatgagtaaatgcgatctgcagtgacttgtgagacaggtttctgcacattagattcacgaaaaagttgcgacctttattgcattcaggagtgttggtcggaactgccaggttgcctgccggatttttaccttttggttccgatttgtcccgtgcttttattagatgacgatgacatgataatcacactgctggttggataatgcagagtgatgcgcttaaggattcacgacaatggcttcattggtgcccggtgtcctcgtgaagctccttcagcatatgaacacggatgtaaaagtcgccggcgagcatcgctcctcgctccttcaggttgtcagcatcgtcccagcgctcgccgggagcgatcttttcaccaacaaaggcttctacctcaaggtgtcggattcatcccatgcgacctacgtttcccttccagaggaacagcatgatctcatcttgagcgacaagattcagctgggccagttcatccatgtagaccgtctagaggctgccactcctgttcccatccttagaggagttcgcccagttccgggtcgccatgcttgcgttggcacccctgaggatcttgtggtgaccagctcctccagttttcatggcagcaagaaagcgcaaccatcaaatggaacgaatgatgccagcatcttgtcgctagaaaaggaaacgagcaaattggagaaaataaatgcttcacgtaagcttaccgggacggaaaataagaagccgatgctcaccaaatcaaactcttcactgtcaagacaagctttgaatgtgattggtgataagaaggaagcggttaaatcaaaggtgaagccagctattaccaggtctacaccttcatcaccaaccagtgtctattctttacctgcgtcattcgacagattctctaatgatctgaaacagaggaacagagtaaaaggagcagagaaagcttcatcttctaggctttccttgttagaaaaggctgcttctgttttgaaggctactagtgccgggagaaagccctctgctgccaattcgatcagtagctctgtgttaagtattggatcagggccaaaggccttgagaagaagctgggaaggaaacacggatattaaaggaaaaggcaattcagaatcaaagacagccaaacctgacaagaagtctgataacaagatgccaatgactcctagacgaaaatcaccagtggaccagaaggtgccacctaaagatgatagccagaaagctgctaggaagagcaccgcaagtgctccctcagatgacgctgacaaagcagccaagaagcatattcctactgtaaagagaacatctggggtcttaggaaactcgaatgttacaaatctagtgaagattcctcccaaccgcaaaaaactaacagatattagcacttcatggacatcactccctccatcacttgccaaactaggaaaggagcttcttaagtacagggaatcggcacaaatagctgctgctgaagccatgcaagaagcttccgctgcagagagcttgctcagatgtttgagctcgtacgcggaggtgagctccacggcggaggagcacaacccgcagccagccgtagagaagttcttcaccctccacgccgcgctttcgcgcgccacggtgatcaccgacaccctcaccaagtctgccacatctgcagcatcgccagattgctcggcagctagcgacgctggaactgtgggctccgctacagacgaggagaccgctgccgtcacagccgagcgccggcgccgagctacgtcctgggtgagcgccgctctcgctacggacctgtccgccttcggcatctacaacctcaaaccggtccccgccaccgtctcctcgccgctggccgtggtcgtcgttgacgagtccgcgaagccggcgacggccgcagccacggctacgaaatcatcgccgtcgccgaagtcgcggatgtcccctgcgaaggggaaagcgaggacgggcgctgcgacggcagcagcagcggcgctgacgaagacgtccgcgccgacggagtgggagagaggagaaggggcagaggagaggggcgaactggcgaaacggctcggagaggagtcaaggggttggttcctcggcttcgtggagcggttcctggactctgacgtggcggcgtccgcgccgtgggaccgcgagcgtgcggccaggatgctcccgcagctaaagcgggtcaacgactggctcggcgagatcgcaaagcgcagcgagactcagtcgctgccgcctgccgacgcggacggtgaggcgaccaccacgagcaccgcccctgtccccccgaacgacggctgcggcgtgcccgaggagacgatagagcggttaaggaagaagatctacgaatatctcctcaccaatgtcgactctgccgccgcaatgcttggcggtggcggaggcagcgcggcggccgccctgacgaacgggaaaaagggctgacgcgtaaacgggacgaacgggaaaaagagctgacaggtaaacgtgtggtctaattgggccgttagttgtgtggaatttgattgggccaaaaaatgggctggatgagctaatgtaggcttagtttctgttgtttctttgctgggctttgagcctttctgcttctcttagtgtttcttattatggctacagggaaaaaaaaggtggtgaaaatttgacttgtattcccctttctctcaaattataagtcattttattttt

SEQ ID NO: 141358 - DNA, 144 bp, Zea Mays
ctacaagttagttgtgctttgctgtttatttatataataggctgttttcttgaactgaaattgcatgtactattactgagttctctttactctggttggcagagtattcatatatggttccaactttgtaaaaatggggcatgc

SEQ ID NO: 141359 - DNA, 1795 bp, Zea Mays
tgggcctgccgtgcgccgtgcaccgcacacctttgggaacacgcggctccggccacttgcaacgatcacgagcgcatgacgttggccccacgccacgcaccacgcttcgcggcccatccacgccgtcgatcgcccgacggactgcccccgatctgggagactccctcgagggccccgtgtgtccgacgtccgtgtgggtccggcacgggcgagccagcgccatcaaccggccaacctccgctgtgcctgcactgcatctttaccactagtcgccgtgccgtcccctccccttctctctctcctcgctccccacgccacgcatcgcctcgtcggaacggaaggcggcagcgctgcgagcaagggagggagggagcggggatgaggatgctgtcgaaggcgtgctcgattgtggcctcctccctcccgcgctgctcctcctccgccgccgcccccacggtcgcccttctctctcacctatgagggggcagccgtccttgctgccaagcgtgcggaagcaatggcccgggaagccactgctgtatggaatcggcaccctgttggtcatgccactgaggacactgtatggagtgggtcgtgtttttggcgcaggacggtttctctgcaacatgaccaacgtctcttcgtcgctgcaaattgagcttgtaccatgccttcgagataactatgcgtatatcctgcatgatgttgatactggaacagttggagtagtggatccttctgaggctatgcctattataaatgcattggaaaagagaaaccagaacttgacttatatactgaacacccatcatcactatgatcatactggtggaaacttggaattgaaggcaaaatatggtgcaaaggtaattggttctgagaaggataaggacagaatacctggcattgacatcacgcttaaggagggtgacacatggatgttcgctggccatcaagttcttgtactggaaactcctgggcatacaacaggtcatgtgtgctattatttcgctggttctggagctatatttacaggtgacaccttgttcaatctatcatgcggaaagctttttgaagggactccacagcagatgtatgcctcactccagaaaattacagctctacccgatgatacaaaagtatactgtgggcatgaatataccttgagtaatgcaaagtttgccttgagtgtagaaccgggaaataaagcattgcaggaatatgctgcaaatgcagctgagctgcgtaataagaatatacccacggtgccaacaacaattggaagggagaaggaatgcaatcctttcttgcggacctccaatccagaaattaagagaacactgtccgttccagatcatttcgatgaagatcgggtgcttggagttgtccgtcgagcaaaagataacttctgactaacaaaaggaaatgctcgtgacgtatgacccatatcttgttaaagttcagacagagaacctaagtcacaataaacataggaggaaatgaaggtatatatgtttgagctagattttgaaatgcttcggcaaaattatgtcgagtgtatgtagcttgggcagtgcagtgcttgtctatagcaaccaatgattcttttgaccactacaaataagcgtgttctgctatcatctactctctgtaaaaaaaacgccacgtagccgtttcatagtcgatcttcagttcttattcaatacttcaacttggcggtttgcactgtggcagtggatattacttgaatgcattgcactgcgatctgtagggatccatgtttgttcgctgcatg

SEQ ID NO: 141360 - DNA, 1806 bp, Zea Mays
tgggcctgccgtgcgccgtgcaccgcacacctttgggaacacgcggctccggccacttgcaacgatcacgagcgcatgacgttggccccacgccacgcaccacgcttcgcggcccatccacgccgtcgatcgcccgacggactgcccccgatctgggagactccctcgagggccccgtgtgtccgacgtccgtgtgggtccggcacgggcgagccagcgccatcaaccggccaacctccgctgtgcctgcactgcatctttaccactagtcgccgtgccgtcccctccccttctctctctcctcgctccccacgccacgcatcgcctcgtcggaacggaaggcggcagcgctgcgagcaagggagggagggagcggggatgaggatgctgtcgaaggcgtgctcgattgtggcctcctccctcccgcgctgctcctcctccgccgccgcccccacgatgagggggcagccgtccttgctgccaagcgtgcggaagcaatggcccgggaagccactgctgtatggaatcggcaccctgttggtcatgccactgaggacactgtatggagtgggtcgtgtttttggcgcaggacggtttctctgcaacatgaccaacgtctcttcgtcgctgcaaattgagcttgtaccatgccttcgagataactatgcgtatatcctgcatgatgttgatactggaacagttggagtagtggatccttctgaggctatgcctattataaatgcattggaaaagagaaaccagaacttgacttatatactgaacacccatcatcactatgatcatactggtggaaacttggaattgaaggcaaaatatggtgcaaaggtaattggttctgagaaggataaggacagaatacctggcattgacatcacgcttaaggagggtgacacatggatgttcgctggccatcaagttcttgtactggaaactcctgggcatacaacaggtcatgtgtgctattatttcgctggttctggagctatatttacaggtgacaccttgttcaatctatcatgcggaaagctttttgaagggactccacagcagatgtatgcctcactccagaaaattacagctctacccgatgatacaaaagtatactgtgggcatgaatataccttgagtaatgcaaagtttgccttgagtgtagaaccgggaaataaagcattgcaggaatatgctgcaaatgcagctgagctgcgtaataagaatatacccacggtgccaacaacaattggaagggagaaggaatgcaatcctttcttgcggacctccaatccagaaattaagagaacactgtccgttccagatcatttcgatgaagatcgggtgcttggagttgtccgtcgagcaaaagataacttctgactaacaaaaggaaatgctcgtgacgtatgacccatatcttgttaaagttcagacagagaacctaagtcacaataaacataggaggaaatgaaggtatatatgtttgagctagattttgaaatgcttcggcaaaattatgtcgagtgtatgtagcttgggcagtgcagtgcttgtctatagcaaccaatgattcttttgaccactacaaataagcgtgttctgctatcatctactctctgtaaaaaaaacgccacgtagccgtttcatagtcgatcttcagttcttattcaatacttcaacttggcggtttgcactgtggcagtggatattacttgaatgcattgcactgcgatctgtagggatccatgtttgttcgctgcatgaatatggtatcaacagtgcagtgcttggaaa

SEQ ID NO: 141361 - DNA, 3749 bp, Zea Mays
cacactgcagagccccctcttgttcgcgtccgaaccagattccccgtcccctctagggttacgcccactctcccccgccgctccggcgatgtcgtcggagcctctacccgcggagtcacccgaggcgcccgcttccgcctctggctccccttcgaaggacgccgtcggcactgaggtcggcgccgctgcggggtccccggaaacgaacacgctctgggtgggcaacctgccctcgcacgtgaccgagggcgatttgttggcgctgtttgggccgcacggcgcgctcgattgcgcccttgcacgagccggatctcgcagctacgcgttcgtcctcttccgttccccagccgaggctcgcgaagccgtcgaggccacccggggtgaaaaggtcaagggggccgccatgcgcaccgagttcgcgcggccggctagagctgttagaaatctgtgggttggtggcattagcccatcgatttcaaaggaggagcttgagggggagtttctgaagttcggaaaagttgaaggtgttgcattctcccaagatcagacttcagcatacatagattttgagaagcttgaagacgcaatttctgctcacagatccttgaatggaaaaatgctaggtggcaaggaattgtgtgttgatttccagaggtccaagggaagagcggaatggtcagaagctagcagcttcaatggtagagtaccagggccagtgggtgataagagaggcagtggccctctgaagagttctgctggagtgcggatgcgagaggcacagcctaccaatgttctctgggttggttttccaggttcttatagagtcattgatgaggaggcacttaagcatgccatgtcagtattcggtgtcgttacgaagataaaagttttccagacaaggcagtatgcttttgttgagtttgcaaatgttgcggaagcttgtaatgctaagatgaatctagatggtcatcttttcaatgatcccaggattcagattcttttctcaaacagtgggcttgcaccaaacaaattggacaacccaacatcggttgctggatttcctagttcagaaatctattccagtgatggtcgtctaggccctggtattggcagtggaactttgcaagggtatgatccaccaagaggaggaagaacaagatattacgattatgcgggtatgcctactccaggtggtatcctttcacaacctgaaccatttgatccaagagaagcaaaaagaatgaggcttgctgctggtgctgacccttacgatgtaagggcaggcagcacaggtctttattctgctggataccgtcatcagggcagttctgtgcacgctgagggaagctcaagtcctgttattcgagtccggggcacagtgcatcgtacatcatacattgagcactgttggcgtggcagtattgccaaaggtggatcccctgtttgtcgtgctcgttgtttgcctataacaaagggcagtgacatacctttaccggatgttatgaattgctcagctcggactggattggatatgctggcgaagcactacgcagatgccactggatttgacattgtctttttcttgccagatagtgaagatgactttgtttcttatactgagttcttgcgttacctgggctcaaaaagtcgggcaggggttgtaaaagttgatgcagggactacattatttttggttccaccatcagatttcctaacaaatgtgttacaagttgatggtccagagcgcctttatggtgtggtattacacattccacaaatctctgctgctgctgcactgaggccacagttaactgggaccgaacaacaaccttactatgatgaaaggggaactctgcctacttcacaaagaaagtatagtatcatttctcctaatgacagtggccaccttgatgctgattatcggacatctttgcatgaggattcaatgcatcggttggggcatattcctggaaggcctcgggtggatgaaggacaagcagttcaaccagctcttgcaggttttcctgctaatcaagcagctgggctgcaagtacaatcttcactcaagcctgacattatggctacattagcaaaacttctgcctagtgtgcaatcgtcaccgctggtaagtggtcagatgaatgccatagacagaacatcgcagatacaggatccatccatgctttcaaaagtatggaatcctgaaaaccaagttactgcttcaaattcatcctttgggcaaatggctaatgttcagcatccaggacagcagtttagtggccaagcttcagctgctcatttgacaaactatgggaacatggtgagtgctcaggagcgctcaatacaacatactgcttacaaccctgaagttactttgaacttgccaccaccacctccacttccaacaataccacacagttctgctacattacagtctcaaggtggccacagtttgccctcacagacaaaccagcaactgtatcagccagagcagtattatgtgccccaaaacaactatggtccattagttccagttagccattctaaccttcaaatcagcaacactaacaaccccacccttaccatcccacaagtgaaccctggacctccaacaaataatcagattgggaatttggcccagccacagcattctatgccactgcatgttgatagagcaagtcaggatttctcttctcaggggcaacaacaaaatcgtggtcctggtgctgcacaagctcccgaggaggataaaagcaagaagtaccaggcgacactccagttagctcaaaacctactgcttcagttacagcagcgtggatctggaaatcaatcctgagacctaattattgcttcaggtaagtgcacctcgtcatttaatattttctgtttgctacattttatctgcttgcgcaatcttcatctaattattttcaacctaatcctagcgtagcttgcatttcaaaatgtaatttaatgaaatgagttgttttaaacaatgctagcaacagagggctactgcaaatgaccaatgtttgccatctcaagattgtgctaggttggcttagaatttgcacgccacacacaattaacactgaaacactagagaaacgtttaatcttagagattcatctcctagcaagtaaggccaggttgaacacttgatcttagttttattttgcgtgcataatacatctcttgccagtttgcttgcattgatatgttgttatctgtgtattctagcttgactgtcttgctagatctgatctgcacagttccttgatagtctagtgagagtttcagcattagagtaaaacagtagataaagtcgttgctaaaacaccacgttgcttacatgaggcaatattagatctttaattgattaatgtatggacatctttaatgtaatggttttatgatatctatacttgagaagcagtggggataccttgaaacaaaaagcttctctttcaccagctttaacgcagttcttggttctcgtggtaaagtgtgagtacccatttctcacaatacgatgagaaaccatgcttcagtatggtgattcgtctacctctgcgaaccctgctgccttctgcgtgactcggttacccccctgccgctttcttctatgtagtatcggacaatctttcgtagacaataatgcagtcaacgccttatccaaagcaccatgaccccgtagtatattcatccttggcatgcaaccaacctcgtttcggtcgaacaaaaaaaaa

SEQ ID NO: 141362 - DNA, 1140 bp, Zea Mays
atgccgggagacggcgaccccagcgacggcttgccgccgcagtccacgcgccgtgccggggcgccgccctcgtcgtctaccccgccgcgggagtacgacatcagccgcatgccggactttcctacccggagcaccggccaccggcgtgcgcactccgagatcctgggcctccccgacgacctcgacctcagcgcccctggaggcggcgacggaccgtcgctgtcggacgagaacgacgaggagctcttctctatgttccttgatgtggacaagctgaactcatcgtgcggggcgtcgtcggaggccgaggctgagtcctcgtccgttgcggatggcgtcggtgagggggctgagctgggccacgcgcccaggccaaggcatcagcatagccagtccatggatgagtccatgtcgatcaaggcggaacaactggtgggggcgccggggatggaggggatgtcgtctgcagaggccaagaaagcagtctctgcggcgaaactggctgagcttgctcttgttgacccaaagagggctaaaagggtagtcggtggtctatccaaaacaccccctaggtccgctcctggatggatatgggctaatagacaatctgctgcaagatcaaaggaaaggaagatgcgatatatttctgaacttgagcgcaaggtgcaaaccctgcaaacagaagccacaacattgtcagctcagctaacattgctgcagagagacaccactgggctaacgaccgagaacagtgagctgaagattcgcctgcagaccatggaacagcaagtccacttacaagatgctttgaacgacacactgaaagctgaggtccagcggctgaaggtggcaacagggcaggggccggccaatggtggtggaggcatgatgatgaactttggcgccgtgccacgcgcgtttggaggaggcaaccagcagacgttccacagcagccagagccaagcgatgcaatccatgctggcgacgcaccagctgcagcagctccagctccactcccagcctcagcagcagctgcaggcgcagcatctccagcaggtggcgagagacctcaaaatgaaagggcatctgggcgcccaaggccagtggggcggtgggaagtctgggagcagcggcagctga

SEQ ID NO: 141363 - DNA, 640 bp, Zea Mays
aacgcaatgccggagccggcggggtacgcgccgctgggcgcggccgagaggcagcggcggcgggcgctgttccttcagagctaccggttctcgtcggtagacgacgacggcgtccggcagcggcggcggcagtggctgggcctggcgggcgggcgcctcgcgcggatgctgcgcgaggcgggcggggccgtggtgagggcggccgggcgcgcgcgctggtgtgtgggcgccgggctcgccagggcgtggcgcgggtggaggccccgcgcggacccgctgctcggctgcttcggctccgcgacgcaccacaagattcatttataccgcatcgacgacgcatgtgtgtatgcaccgccgccaaaaacgtactgctagtactacgttacatgcacggcgtctaccacactgtctgtatgatgtgtacttgtgcagcttctagcacactgtctgtgcgctacgtgtctgcgccctttgtgaaatgcatctgctaattaacatgtctttgttttcttctgagtcctgtacattttttttttattaatacgagacagaagaaatgaatgtttacacgacgcggttggctcagctcttcaattcccctcccagccttaatgctcccaatctcgacgtcaagacgtat

SEQ ID NO: 141364 - DNA, 1897 bp, Zea Mays
cgcgctcacgttttgctcgctgccttcgcgttcgcattcgctctcgccgtcaccaaacctcaccgccggcattccctagtcccaccttctcctcgacaaagtcctcctcctaaaccctatctctgtctcaatcctatcatttgacccctttccccgccgccatggacgaggaccggagcgccgatcccgctcgcagcggccgcctcctctcgccgacgagcggtcagccccaaacccagacacagtcacagcccccgctccccatggacctcgcctcccagtaccaacgcctctttgcaccgtcggttttcctcccaccgatggcgcccccgccgccccgcctggcgtccagctcctgcttctcggccttcagcaactatcagagcctaccgacgctcgcgcccgcggtgggcgccggatcgcatctcgctcgctcggtccctaagccgccgctcttctcagtggactctctagctccgcttccgtactccaccagtccagcggcgagggcagcggcaggggcaggggcggcggtcccgcgttccccgccgtcgccaggcagctccgagctgcaaggcccgtccgcgtccggcctgccgccgcgtggggcggggcaccggaggtcccgtagcgatttcctcgtcgggttctcgggggcgaaccagctgcacctgccgatgactcctgcggctggggcgtacaggccgagggacgcctccgcactggaggagctattccgctcatacagggatccgaatctcggctcctccggggataacaataatgaaaggaacgatcacttaagtagacaactgaccggccaacgcgcttggagccccggtgataacagcgacaacgaggctgagagctgggcggtcagtggcagcgcagacaccagcgctagccatcctcgccattgccgcagcctgtcggtggacagcatcatggccaatctcaattttggaggcctggaccaggtttctctgagagtgccacctctgtctccagtggcagacgccagtgtcagcctctcgcgcactggaaccggagcatcgggcggtgcggctgcggctgcttcttctgaacttaccaacggagagttcagcgaggctgagatgaagaagatcatggccaatgatcgcctagctgagatcgctctttctgatcctaagagggtcaagaggattctagctaatcggatctcggcagcaaagtctaaggagcgcaaggtgaagtacatgggtgagcttgagcgtaaagttcgtgtgctgcagacggaaactaatacattatcttcgaaagcagcattgtcgcagagggaatgcgaggcacttcgaactctgaacaatgagatgaagatcaggctgcaagcaatggagcagcaagcacagctgaaagatgctctgaatgaagcactgacagctgaagtgcagcgcctgaaacaaatggctggcgaggccagtgatcttcatgtgccgaacggttcgcatcatcatatgaaccgccagattctcgaacagcagctgcagcaggtacagaagcagccatcagaggcccagcaggctcagcagcagcagcagcagccacaggaaccagagcagttcaaagctcagcaaaagcagtggaaccattaagacgattgatttcacagagcacatgcttgaaggtcaaattcatactgcagattcatgaagggataccttgtgttcccggatattcgtttttttccttaggttttagaacaacagcggttggatattccgccttttgcggtttattgctaagttatttggttggacgttggtagtaatgcctgggtggattcttgttgtacaaacttcccgtctctgtaatttttctgctagattttttttttaaaaaaacatttttaggtgca

SEQ ID NO: 141365 - DNA, 806 bp, Zea Mays
tttgttgtccagtttggtgcaggctttggaaatctagttaatccgcgcacttatatataatgtacaaacaccatggcacagagcacccaagagagctccaggagcctggtgatgtatgagcagacagcagagcacagacatggcggagcagccaagcagatagatacctaggagtccgctgtcctgcccacgcaactagcacaagcgccagcgagggaacgcaagctaagctagctactccatgctcagcaggcagcaagaggaagcaatctcacgcagctccagctcccgctcctgcctctggcacggccggcgtcttggacaggtcctggagcagcgcgaggttctcgcggcggagcgcgctggccctctcccgcagcctctcgttctccgcgatgatgcaccggttctccaggtagagcttcaggttcaccatctccatggcctctgctccggctctcaacctcctcagcctcagcctgcgtacgtgtacagtgtacttgtgtgattgcaggaaactgtcgctgatgctgctgaaacttgagcagaggaagcttgggaaactcgagcagggcgggttagctgggtacctcttcctcctgatagcaactgaggcacgaggcggcgtcggcggcggcgtcttctgcagctgctgccgcttgaggttgacgacaacaagagacgggcgcttcttgctgctgctccaggaccaggagccggagcacatgttgccgtggtggatggcgtatacacggcctgctcctagctgctagattctttggagctcagcgcggtgacttcgggat

SEQ ID NO: 141366 - DNA, 2362 bp, Zea Mays
ggtgacaatccgttgtataatctccagactaatttcttccattccgtccctgtccgtcggttcaagcttcccaacaatctctgcggagtaggtcgcctgacgaactaccgagacgtgcgtctcgcttctcccttcctcagctgctggcccgctgcctgcagccattgcccgctcctcgaggtcaaatggcccctgcccccgctctcaccgccacatccgtcctgaagcgttcccacctacccggcgtccactcgttggcctgtcgccggcagccgggggcggaccgcgtctcggtgctttctccagcgatcccgccgccccgcgtttcatggcagcaaggatctggagtggttgctaagaggctcctctgggcgagtgcgagtggttccttcgagaaagataacatcggggaggacgcggtgttgccttctcagatagcggtggagaataaagtagattttttgaagattttaaagagtgccaactccattattccccatatagtgctggggagtacaattctcgccctggtgtacccgccttcgtttacatggttcactaccaggtattatgcaccagctttggggttcttgatgtttgctgttggtgtaaactcaagtgccaaggattttattgaagcaataaagaggccagatgctattgctgcgggctatatcggacagtttgtcatcaagcctttgtttggattcctttttggcactcttgcggttgcagttcttaacctcccagctgctctaggcgctggcataatgttggtttcatgcgtgagcggagcacaactttcaaactatgcaactttcttgacggatccacatatggctcctctcagcattgttatgacatcattgtcaacagctactgcagtttttgtcaccccaacattatcttactttcttattggccagaaattacctgtagatgtcaaagggatgatgtccagcatcgttcaaatagttgttgctccaattgctgccggattgcttctgaatagattcctaccaaggctctgtgcagctattcagccatttctcccttcgatgtcggtgtttgtcactgccctgtgtgttggctcaccattggcaataaatatcaaggctgttttgtcgccatttggattaaccatagtgctgctcctttttgcattccacacctcatcttttgtagctggttatcatcttgctggtacttggtttcgcaagtcagacgacgtaaaggcactacaaaggacaatatcttttgagacaggaatgcaaagcagccttcttgctcttgctttagcaaataagttcttcccagatccactagtgggtgtgcctccagccatatcggttgtgttgatgtccttaatgggatttgctcttgtcatggtatggtccaagaaaagagaagcctaatttccttaatcaattatgcgctgcgctgttgttttctgctcttatttatgtagagtaggtagaatttttcatgcttcaaatttgaaactcttgtagcgttccttctctccatctgagtgagcttgcaagtgctttctttctctctcactcactcactaaattattttccagatttacatttttttttgaatcgtgctggcatgccgccccaagagccgatggagttcaatttctggccacttgccgtagggttagggtagctcgtctccaactgctgttcatcgaaccgtatcagttctcgcatgattcgtcagaatttctagtattcgactgcatcccaatgacagcgttgaaggaatacgagtaacctagacatacggttgaagttgtacacatgtccagctgggtatccccatcgatgatccttaaatcaggacctctattgggatccgatgaattcactttcttttctcgaacatcaaatccctactacttattaagacagtaagaggtaggctgtcattccgtgttctgccattctcatttctccttttttttcattgcccctctccgcaaagctcatttccattccgtgttctgtcattctcatcccccttccggcagtgtcattctcattcccacctccccgcaaagctcattctcattcccacgtgcatcccacgtctagctaaaattaaattaaaaaaacacaaatgtgaccctaatgggattcgaaccccttcccgcaaagctcattcccattccgtgttctgtcattcccattcctccgtgttctgccattctcatttcccttttttttcattgcccctctccgcaaagctcatttccattccgtgttctgtcattctcatccccttccggcagtgtcattctcattcccacctccccgcaaagctcattctcattcccacgtgcatcccacgtct

SEQ ID NO: 141367 - DNA, 1403 bp, Zea Mays
atagagtagattagtgggggaactgggcgtaaccgtaatattcaccctgcgcccctccctcttgttctccggttccccgcggcatactctttcctgcgctctctctctcggttctgccgtgtccctcgcgtgcgctctgtctccggtggcgccgcctccgccgcctccgtcgccctgcgccaggtacccagaccagacgagcaccctccaggtgccccaccccttctcttccgttcctgctgtgcggaacggagcacccaaacccaacctatatcagattcgtggatatggctgataatgagaaagaagtgggggagggaaccaccccccgaggggcggactgggaagttgtgactctcacagcatctgcctatgaagcggcgccaggacctgtcaggacagaagtaaagcctgttaatgaaaatcaagagcatagttcatccaatgcactgctcatgtctgaccactttgtgtttccgccgagtgagcacgagaacctgccaatacaaaccagtttcgatgagatacagcctgagaaggatgtgcagaaacctagtaccactgtggaggattatagtattaagaatgttgttgggtctgagagagttcagtttgatgatgaagggaaagacctctcagatgatgatgtggagatgagagatgacacacctgggtacggttcatcccacactgaagatgatgcacatggttttgttgttctcgatgatggtgttgagtccggtgaagattttgatgaaaaatcaggccacccttcagatcctgcagacagcaggagctgtgatactggcgcctcatgcaaatgttggttgaagaagcatatgacatgcttgtataaccaagcaaaggaaacaaatgctatctggtctgtggtggttgcagctgcactagttggtattgtgattttgggacgttggcacaaagataaattgcaccttaaccagcttaagtggcgctctggctcagcagtgagaggatgatcaacaagtcgtttgtgctgctctgatgaatcaattcaattcaagtcataaccaagacggtttccgcaatgttattgtgatgatgacgaaaaggggtatgttcaatgcaataatatgatgttcgactggaatttcacttgccgccctacaatgagtgcctcgtgggctctaagatgtcaaatccacttctgccatacacattatcttacagctttacttgcgacctggcacatgatttttggttcctgctacttttgctgtggtatatcatatatgttgactaaatggctgtagaacatagcaggattgcatactgcgaagtctgttaaaaacttggtggttctgcgagagcatctcacatgcaattgtgaaaatggagaacaaggaaaatttgtttggcttata

SEQ ID NO: 141368 - DNA, 1327 bp, Zea Mays
atagagtagattagtgggggaactgggcgtaaccgtaatattcaccctgcgcccctccctcttgttctccggttccccgcggcatactctttcctgcgctctctctctcggttctgccgtgtccctcgcgtgcgctctgtctccggtggcgccgcctccgccgcctccgtcgccctgcgccagatcagattcgtggatatggctgataatgagaaagaagtgggggagggaaccaccccccgaggggcggactgggaagttgtgactctcacagcatctgcctatgaagcggcgccaggacctgtcaggacagaagtaaagcctgttaatgaaaatcaagagcatagttcatccaatgcactgctcatgtctgaccactttgtgtttccgccgagtgagcacgagaacctgccaatacaaaccagtttcgatgagatacagcctgagaaggatgtgcagaaacctagtaccactgtggaggattatagtattaagaatgttgttgggtctgagagagttcagtttgatgatgaagggaaagacctctcagatgatgatgtggagatgagagatgacacacctgggtacggttcatcccacactgaagatgatgcacatggttttgttgttctcgatgatggtgttgagtccggtgaagattttgatgaaaaatcaggccacccttcagatcctgcagacagcaggagctgtgatactggcgcctcatgcaaatgttggttgaagaagcatatgacatgcttgtataaccaagcaaaggaaacaaatgctatctggtctgtggtggttgcagctgcactagttggtattgtgattttgggacgttggcacaaagataaattgcaccttaaccagcttaagtggcgctctggctcagcagtgagaggatgatcaacaagtcgtttgtgctgctctgatgaatcaattcaattcaagtcataaccaagacggtttccgcaatgttattgtgatgatgacgaaaaggggtatgttcaatgcaataatatgatgttcgactggaatttcacttgccgccctacaatgagtgcctcgtgggctctaagatgtcaaatccacttctgccatacacattatcttacagctttacttgcgacctggcacatgatttttggttcctgctacttttgctgtggtatatcatatatgttgactaaatggctgtagaacatagcaggattgcatactgcgaagtctgttaaaaacttggtggttctgcgagagcatctcacatgcaattgtgaaaatggagaacaaggaaaattttaaatatagagtaaaaaataaagaa

SEQ ID NO: 141369 - DNA, 1322 bp, Zea Mays
atagagtagattagtgggggaactgggcgtaaccgtaatattcaccctgcgcccctccctcttgttctccggttccccgcggcatactctttcctgcgctctctctctcggttctgccgtgtccctcgcgtgcgctctgtctccggtggcgccgcctccgccgcctccgtcgccctgcgccagattcgtggatatggctgataatgagaaagaagtgggggagggaaccaccccccgaggggcggactgggaagttgtgactctcacagcatctgcctatgaagcggcgccaggacctgtcaggacagaagtaaagcctgttaatgaaaatcaagagcatagttcatccaatgcactgctcatgtctgaccactttgtgtttccgccgagtgagcacgagaacctgccaatacaaaccagtttcgatgagatacagcctgagaaggatgtgcagaaacctagtaccactgtggaggattatagtattaagaatgttgttgggtctgagagagttcagtttgatgatgaagggaaagacctctcagatgatgatgtggagatgagagatgacacacctgggtacggttcatcccacactgaagatgatgcacatggttttgttgttctcgatgatggtgttgagtccggtgaagattttgatgaaaaatcaggccacccttcagatcctgcagacagcaggagctgtgatactggcgcctcatgcaaatgttggttgaagaagcatatgacatgcttgtataaccaagcaaaggaaacaaatgctatctggtctgtggtggttgcagctgcactagttggtattgtgattttgggacgttggcacaaagataaattgcaccttaaccagcttaagtggcgctctggctcagcagtgagaggatgatcaacaagtcgtttgtgctgctctgatgaatcaattcaattcaagtcataaccaagacggtttccgcaatgttattgtgatgatgacgaaaaggggtatgttcaatgcaataatatgatgttcgactggaatttcacttgccgccctacaatgagtgcctcgtgggctctaagatgtcaaatccacttctgccatacacattatcttacagctttacttgcgacctggcacatgatttttggttcctgctacttttgctgtggtatatcatatatgttgactaaatggctgtagaacatagcaggattgcatactgcgaagtctgttaaaaacttggtggttctgcgagagcatctcacatgcaattgtgaaaatggagaacaaggaaaattttaaatatagagtaaaaaataaagaa

SEQ ID NO: 141370 - DNA, 1905 bp, Zea Mays
gtgcacgctgtcaccgagcacagagccacagacacaggcacatagccagcaagcaaaggcgtggtggccatcgaaatggacatagctcaccgagactacctcctagtcaagctccacacttgcctcggcgtcgccatcctcctgctctgcgtcctcgccgagctcttcatctttgcctttcggtgccgcgcggcgctttatctcgtccccgtggcagcactgcttctcttcaaccgcttccggcgccgcgccgcggccgcggacatcgggctagtggacttttcgtgcctgaagccgccccgccggctgcgcatcccggtggcggggctgctcgagcacttcagcctcatcggctgcttcgacgacggcagcgtcgagttcatgactaaggtcatcgaggccagcggcatgggcaacgagacctactttccgccatcgctgcactacatcccgccggcggcgacgcacgccgacgccatccaggaggcgcacatgctcttcttccccacgctcgacgacctcttcgccaagaccggcgtcccgccgtcggccgtcggcgcgctcgtcgtcaactgcagcgggttctgcccggccccgtcgctcgccgccatcatcgcaagccgctaccgcttgcgcgccgacgccaagaccttcaacctctccggcatgggctgcgcctcaggcgtcataggcgtggacgtcgcgaggaggctcctgctcacgcacgccgccatctcgtacgccgtcgtcgtcagcgccgagatcgtcaccgtcgggtggtacagcggcaaggaccagggcaagctgctcctcaactgctacttccgcacgggctgctccgccgcgctcgtcaccaacagccgcggccccgcggcgacggtgccggtcaagtaccggctcgcgagcctgacgcgcacgaaccagatcgccaacgaccggagctaccgctcgggctatcgcgacgaggacggcgagggcatcaccggcttcaccctcggccagggagtcggccgcatggtgagcgagctgctgcgcgcgcatctcgtgacgctcagcctgtccatcctcccattgcgcgagaagctgcgctacgtgctagcgctgctcctctcgtcccgccggcgcctaggcggcaacaagctctcccgccccgccgtgccgctgcctgacttctgcaaggccgcggaccacttctgcctcccgtcgtcgggcaggccgatgatctggcgcctgggccagggcctcgggctcggcgagcgagagatggaggcggcgctgatgacgttccaccggttcggcaaccagtcggcggcgtcgctgtggtaccagctcgcgtacctcgaggccaagggtcgagtccacgcgggcgacacggtgtggcagcttggcataggcagcggcctcaaggccaacagcatggtgtgggagcgcgtcgccggccacgaggaggagcgcgagctggggccatggaaggattgcatccacaagtaccctgtgacagatacctaagagcactgcgacttggttgcttgatgcggtgatcatccgtcagcattccaactggtaactggatcaattgatgttcttgaaaaagaaaacacttcatgtccgtacgctatggcatgaagagccgtttggtttccaatactacgttttaggcttcctttggcatggctttagcttctcggaagaacaatttcgggtcatgttcctttaattcggctctttgacttctttagaggagtccgaaccgttttgcaattcatttggcaaaacatattcttctgtatttttttttcaaatgatgtatgaggagaacgtaagaggaaccagtagaaaccatgttttcggtgctctggctcatagcaataaaacgactcgggctctcgaagggctctcaacgag

SEQ ID NO: 141371 - DNA, 2463 bp, Zea Mays
gttgccaaggccactcccaggcgcggcggccggcgcaagtctgaacttccccgcccttgaattcgacctccgccacgaccgacggcccgaacggccgaacccgaccgacgccggcgggagaggcagaaacggagagaaagagatgggagtggggggcagcttctgggacctgctgaagccctacgcgcggcacgagggcgcggggtacctacgcgggcgccgcgtcgccgtcgacctctcattctgggtcgtctcccacagcaccgccatcctggcgcgcttgccgcgggcgcggcgcccgcacctccggaccaccttctttcgcaccctctccctcttcgccaagatgggcgtgttccctgtgttcgtggtggacggcgagccgtcaccgctcaagtcgcaggcgagggcggcgcgcttcttccgaggctccgggatggacctggccgcgttcccgagcacagaggcggagtccagtgtgaccgctgcaccggtcaaaaggaggaatgctgcattcacgcgatgcgttgaggagtgcgtggaactgcttgaatatcttggcatgcctgtactgagggcaaaaggtgaagcagaagccctttgcgcccagctgaataatgaaggtcatgtaggtgcttgcatcactgcagacagtgatgctttcctcttcggggctaagactgtcgtaaaggtcctcagatcaaattgcaaggaaccttttgagtgctaccacatagcagatattgagtctggtcttggactaaagaggaagcaattggtggccatggcgcttcttattggcagtgaccatgatttgcatggggtgcctggttttggcctggagactgcacttcgttttgtgcagctatttgatgaagatgaaattttagataagttgcatgaaattggtaaaggggtgtatccgttcctcaaaggatttgacaatccacatattgatgatctcccatcatcgtccaagaaaagcccaattaaatcgccgcactgctcacattgtggtcacccgggcagcaagaaaaatcatatcaaggatgggtgcaattattgcttggtggattcattagagaactgcgtggaaagaccagctggattcaaatgtgaatgtcctagttgtgacgaggcacgtgatctaaacgaacaaagacggcatgaaaattggcaaatcaaggtctgcaaaagaatagctgctgagacaaattttcctaacgaggagatcattaaattgtatctaagcgataacaatctggttgaagaaaagggtgttcccttgcttagttggagtaagcctgatgttgaagctttggttgacttattaagttataagcagaattgggaaccatcttatattcgccaaaggatgcttcctatgttatcaaccatatatttaagagaggtggcatcttcttcgtctacaccattgcctctttgtgatcagtatgagtttgattcaattgagcggactaaaataaggcacggtcacccttattacttggtgaaatggaagagagctacccgtggtatgaattctaatatgcctagcaagaagccagtaacggagggagaaacaagtagcgaggtagtggtgttggatgacgatgacaatgaggatacagtggtttgcgagtctccagagttattagatgaacctgatgttccacaagtgcttatggatgatggctgttgctttctattgactgatgaagacattcaacttgttggtgctgcttttcctaaggaaacagcaaggtttcaggaagaacagaggctgaaagaagcaagatcaagatcgcggaaatccaaaacgagcttagcagacagtgggtgcgagacacctaaaggtccgagacctagtggggtgcagcttagcatcacagagttctaccgctcgaagaaagggcaggacatggaatctgggaagaagaagcaggcgggagaggggcacgctgctgcgagggatggctcgagaaaatcctctgacagggacctcaacaacaagagcctgccgaagtccgttcgccgccgcctcctcttcgattgctgaggactagcctggccttctggtgagcactgtaatcttgctgtgccactgttgtaaatgacctagagaacgccttaacctattagccggtgtaggtatccgcggctcattttgtacagggaacagagcatcatctctgtcaagaggaaaaatggagcaggtcttagttcagaacgattatctgaacctcatctttgtattggttttaagtgcttttcgtggaactcactttcaattctagaggaatgggtcgcgtgccgctgctagagtaatcattctgaactaaaaaaaaagcttttttttggttttatgtctgcttttatgcctggacaatagctgacagacttgatgctgtcatgttacattatgcggtagtactactccagatattagagtgctgaatgtaa

SEQ ID NO: 141372 - DNA, 812 bp, Zea Mays
gtagctccagagcggcacatcggcgaagccttcgtccatgaacgccgtgaccgcggacggtggctccacgagcaatccctgcgccaagctcgcgtagtgcaggtcccagctcatgtcattgaacacatcaaattcgaacggcgaggccccgaggtgttgccgtcttcgctggaaggcgacgacggcgtggccgcgagggcgtcgtcctccgggaccacctgatggcggaggaagtcctccacggcgtccgcgaccgcgtggcggacctcggcgaggctggcgcacgaggccgggaccgcgaggagccaggccgagtcggcgaagttgaggcagcaggcggccgcgccggcgagggcgagcatggcggcgtcgtgcgcgcgggccgccgcctcggccgtgtcgaaggtgccgagccagagcctgcagccgcgcctccccggcacgcgcacctcgcacacccaccgcccggcgctgccccggcgccggacgccgcggaacaccgggtgccgcgtctcccggaacttggtccgccccgctggccgcttcggcggcgacgtccacaccgtctggtggtgctccggtaaggtcgaggctgatgccgacctgcatggcgagctcggctctccggtcatccccttcttggttgggcacatcttcttctgatgatgatgatcacttctctgcttgagcctcggatggtgcgggttccttttgccttgcctgagtttgtgttcgagtggttttcgatttgggaatggtggatttgaggatgcgtatttataggtggtggtggaggaggaggtttggatcag

SEQ ID NO: 141373 - DNA, 628 bp, Zea Mays
ccattagaaagtccacggtcatgctctggttttcccaatctgctctgtctcatctcattactagaagcagtaaccgtgagaaagaaaaggtacaaaaaaaaattgaaggacatcggccttagccctagtagctctggagcggcaattcggcggccaccgccaccgtcgccgaacgtggggactgtgtcccagctcagctcatgccatcgaacgtgggaactgcgagccctcggtggccgaagaggaatcctcgccgtcgtcgccgttggccggagaggacgacgtcgtcatccgctgccgcacctagcttggcgtcgcaggaagctctccacggcctccgccacggcgcgcgcggacgtcggcaaggctggcgtacgaggccgccggcaccgcgagcagccacgccgagtccgtgaagttgaggcacgcgtccgtgcgcgcgatccgcggtgtcgaagctgtccagccagagcctgcagccgcgcgtccctggcacgcgcacgcgcacctcgcagatcttcgtttgcttcaaggcgtgttgatcatctgccttgctttgctgctgcttgaactgtgtcctgggtggtttttgcgaagcggatggtgggatttgcgggcgaatatttat

SEQ ID NO: 141374 - DNA, 738 bp, Zea Mays
atctacgtccctagctaagcagcaggtcgagctagccccaaccccaatccaactcgataaatacgtacgcaacgaggactcatggcgacgacgcaggacagcggcaggacagctagtgccaccgcgctgacaacgtcccgcgggcgccgcttcgttggcgtccggcagcggccgtcggggcggtgggtcgcggagatcaaggattcggcgcagcgcgtccgcctgtggctgggcacgttcgacacggcggacgaggcggcgcgcgcctacgacgaggcggcccgcgcgctgcgcggggagaacacgcgcacgaacttcgcggaccgcgcgcggcacggcggccccgccggcgccggctccggcgcggccagggccaggttgagcaagaacctgcagcacgtgatggcgcgggcggccgccgccggcagggccacggcgtgcgcgggggtgggcgaccagttcgctctcgccgcggtgttccggcacccggtggcggcgcagcagcaggtcaagcacgcggtgcagccgagcttcgtggtgccgaggcggaccgaggcgccgccactgtcatcggtgcctgcaggaggtggggaggtgtggcgcgtggacgacgtcgacaccgcggatgagtcgctgtgcgccgccgaggagagatcgttcaaggtgtcctcgtctgtgatcgtgccgccctccttcagcgcctcgtcatccgagtctttcggcctcgacgatctctag

SEQ ID NO: 141375 - DNA, 1351 bp, Zea Mays
atggcgctcgccgcttcccaccacggcctcctgcccttcgcccccgctgccacgcctaccccgtcacgggggcacctgcgcttccgcgccgcgcgccctctgccccgccccgcccggagaatttgttgccaatctatcaactcagctaatgtgttgggagcttcttcaacgacatctgatgaggcaatcccagtcccagttgtccagatagatcaggactcagaccgtgatgcgactattgtgcagctaagttttggagatcattcggggatactacttgacacgtttttgtcatatctgccaattatttttcctgatattcactgttttcctgattctttcaaggcaatcaacgatgaaggcatgtccatgtatcagaggcccttcatgaagggcaagctgtacatccacttctcggtggagttcccggactcgttgagcctggagcagtgcaaggccctggaggctgttctcccgcccaagccagtatcacagtacactgacatggagctggacgagtgcgaagatacgatgccctatgacgtgaacatcaaagaggagatgcggaggcgacagcagcagcaccaggaggcctacgacgaggagacgatgtgccaggcgataatttccgggcttcagaactttgacaggagcagtgttgcatctgttgtcgcagctgcagataagggaggtgcaacccatgttgacatagcatgtgacaaggacttagtaaagcttgccatggatgttaccaaccttccgaatattttttgtggaagtggaagggttctagcagggattctcttcccttccgccgaaaatcaccaaggatctattcagggtggaactaactgacatcgaggtttgctcgagctcgctcagcacatagctgaacaaggtcccgatgaccgctgttatttgcgtacactggtccaaatcatctgcactgaccagaagaggctcaactacgacacttgaggacgatgacagtgaactgaatatattttcacaattagtctagatttatggatgtgtgccttcattaatggtgacagtagtactcatgtggctccattgctcattgagatatggtggcatgttgaattgttgaccccctgcgatgtatcacatattcacatctactctcactggtagttatgaactaggacaacaactctttttatttttcgtattagccttctttgaaatgatcatgcgaatattgatattttcacattgtttttttttgcgattttagccttaattttcatataactagctcatatcgtcactgaatataagtctttaggttgttatgtttaggctgtctctagcatcctttgtatcccac

SEQ ID NO: 141376 - DNA, 530 bp, Zea Mays
agtaagacacgtggtatgggagttgggcgcaagctcaagacccacataaggaactagaggtgggctgacaaagcctacaagaagagccatctcggcaacgagtggaagaaaccctttgctgggtcatctcacgcaaagggaatcgtccttgagaagatgtgagctcacggaacagtagattccgtttcttctaaacaacaggcgagttaagcaatacctgacatgcactactttgtttcatttgcaacgacattgaggctaagcagcctaactctactatctgtaagtgcgctcgtgtccagctggtgaagaacgggaagaagattgctgcctttgtgccaaacgatggttgcctgaactacatcgaggagaaccatagggtgcgagagcggggaagggagcgacggtggtgcatggtgaataagcaggtatcttcctctagaatgctttgacctcagcaaaacataatttatttcatctaagataattatatcaagcaattgttctacctgttaatgggctaactgatg

SEQ ID NO: 141377 - DNA, 102 bp, Zea Mays
gtacgtaagacccccaataactactgcttctctgtttcaatttgtagataagtatgctattagtgtagaactcctccaacatgtatcatcatctcaaaagac

SEQ ID NO: 141378 - DNA, 1086 bp, Zea Mays
atggcttcctctaagttgacaagtgataaggacaaccctaaaaagcttcaggataggctcaagtatgttcgtggagacaaagaaggatttgctaatcgtgctgaagccgaggcaaagaggctcccaatgcacctcatctggattggatattcttcgcaccattggatatgtctaccatggagggtcaacaatgctctgtcgcaggacccgcacgtggtccgcctgctcgacctcaagcagggcgtcaacaaggaggggcagaccatcctgtacctcatcttcgagtacatggacaccgacctaaagaagttcatccggggctatcacgccagccacgagaagatccccgcacaaaccgtcaagatcctgatgtaccagctgtgcaagggcaccatggcgctcaagatcgctgatctcggactcagccgtgccatcaccgtccctgtaaagaagtacacgcacgagattctgacgctgtggtacagggcgcccgaggttcttcttggcgccacacactactccacgccagttgacatttggttgctgggcaccccaaatgaggagatgtggccaggagtaggcaagctgccgaactggcacgtgtacccccagtggaagcccactaagctgtccactcttgtccctggtcttgactccgatggctatggtttacttgaggtcagtgaaaattctagagacacggcctttgagtccttaagagaggatactatcattttcgagttgttgacaaagatatgctgctttatatggaggttgttttatatcatcatggggattaaaagagaagatgaagaaaggcatctgtgtcgattaccatgcaaagtcctctttactcttggttcaaggaaagccaagaacattgcagttggaaagcatccgaaagtttgtatgatggtttacagaaactggctgaaagtaaactttatgctttgcttccaagatcaaacagtacaatacatcatctctgaaattgaactgctgcccatcaagtgggttcgtagcaaatgctgcttagaaatcgagtgcccaaaaaagcactcaagtagttacaatctgtacaattga

SEQ ID NO: 141379 - DNA, 484 bp, Zea Mays
agctccaacggtcgaaaccgccagaaccctaacggttgggtgacatggctggcgcaccggacagtgtccggtggcgcaccagattgtccggtgtgcccatcgacaacagcctgccccaacggttgaattggtggttgagggccccaaagtaatagataggctaagacagttgcatccaagtctgttagccatttcatgacctttgtactgtctgaacagatggtctttggccacagtataactatgggggctggccatcatgctgcaaaccaaccaaattcaacataaataaggtgtcagtctcaaactttcttcagaatgagatgtctgaaccactgcaagtatgtcatgtcagtgtgattttttttatatgttgcaaatcttaatgttgatgccgatactcgagaagtattggccgtccttgaactgtggttcttcttcaacctgctttggtggaagggggccattttgggtgcatgaggtg

SEQ ID NO: 141380 - DNA, 627 bp, Zea Mays
atggtggggacgggcgccccggcgggggcgtcggcgtcggggctccgcttctgcaccagcatcccgccgggccgcacctcccactcgtcctctttcaccgctgccgaagccggagccggagggggaggaggaggaggggagctctccctcatcgcgtcggcgaatgtacctttgggcctggcgcgcatcatcttctcatggtacgtgcacgcaccccgcgcgagcgaagcgagggagggagggacagagagaatcaaaaatcagccgctcctcctgcgcgctctcgccagcaacagcagccaagaacgggcaacaagcggcagagtcagctctgctctgctctgctctgctcggctgtccccgaaacgatctctgcgggcgcacgcggacggctctgggcgctgtcgcgagcaggagcgaactaggcggcgccggatctggggaagacgatttgcagctgcagctagcgcaggtgcctgtgcctcctctcgggtctcggactctcgattggggaaatcaggatcaggggccggggcagcaggcagagaggtaggtgcgggtttaggagctgagctgagccagccgaggtgggggatgggcaagagagagagagaactgggaacataa

SEQ ID NO: 141381 - DNA, 156 bp, Zea Mays
gaagcaaggcaaattttcaaagattcttgttcggttcagatctacagtatccaggcctgtattccaaaagatacagctatactttggaatcatgaatttgtgcaggcagaggagcttttcaatcagccttttgattatgagaactgtttgagagat

SEQ ID NO: 141382 - DNA, 1843 bp, Zea Mays
ttccctggtgctttacaccgcagagaatcccgtcaacccatggccaccacaccgctgcttgcactagatactaggcttgctctcatcctttccactcgtcgtcttccacggcttccacgccttgccttgctgctgatgctactccatttcctcccccggtacagcctgacccaacaaacgcacccccaagctaccaacgcacgcaaagcacggacgggcgcatacagctttccctttcgcgagtgcgtgccccttctcttctctagttctcttctccgtcgcgtcagagatcagggagagaccagagcaaacaacaaccaccgcttgtttcatcaagaatcgtggaggagaaccgaaaggtgtagtagccttttccggtagggcatctgctagagccggccggttgaagcaggggagcgagaggaggagggcagccgagcaggagcatcgcagtggtggttaagcagcagcaacgacgacgacgacgacgctgagaggtttccccgttcccgacggcacgtccaccgaggcggcgccatcgcgatgggtcctctggcgccgctgaggtgtaacccgccgccgccgttctccaagtcgccggggtccctgctgctgctgtccaagtcgctcaccctctactgctgagccgagccccctcctcgatcggttccatgggcgccgtggcctcgtcggcgggtggggcccggggaggcgatggcacggtgctgggcgacctgccggagaactgcgtcgcggaggtgctgctcaggctggacccgctggagatctgccggatggcgcggctcagccgcacgttccgtggcgccgcgtccggggacggtgtctgggagtccaagctaccgaggaactacgcgcgcctcctcgccgttgctgcggccggcgatggggaaggtgggcaggccgccgcgtcggcgccgggggcagagctgctgcccaagaaggaactgtacgcgcggctttgccgtcggaaccgtttcgacggcggcaaaaaggagttctggctggacaagggcggtggaggtctatgtatgtcaatttcttcaagggcgctttcaataacaggcattgatgataggaggtattggaacttcattcccagtgatgaatcaagattccgcacggttgcgtacctctcgcaaatctggtggtttgaagtgagaggggaggttgaattcttcttcccagaaggcacgtacagcctattctaccgcattcatctcggccgaccattcaagcgtcttggccggcgagtctacagctcggagcacgtccacggctgggacatgaagccggtgcgtttccagatgtcgacctccgacggacagcatgttcagtccaagtgctacttgagcgatcccggtatctggatcaaccaccatgtcggggacttcgtcgtgaaggactcgagcaggccagtgaacatcaggttcgcgatgattcagatagactgcacgcacacgaaaggcggcctctgcgtggattcggtcgtggtgaaacctcagcacctctcgcagaaaaaagcgccctggacttacgtgtagactcgtcgaacaagttgctgctgctgtctagggaggagggatatgatccatagtttccttttggattgttctactaccagatgtgcgttttgtttacagaagtgcggttttttacatttgcacttatacgcgtattttgcagtcatgtaatgtaattgaaggggtaagtgatttttttagttcctcttgtcccccctaggaacatgttggacctctgtaaattgttcgtttgaactttgaaatgtacatcggctgtgttctgcctatcaacttgcactacc

SEQ ID NO: 141383 - DNA, 953 bp, Zea Mays
aatcgcgcagacatcaaatcagtttgtgtttggacgttttggactctgattagcatattgattttgccactgctcagacattagatttgggtgccacattgtgcaggagttctggctggacaagggcggtggaggtctatgtatgtcaatttcttcaagggcgctttcaataacaggcattgatgataggaggtattggaacttcattcccagtgatgaatcaagattccgcacggttgcgtacctctcgcaaatctggtggtttgaagtgagaggggaggttgaattcttcttcccagaaggcacgtacagcctattctaccgcattcatctcggccgaccattcaagcgtcttggccggcgagtctacagctcggagcacgtccacggctgggacatgaagccggtgcgtttccagatgtcgacctccgacggacagcatgttcagtccaagtgctacttgagcgatcccggtatctggatcaaccaccatgtcggggacttcgtcgtgaaggactcgagcaggccagtgaacatcaggttcgcgatgattcagatagactgcacgcacacgaaaggcggcctctgcgtggattcggtcgtggtgaaacctcagcacctctcgcagaaaaaagcgccctggacttacgtgtagactcgtcgaacaagttgctgctgctgtctagggaggagggatatgatccatagtttccttttggattgttctactaccagatgtgcgttttgtttacagaagtgcggttttttacatttgcacttatacgcgtattttgcagtcatgtaatgtaattgaaggggtaagtgatttttttagttcctcttgtcccccctaggaacatgttggacctctgtaaattgttcgtttgaactttgaaatgtacatcggctgtgttctgcctatcaacttgcactaccaaaccatttgtcggcct

SEQ ID NO: 141384 - DNA, 721 bp, Zea Mays
acacgcacaccgcgacccagtccagagccagtacgtgcgaagcagcacgcacgctgctggtccgcgtacgcgagacgacggtcaggtcggccggtgcttttcagtttggaataatgacggcgacgacgacgacagccgccggcggcggcaaggtgcagccgcgcggcctgcccgcggcgctgtccctgctgctgctcctggtgttggcagcggggctgggcggtggcgccgaggcgcagcagacgtgcgcggggcagctgcgcgggctggccccctgcttgcgctacagcgtgccacccttgccggggcaggttccgccggcgcccgggccggagtgctgctccgcgctgggggccgtgtccagggactgcgcctgcggaacgttcagcatcatcaacagcctgccggccaagtgcggcctcccgccagtcagctgccagtaatgagctgatgatagccagtgcgatgcactgggcaaaaggcaagggatccaaacacgctgaataataaaaggccaccggcgtcgagtcgactcggtgtcctcattccgtcattcgtagtgaatgctaaagcaaactcttgagggtcgcgtgcccttttgcgatcttgtacgcacacgaccggcctgtggctgtgcaatgtgcaacatcgctttgattcaaagaaccaacaataatacagaacccactctgcacaaaagaaaaatcataactaaaacgaa

SEQ ID NO: 141385 - DNA, 3968 bp, Zea Mays
catggccagacacccagactgcgcttctcttcggcggtgcacgacgccgtctctttcatctgccccggcgaggccagccagatagagcgctagctgctgctgggcttccctcgtagactagctcgctccacatgtcccctccccgctttattatctgccagcctctcgagctctctcgcacctctccctcctcgcccattcttccgccctcttcgtgagtccttcccctaggcgctactcgtctgctctcctctcttctttttagtagctcgctcgccaggccgccaagccacatgcagcatgtggcggagcgcaagtagatagctgctgcgtcttcctggcctgagggtttcggattcatcagccgggccgccggggtcgccatcgccgccgttgggacggcggcggcggagtttggcgtcgagttcttcagagggttaggttaggtgcacgcgtctctcgcgttcctccttcccaactcgaattcctttctttccatacccgtccccatgacgttcgttcttccatgattcccttccatatttgctccagccaggccatccgcggctgcgtggctgctctcctgctattttaatgcctgccttctctccctctcacgcctcataaaaaaaactaataattccttgggatctgaggggatccgcgtggggttggtaggatcgcgggcagagattttagccaggactggaggaaaaccagtccgctctctctccatgagcttcggcggcatgttcgacggcgccggctccggcgtcttctcctacgacgctaccggcggcggcacgggcatgcacaaccccggccgcctcgtcccggccccgcccctgccgaaacctggcggattcggcgccacgggtctctccctcgggctgcaaacgaacatggaaggggctcagctgggcgacttgggtcgtatgggcctgattggcggcggcgggagcgggagcggaggcgacggggactcgctgggccgcggccgtgaggacgagatcgacagccggtcaggcagcgacaacgtcgacggcgcctccggtgacgagatcgacccggacaacagtaaccctcgcaggaagaagaagcgataccaccgccacacaccgcagcaaatccaagaactcgaagctgtgttcaaggagtgcccccaccccgacgagaagcaaaggatggagctcagcaagcggctcaacctagagagccgccaggtcaagttctggttccagaaccgccgcacgcagatgaagacgcagatcgagcggcacgagaacgcgctgctgaggcaggagaacgacaagctgagggcggagaacatgacgatccgggaggcgatgcgcaaccccatctgcgccaactgtggcggcgcggccgtgctcggggaggtgtcgctggaggagcagcacctccgcatagagaacgcgcggctcaaggacgagctggaccgcgtctgcgccctcgccggcaagttcctcggccgcccaatctcctctggcagctccatgtcgtcgtccctgcaaggctgctccggcctcgagctcgccgtcggctccaacaacggctacgggcccggtcccctcggcgcgtcagcgctgcagcccctccccgacctactcggcgccggccttccgggccccgtgggctcggccgccatgcgcttgcccatgggcattggcgccctcgacgttgcgctgcacggggcggccgccgacggcatcgaccgcaccgtcctcctcgagctggcgctcgccgcgatggaggagctcatgaaagtggcgcagatggacgagccgctctggctccgcagtcccgacggcagcggcttggaggcgctcaacctcgacgagtaccaccgagcgttcgccagggtgttcgggccgagccccgcgggctacgtcaccgaggctacccgcgaggccggcgtcgccataaccagcagcgtagacctcgtagacagcctcatggacgcggctcggtggtcggagatgttcccgtgcatcgtggcgagggcgagcacgacggacatcatctcgagcggcatgggcggcacgcgcagcgggtcaatccagctgatgcacgcggagctgcaggtgctgtcgccgctggtgccgatccgtgaggtggtgttccttcggttctgcaagcagcacgccgaggggctgtgggccgtggtcgacgtctcggtggacgccatcctccggcccgacggcggccaccaccacgcgcagaacggcggcggcgccgggtacatgggctgccgcctgctccccaccggctgcatcgtgcaagacatgaacaacggctactccaaggtcacgtgggttgtccacgcggagtacgacgaggcggtggtgcaccaactctaccgcccgctgctccagtccggccaggcccttggcgcgcgccgctggctcgcctcgctccagcgccagtgccagtacctcgccatcctctgctccaactctctccctgcccgcgaccacgccgcgatcacgccggtggggcggaggagcatgctgaagctggcgcagcggatgacggacaacttctgcgccggtgtgtgtgcgtcggcggcgcagaagtggcggcgcctggacgagtggcgcagcggcgagggaggagacgctgctgggaacggcggatcagcagccgcgggcgagggcgaggagaaggtgcggatgatggcgcggcacagcgtgggggcgcccggggatccccccggcgtggtgctcagcgccaccacgtcggtgcggctgcccgccacgtccccgcagcgcgtgttcgactacctccgcgacgagcagcgccgcggcgagtgggacatcctggccaacggtgaggcaatgcaggagatggaccacatcgccaagggccagcaccacggcaacgccgtctccctcctccgcccaaatgcaactagtggcaaccaaaacaacatgctcatcctgcaagagacctgcaccgacccgtcaggctctctggtggtgtacgccccggtggacgtgcagtccatgcacgtcgtcatgaacggtggcgactccgcctacgtctctctcctcccctctgggttcgccatcctcccggacggccactgccagtcaccaaacactgcacatcagggttcaccaagctgcggcggtagcagcagcagcagcagcacggggtctctagtcacggtggcattccagatcctggtgaacaacctgcccaccgcgaagctcaccgtggagtcggtggagaccgtcagcaacctgctctcctgcaccatccagaagatcaagtctgcgctccaggccagcatcgtcacgccctagctattagcgggcatttgacatggattccggccgccggttctcagaaaaaaggacggagtagtcggatgccatgtcaaatgcttagctagaggacgacatgctgtgacggcgcagatgctaaacaaggctgtgctcgtacgtacgtcgatcgcttcacatcagaccggcggggaactggtgcttgagaaggcagtgaaagaaaataagggtattaaaataaattatgtagtagtgtggagtatttattgcatagagcaatatatatatggggtgaggtacacagggattaagtcaagaacgaaccgttcgctaggctttgattgcttgagcaaacacgttttgctatcgctcaagcttgttatatgctcatgtggtggttcgggtattgacttaagtctctggcaaaagaaagtgaaacaccacctattagggcttctcctatatataaaatatatatgtagcagtttgttttcaaccatcttgtgaagagttctgttcttttgtttctccgatatagcgaaatatagagatgagaatgtctctgtgtttgtaacgtttgtgtagtgttatttcgtttgagttgatatatatgacatgtacgctttgttcatgtggaaaaaatatgttctagtgtagctcact

SEQ ID NO: 141386 - DNA, 1471 bp, Zea Mays
ccgcaccgcactcacaccatttcaccatctctccgcggaagcagatcctctccgctcgccagcctccccctcctgctgctgcctcctcgcttcaagcaacacccgaagcggcaacaaccaccaccaccaccaccaccggacctgcctgagcgaccccttggcttcccactccactgaagcagggcgagagagagtaaggaggaggaggagaagccatggcgagcgacggcgacggtaagggccgcgtcgctacggcgccgggggcagggtacgggtacgcggcgtacggcggctaccagggggcggaggagcggaagtggtggccgtggctcgtgcccaccgtcatcgtcgcctgcatcgccgtgttcgtcgtcgagatgtacgagaacaactgccccaagcacgggagccagctcggcgactgcgtcgccggcttcctccgccgcttctccttccagccgctccgcgagaacccgctgctcggcccgtcctcctccactttggagaaaatgggagctcttgactggaataaaattgtccatcaaaaccaagggtggcgccttattagctgcatctggctccatgctggcctaatccatttggttgtgaacatgctaagtttgctgtttattggaatccgccttgagcagcaatttggatttgttcgcattggtgccatatacctactgtctggttttggtggcagcgtgttgtctgcactcttcctacggaacagctacatctccgttggtgcttctggagctctatttggcctgctgggatccatgctttctgaactactcatgaactggactatatactccaacaaggcagcagctataataacactgttgtttattattgcactcaatttggctattgggatactacctcacgttgacaactttgctcacattggtggattcgcgacgggtttcctcttgggttttgttctgttggcaaggcctcaatttagctggatggaaagtcatgagttgccacacactaaccaacctcccaagtacaaagcataccagtatattttgtgggttgtggcactcgtcttgctgttagttgggtttgtgatttcactggtgatgcttttcaaagggaagaacgggaacgatggctgccattggtgccactacctgaactgcgtgccaacatccaagtggaagtgtaacacctagacacctcagttttctgtacactcgggggcaaaaatgtagtatccagatttacaagaccattctctatgtttgtttgtctgtagatatgaacaagttctttgttgtttactggttttgagtttccttgcctatgtaaactgcttcgttgagcgttctatgtttataattggagtttgatagctgttttaaattgctcaatggaaaagcagtagctttggtgcgcagttgatcgtggtgtttacacaaataaaaatacgataattttttatctaacagataac

SEQ ID NO: 141387 - DNA, 1558 bp, Zea Mays
ccgcaccgcactcacaccatttcaccatctctccgcggaagcagatcctctccgctcgccagcctccccctcctgctgctgcctcctcgcttcaagcaacacccgaagcggcaacaaccaccaccaccaccaccaccggacctgcctgagcgaccccttggcttcccactccactgaagcagggcgagagagagtaaggaggaggaggagaagccatggcgagcgacggcgacggtaagggccgcgtcgctacggcgccgggggcagggtacgggtacgcggcgtacggcggctaccagggggcggaggagcggaagtggtggccgtggctcgtgcccaccgtcatcgtcgcctgcatcgccgtgttcgtcgtcgagatgtacgagaacaactgccccaagcacgggagccagctcggcgactgcgtcgccggcttcctccgccgcttctccttccagccgctccgcgagaacccgctgctcggcccgtcctcctccactttggagaaaatgggagctcttgactggaataaaattgtccatcaaaaccaagggtggcgccttattagctgcatctggctccatgctggcctaatccatttggttgtgaacatgctaagtttgctgtttattggaatccgccttgagcagcaatttggatttgttcgcattggtgccatatacctactgtctggttttggtggcagcgtgttgtctgcactcttcctacggaacagctacatctccgttggtgcttctggagctctatttggcctgctgggatccatgctttctgaactactcatgaactggactatatactccaacaaggccagtacaagcaataaatgaataacattttattttatccagttgattgataatcgcttagctcatctacttaatttgctcttgcaggcagcagctataataacactgttgtttattattgcactcaatttggctattgggatactacctcacgttgacaactttgctcacattggtggattcgcgacgggtttcctcttgggttttgttctgttggcaaggcctcaatttagctggatggaaagtcatgagttgccacacactaaccaacctcccaagtacaaagcataccagtatattttgtgggttgtggcactcgtcttgctgttagttgggtttgtgatttcactggtgatgcttttcaaagggaagaacgggaacgatggctgccattggtgccactacctgaactgcgtgccaacatccaagtggaagtgtaacacctagacacctcagttttctgtacactcgggggcaaaaatgtagtatccagatttacaagaccattctctatgtttgtttgtctgtagatatgaacaagttctttgttgtttactggttttgagtttccttgcctatgtaaactgcttcgttgagcgttctatgtttataattggagtttgatagctgttttaaattgctcaatggaaaagcagtagctttggtgcgcagttgatcgtggtgtttacacaaataaaaatacgataattttttatctaacagataac

SEQ ID NO: 141388 - DNA, 1450 bp, Zea Mays
accaagctgaactgaagcatgaagagaactggttatggggttttgttctggtaatatgttttcgttctgaattcagaaggtttcatcaagagcttaaggagcccaagaatatatggcgttagctgcactcttgtttagttcaccatttgattttcaggtgaacagtctgtttgggcatcttaagtatccccatttgtaggatagaactgggaactggtggctaccaataaagtgttactttttttcctcctcccccagttcttttttaacgtctggagaagtccggatcgttttggccaaacatttgaatatatcatgagatgggaagcacataggttgttggtgtggtggggtcagggcaagccacgcccacaatccagattgtccatttcagcacttgctcaacctccaccacaggttcagatatgcatctacatccaatccaaaaccagtgggtcctttggacatttctgcctctaaaaaaatatctcctttcagtaacagtatgcagccttaggagaagctaagctgtcttctaactctctctctcgagttcatagtttttgctcttcctctctcatggtcacaatgcttgcagctagttctctagtgaacagcaacctcgcttgctcatcaaggatatcatcctgttcagacttcacatatagccactcctggcgtcccatacatgctatgaaactccatcagatgcgtgctgtgagctcaatacgtataagttgtgctgccactaaacctgcaaagactcctgctgaagaagaatggaaagttaagcggcaactgctatcagaaaagcgggtacgaagtgtcgatgtgaaggaagcactgcgccttcaaaaggaaaacaactttgtcattcttgatgtcaggccagaagcagagtttaaagaggctcatccacctggcgccatcaatgtacaaatatacagattaatcaaggaatggacagcgtgggatattgcgaggcgtgcagcgtttgcgttcttcggcatatttgctggaacagaagagaatcctgagttcatacagatgcaggtgttgatacgaaggttgggaaagatgcgaagataattgtggcatgctctacaggagggacactgaagccaacgcaaaatttccctgatgggaagcaatctcggtccctgatagctgcgtacttgttggtcctgaatggctacagcaacgtgtaccatctggaaggaggactttacacatggttcaaagaaggactaccagctgttgcaggagaagagtaagagagacattacgaacatagtgttcgcatgctggagagagtggagagtggagactagagttgcgaggacttgtagtgatgtgcttgcttcacagtcacagggttgtcgattgttgtgtacggattgagatgtcgaagatttctcctgccaatgtgatgctgtcctagattttctcg

SEQ ID NO: 141389 - DNA, 1407 bp, Zea Mays
accaagctgaactgaagcatgaagagaactggttatggggttttgttctggtaatatgttttcgttctgaattcagaaggtttcatcaagagcttaaggagcccaagaatatatggcgttagctgcactcttgtttagttcaccatttgattttcaggtgaacagtctgtttgggcatcttaagtatccccatttgtaggatagaactgggaactggtggctaccaataaagtgttactttttttcctcctcccccagttcttttttaacgtctggagaagtccggatcgttttggccaaacatttgaatatatcatgagatgggaagcacataggttgttggtgtggtggggtcagggcaagccacgcccacaatccagattgtccatttcagcacttgctcaacctccaccacaggttcagatatgcatctacatccaatccaaaaccagtgggtcctttggacatttctgcctctaaaaaaatatctcctttcagtaacagtatgcagccttaggagaagctaagctgtcttctaactctctctctcgagttcatagtttttgctcttcctctctcatggtcacaatgcttgcagctagttctctagtgaacagcaacctcgcttgctcatcaaggatatcatcctgttcagacttcacatatagccactcctggcgtcccatacatgctatgaaactccatcagatgcgtgctgtgagctcaatacgtataagttgtgctgccactaaacctgcaaagactcctgctgaagaagaatggaaagttaagcggcaactgctatcagaaaagcgggtacgaagtgtcgatgtgaaggaagcactgcgccttcaaaaggaaaacaactttgtcattcttgatgtcaggccagaagcagagtttaaagagattaatcaaggaatggacagcgtgggatattgcgaggcgtgcagcgtttgcgttcttcggcatatttgctggaacagaagagaatcctgagttcatacagagtgttgatacgaaggttgggaaagatgcgaagataattgtggcatgctctacaggagggacactgaagccaacgcaaaatttccctgatgggaagcaatctcggtccctgatagctgcgtacttgttggtcctgaatggctacagcaacgtgtaccatctggaaggaggactttacacatggttcaaagaaggactaccagctgttgcaggagaagagtaagagagacattacgaacatagtgttcgcatgctggagagagtggagagtggagactagagttgcgaggacttgtagtgatgtgcttgcttcacagtcacagggttgtcgattgttgtgtacggattgagatgtcgaagatttctcctgccaatgtgatgctgtcctagattttctcg

SEQ ID NO: 141390 - DNA, 1179 bp, Zea Mays
gccccacaaccgctctatacgactcctccatcctccccccctccccgtgatggctgcaatggatggggtaattgtagtggagctgtagaggcggcgggggtgcggttgcgacggactgtgctgcgccgacaagctgggaagaggaggcagcggcggcggggtgggacttgggatgggtcttctgtcgaaccgggtggagcggtcggagatcaggcccggcgaccacatctacacctggcgggccgtctacgcctactcccaccacggtacgctcctcagtcccctccgaattccgatggtgataagaattcctgccctcgcgagttccactacctaattgctgccgccgatggcacggatcaggaattctagtagtgtgcaagttagctgttcaccggaattctggcccgcgccggctcgctctggacttccttttcgccgccgctggatgctggtatttgttgtttttttgctttgttccgcgataggattactagtggtgatttgtgtgtactctctacacaaacggaagataccacacaaactgaagataccatggtctctacataaacccttccagatggccaggatgccacatgctgtgttctgctttccgtgcagaacaaatggcacttgttgctgctcacctactgctaaccaacgtgtctatctgtttctgaactttgttgtctctagtgtggagcagccttactgttagctcgagtttacgtgcaggaaagaaacactacataaggtttgacccatgcttcactgtgcctcataattgactagtttaggcctagttgctgtaaaccctgatcaccaaagtatcctatgtcaattaagttgttgaactattcggtcacttttactagttgagggaacttcctttatgtatttattgtttactgcaggttcttttgctttgcgtcttttcactttcagataacggaggtcgatcttcatttaggaagcttatacgacccttcaacagtgtcacaattgtgctacagggacagtgtctccacagtcagtgccttttgttggcagatgccaagatctgggttctgcactaccagcatgaaaagctgctcaaattgttgaaacccccctatttggcttctcctgcatcaatgcatcatacatcctctctggctctggatttttttttcaagtaat

SEQ ID NO: 141391 - DNA, 1374 bp, Zea Mays
gccccacaaccgctctatacgactcctccatcctccccccctccccgtgatggctgcaatggatggggtaattgtagtggagctgtagaggcggcgggggtgcggttgcgacggactgtgctgcgccgacaagctgggaagaggaggcagcggcggcggggtgggacttgggatgggtcttctgtcgaaccgggtggagcggtcggagatcaggcccggcgaccacatctacacctggcgggccgtctacgcctactcccaccacggtatttatgtcgggggaagcaaagtggtccattttacacgtaagaaagaaactgaaacttcagattcatcagactccacctccagcctgatctcagagatttcatcagagtgccaaacattccctgattgtggatttcagctgtctaatagtggtgttgtcctcacttgcttggactgtttcctccgcaacggctccctctattgcttcgagtatggagtgccatctgcagttttccttgcaaagattcgtggggggacctgcaccattgccgaatcagacccaccagaagttgttgtccatcgagcgatgtacctgcttcaaaatggttttggaaactacgacatgtttgagaagaactgcgaagacttcgcactctactgcaagactgggcttctacctgttgaggagcctggcattgggactagtgggcaagcttcttctgctattggtgtgccgttggcagctcttctgtccactccgttcaagcttctggctgctggtccgcttggaatggccactgtcactgctgggatgtactgtgctggcagatacattactgacataggagtaaggaaggacgtagcaaaagttgaagtggagaaattatcatcgcaccccggtttccaccttgttgaagatgaagaatcagtcaacaagcgatcagaaaaaccaaagaccttgctccctatgaagaggaaacgagaaaggtgactgcgaagcacagcttaggaggatgaacttctcttcccttcaattggtgtcgaattgtggataatttgggatatgataataagactcggtatagatatgtgccttgcgaatgtatcataattggattaggcgcacccctcacctgatcaactgtaactgccttataaattcaatcaaattgctatataatgtagatttttcttctttgtgaggtttcagtcttctgctgcaattaataacagttataatattttttactgatctgggagatcactgtatctgtattctgtagttacaacttacaaggtagagcaaactatcggcaatggcgttttcatcaggtatactgtacgaaaagtgaatataaaaaattgagcagagcttgtttttggaga

SEQ ID NO: 141392 - DNA, 1755 bp, Zea Mays
accaatacagcactggaccactatatatccccccgccccgcgctggggccggtccccagctagcgagcgccgccggtgccagtgcaacagaacacgcaccacacgggcgcagactgcagagacaacagatcgatcgtccaatggcgatcggcgggtcggaggccggcgggggaggcgcggggagcatgaggagcgtgctggtgacgggcggcgcggggttcatcggcacgcacacggtgctgcgcctgctggagcagggctacatcgtcaccgtcgtcgacaacttccacaactccgtccccgaggcgctcgaccgcgtccgcctcatcgccggccccgcgctctccacccgcctcgacttcatccgcggggacctgaggaacaccgatgacttggagaaggtgttcgctgccaggaggtacgacgccgtcatccacttcgctgggctgaaggccgtgggggagagcgtcgcgcacccggagatgtactacgagaacaacctcatcggcaccatcaacctctacaagagcatgaaggagcacggctgcaagaagctggttttctcgtcatccgccaccgtgtacggctggccggaggtgatcccatgcgtcgaggactccaagctgcaggccgccaacccatacggcaggaccaagcttatccttgaggatatggcgcgtgactaccaccgcgcggacacggagtggagcatcgtcctgctgcgctacttcaaccccatcggtgcgcacagctccggcgagatcggagaggaccccaaggggataccgaacaacctgctgccctacatccagcaggtcgccgtcggcaggctccccgagctcaacgtctacggccacgattaccccacccgggacggcaccgcgatcagggactacatacacgtcgtcgacctcgccgatgggcacatcgcagcgctcaagaagctcttcgactctcctgatataggttgtgtggcctacaatctgggtacagggcgcggcacatccgttctggagatggtggcggcgttcaagaaggcctccggcaaggagattcccaccaagttgtgccccaggagaccgggtgacgcgacggaggtttacgcgtccactgagaaggctgaaagagagcttgcatggagggcccaatatggaatcgaggagatgtgcagggaccaatggaactgggccaagaagaacccgtatggctactgcggcggtgcaaaaaaatagcgtaggttcgtcgcaatgaagaattgtcgatagtagttctcttctctacactaatcaatggaacatgtaataaacacggaccacctaatctctactagtttctatggtttccactatcattccttttgtaaaaagtctttacacttctttctaatctaacccatagtccaaaacaagtcctatcagcgtgtggctagttctctctgccaccacacgagtcacaactgagagcgaaagccctagcacccttactttgtcccaaacccgcaaccccacgcccgcatctaacggctgcggcctcggtcgatctccgtcgaggcggaggcgacacttggagaggctatccccatttcttattatggaagcggagagaaagcagtgaggttcaagattgcaacagtcatctagagctaggacgccatggccatccggagccacgattgtcccaatccccctcgtttttgtctcttcagtggcgcttattatttcctatgttttcctgtgaaaatgaactgattcctgt

SEQ ID NO: 141393 - DNA, 1836 bp, Zea Mays
ggccggtccccagctagcgagcgccgccggtgccagtgcaacagaacacgcaccacacgggcgcagactgcagagacaacagatcgatcgtccaatggcgatcggcgggtcggaggccggcgggggaggcgcggggagcatgaggagcgtgctggtgacgggcggcgcggggttcatcggcacgcacacggtgctgcgcctgctggagcagggctacatcgtcaccgtcgtcgacaacttccacaactccgtccccgaggcgctcgaccgcgtccgcctcatcgccggccccgcgctctccacccgcctcgacttcatccgcgtaagtaccgaagccgcggtgcgggtccgttcgcatgagcctttgtttgcctttgccccgcgccacgctgattgaattggtctctcgatcgcgctgtgctgcatgcccgtcgcgtggggtttttcagggggacctgaggaacaccgatgacttggagaaggtgttcgctgccaggaggtacgacgccgtcatccacttcgctgggctgaaggccgtgggggagagcgtcgcgcacccggagatgtactacgagaacaacctcatcggcaccatcaacctctacaagagcatgaaggagcacggctgcaagaagctggttttctcgtcatccgccaccgtgtacggctggccggaggtgatcccatgcgtcgaggactccaagctgcaggccgccaacccatacggcaggaccaagcttatccttgaggatatggcgcgtgactaccaccgcgcggacacggagtggagcatcgtcctgctgcgctacttcaaccccatcggtgcgcacagctccggcgagatcggagaggaccccaaggggataccgaacaacctgctgccctacatccagcaggtcgccgtcggcaggctccccgagctcaacgtctacggccacgattaccccacccgggacggcaccgcgatcagggactacatacacgtcgtcgacctcgccgatgggcacatcgcagcgctcaagaagctcttcgactctcctgatataggttgtgtggcctacaatctgggtacagggcgcggcacatccgttctggagatggtggcggcgttcaagaaggcctccggcaaggagattcccaccaagttgtgccccaggagaccgggtgacgcgacggaggtttacgcgtccactgagaaggctgaaagagagcttgcatggagggcccaatatggaatcgaggagatgtgcagggaccaatggaactgggccaagaagaacccgtatggctactgcggcggtgcaaaaaaatagcgtaggttcgtcgcaatgaagaattgtcgatagtagttctcttctctacactaatcaatggaacatgtaataaacacggaccacctaatctctactagtttctatggtttccactatcattccttttgtaaaaagtctttacacttctttctaatctaacccatagtccaaaacaagtcctatcagcgtgtggctagttctctctgccaccacacgagtcacaactgagagcgaaagccctagcacccttactttgtcccaaacccgcaaccccacgcccgcatctaacggctgcggcctcggtcgatctccgtcgaggcggaggcgacacttggagaggctatccccatttcttattatggaagcggagagaaagcagtgaggttcaagattgcaacagtcatctagagctaggacgccatggccatccggagccacgattgtcccaatccccctcgtttttgtctcttcagtggcgcttattatttcctatgttttcctgtgaaaatgaactgattcctgt

SEQ ID NO: 141394 - DNA, 1009 bp, Zea Mays
actgaacattgactcttatctgcatcatctaaggctatcttgggcagcttactcaaaaccccatatccatatttaaacttcactttgtgaatattgtcatctacagtgcaaaccgtgttttgagtagccatatgtacatagcctaaggcactatttagttcacatatttgtaccgttaatggtaaccgataacgttagactatttttgtttaagtccaaccataatcatatatcactctagaaattgataccgtcctattcaaacttgttacaactgctaatcgagtgtgaattattattgttgtcatttacgttatatttcatgaacaaaacgacacctaaaacttatcactttatcaggacaaactaataattgtgtggtatttctgtgacagggcccaatatggaatcgaggagatgtgcagggaccaatggaactgggccaagaagaacccgtatggctactgcggcggtgcaaaaaaatagcgtaggttcgtcgcaatgaagaattgtcgatagtagttctcttctctacactaatcaatggaacatgtaataaacacggaccacctaatctctactagtttctatggtttccactatcattccttttgtaaaaagtctttacacttctttctaatctaacccatagtccaaaacaagtcctatcagcgtgtggctagttctctctgccaccacacgagtcacaactgagagcgaaagccctagcacccttactttgtcccaaacccgcaaccccacgcccgcatctaacggctgcggcctcggtcgatctccgtcgaggcggaggcgacacttggagaggctatccccatttcttattatggaagcggagagaaagcagtgaggttcaagattgcaacagtcatctagagctaggacgccatggccatccggagccacgattgtcccaatccccctcgtttttgtctcttcagtggcgcttattatttcctatgttttcctgtgaaaatgaactgattcctgt

SEQ ID NO: 141395 - DNA, 975 bp, Zea Mays
cctcctcttacaaaagtctcgccactccaattgtcctccaatccatcaccaccgggcttcttcacgttcctgaagcatggcgccgtcctcccggcgcggaacggcgcgctcttcgtgccgctcctcgtcctcacggccgcgctggccgcggcactgctcctgggcaacgccctctccgtgcagccgctggcggccgccgtgctgctggacgcggacgccatcagccgcgtggacccggccgccgccgcgtaccgggacctcgtgagcgccctccagtccgacctccgccgcctcctcctctccgccggcgcgtgcctcctcggcgccgtcgtggccggctccgcgctcaagatcgccaccgtcttcgccgccgtcgccgcctactcctcctcttcctcgtcctccgccttcgccgccgccaggcgcaacgtctggggccccgtcctgaccgtcctgttcgggtacgccatcgagctcgcctgcgccggcggtatcgccgcgctgggggtgctcgcggtcgtgctcctggactactcgctgctgctcctcttcctcgacgtgctggcggtgctcctcgcctcgctcttcctcgtgtacctcaccgtggtgtgcgcggtggccgtggccgtctccgcggccgagcccgggcggcgcggcgccgccgccgtgtcccgcgcctggcgcctcatgcgcggccgcggcgcgcaggccgcgctctacgtcgtggtcacgtgggggctcgccgccgcggcctcgcccgtgtacacgctcgcgctcacctggtggccccggagcgccgtgcgcggtgtggccgccggcgtcgcctacgtgctgctgctcggcgccgtcgaggtcttctccgtcgccgccgtcaccgcgtactacttccaatgcagggagcgcaccgaggaagaggaggagatcatggcggggcataggtacatgaagctgcccaatggggatgagtgagccagc

SEQ ID NO: 141396 - DNA, 435 bp, Zea Mays
atctcaatctttatggcgagctggaccatccaaacacccactacgtcccctcacctcaacgtggaagctgcacggcgcatcgggagcgctgacccccgtggtggccaggcagagcgcgggtgcaccgacggcatccgcgacgaagcgcgcgccgataccgagcggccaaccgtcgggaccaaccacggagagcgtaccagacggggccaactccacgaccgtccgcgctacctccgcggccgacggtcgcactcgcgccgcggacaccgctgccgctgcggccaccgaaccctgacggtcgaggtggagacggggcgcaaggacgctggcttcttggagaagagggtggcggaggaggggagcggcgatgagagcagggaaggccacggagacgacgacatggccaaaaattggaggttgagaacttgagatttg

SEQ ID NO: 141397 - DNA, 417 bp, Zea Mays
atggcgagctggaccatccaaacacccactacgtcccctcacctcaacgtggaagctgcacggcgcatcgggagcgctgacccccgtggtggccaggcagagcgcgggtgcaccgacggcatccgcgacgaagcgcgcgccgataccgagcggccaaccgtcgggaccaaccacggagagcgtaccagacggggccaactccacgaccgtccgcgctacctccgcggccgacggtcgcactcgcgccgcggacaccgctgccgctgcggccaccgaaccctgacggtcgaggtggagacggggcgcaaggacgctggcttcttggagaagagggtggcggaggaggggagcggcgatgagagcagggaaggccacggagacgacgacatggccaaaaattggaggttgagaacttga

SEQ ID NO: 141398 - DNA, 1188 bp, Zea Mays
atgctagaggatcatgggaagcttgagccagtggagcaaactatcacaagtgcaaggcagatcactaatttcttgtatgctcacacaagggtgttagatttgatgagaaagtttctgaagaaagacttggtgagatctaggattactagatttgctactacctacttgaacttgaaaagcttgcttgataacaagaaagaattgacaaggttgttcagatcagatgaacttaatgagttgggttacttgaaaaaggacaagggaaagaaagccaataaagttgtgagatctgaaaccttttggaaaaatgttgatatagctgtaaatttttttgaaccattggcaaatgtgttgaggagactggacagtgatgtaccggcaatggaattctttcatggattaatgcttgaggcaaagaaagaaatttctgagaggtttgacaatgatgagagccgctacaaagttgcttgggatattattgataagcgatctggagtgattaattgcattacaaagatgattggtgatgaagaaacacaagacaaaataattgaagaactctacatgtaccaagatcaacaagggacatttggacatgaaattgccataaggcaaaggagaaacaagaactttaatccagcaaagtggtggctaaaccatggtacaaacacacctaatctgaggatattggcttcaaaaattctaaatctaacatgtagttcctcagcttgtgagagaaattggtccgtatttgaacaggttcatacaaaaaggagaaacaggctacttcatgataggatgagagaccttgtgtttgttaaatttaactccaagctaaggggaaagaaggagagaatagacaaacatcctttagagagggaagtagatgatgttgttggtgatgatgacaatgaattcattactggtattgtacctcttccgaatgatgttgttgaaccagcgcaagatggaagatcacagggagaacaaacatcacaagcacaagttcaagtacaagcaaaaagaaagaggtctatgaagcctagaaagaagttaagaagcctccagtctctgatgcgtgatgttcaagttcaagtgcagcagtcctcatcagattcagaagatggtgacattgcaatggaatcctctgaatctgataagtctccacatgcctttgattctgattga

SEQ ID NO: 141399 - DNA, 948 bp, Zea Mays
atgaacactttaggagtcttgaagtctacttgcttcaaatggaaaatcaacaagcagcgcgtggaggaagtggtccctcttctagtcgcggccaaacagcagcagcgcgtggaggaagcggtcgtgctcgtcttcggtccacttctcccatcatcgacaactctttgcgcagttgcagacttgcaggaagaaggaaggataagcgatggaggctggcagaccgtcggtgagaaaaagcgccatggaagaccacaacaggtccttttacttctattttactatttatacagacaaacaaccaacattcaggggtacaaagaagttgttacccagcaggataagcatgaagaaatagctttcgttgatgagatcgctagaacagcgccaattaagtacttgcaccggtacttagtgcagaagggggctgtgcctcaggactacgaggacttcaagagaatgctgacatccctatggtttgatttgtatggaagaggtggcaactctagcttctcttctgcctttgagcatgtgtttgttggtgagatcaaaggacggggacaaggggagagtgaggtatcgggcttccataactggattcaggcaagttctcgtgttgttaatgaatctaatttcctcatttggacatttctaacagtttactggagagacagaaaatgtgatacagtatatattcagcgtcgtggtgaatcgcctgattcagagatacagctgctgactgttcagtttgagtggcatggcgtgctgaaatcagtatccagcacgttgattggcgtcagtcctgagtttgaggttgcactctacacgttgtgcttttttgttggaggggaagataaccgtgtcgatattggcccgtacagtgtgaacgtcaagtgctaccgattggggaacaacaaaattggatcagcctttcccattgcagagaactga

SEQ ID NO: 141400 - DNA, 2539 bp, Zea Mays
agcgctaccaattggcacctcctgctgccgcgccaccatgctctatgctcacctccaccttcgccgcccctgctccccgttcgcctactgcccctacagcaagctatccgtttccatcccaaccctcaaccctctgccacgcgggccgctttctcgccgcgcctgcgcctgcgcccaccggtacctacgacacgtcgcgtcaccggcggatgaggaagaggctgggtacggggagggcagcgtggagggtgatgatctgggacccgcgtcagcggcggcagtggcagcgaccatccgccgggcctccagcgcgtcgcccgtgcggttcaggtgcgtgcttggagaggcagtggaggaaccgcgcggcgaggagggcttggccgacccaagccccgactttcgccggctctgtgcggagcagcttgagattttccgagtgctcatctcccgtgacgccgtactctctgtgtacgtgagacctgctggcagttatattatggatcagctggaactgcgccgagttgctttatatcctggaattaataatctttctgaaaaagatacccctgtcctagtttgtaatttttctatatcttctggactacgagcagcagaagcttttctagtaaaacaacagatggaagtcataagagaatttggggctatagttcttccaatggtgaaacacccctttgttgttgggttccttgtcgtagagcttccagaattacatggtggacgtgctatgaactcttatactgctgatactgagttaccacctaacacatttatggataaatcatctgatgtaactccacatactgcgtgggatattcaaacttatggtgatcaggcaaagggttattctcagcttgttaatgaatggaagaatagtgcccttatgatttctcgaactctggcaatggcttatgttatggatcagaaagcatatctgcttcaacaaacttcctggcaaaataatgttagaatgagtggcttagtggaacagatttggggccccctctctagcattcgtgctcttgcaaagatgttatcctttcacacaaagagaagtgagatcccctatgatattattgaagatatgctcacccaaggtgatcacatgaaagatgctctgcaacaaattcaagatgctgtatatctgactaaggcaaacatagttagaagcaatgaggagactttaaagacaattcagagatcaccacatccttcaagaactttatcagattataaatcagtacctgggaatgattcacagaagttggatccagttttagccctgagttctgatgggtatgacatggtgatgcctatgccacctctatggctggcacctcttcaacaccaatatgatagaccatgtgatctctgtgatgtgctgaaggatttagttgcaggagcattaccacttgcttataagcagcagcgcacattagatttaacagaaatttcacatccacttcatgttgctgttgaggaatctgctttaagaaaagccttgagtaatctgattgagggagcgctcctacgtacacagcatggtggagtagttcaaatatgtgcagtcgaagcacctgcaggaggcgctctcgtggtcatcgatgatgatgggcctgatatgcaatacatgactcagatgcgctccctggccccatttggatcagaccttgcagatggtatgctcgaagataacatgacgtggaacttcatcgcgggattaacggtcgcacgtgagctacttgaggaatatggatgcgtcctgcgtgtgatatcacctcgaaggactgatgcggttataggcaccggagggagtcgtgttgagatatggttgccatcttttcagacacaagcagccaagactagtcaagaagtgtagtttacatctgaggaagcgaggcatgcttcgttttcccgtacgttttgaaatctgtagatattggcttaccggaatgttactgtaccagtaacatctcatatgttgaatttgcaaaattacaggacgtgcgcaaatgattgtgatggtgatgttgcattgctgatgctccttttgctacttcatttctacttccattgtctcattgctgatgctccttttacaatataaatggtcgaatatgtgtgtgtgttttcttcatcctgcattcctgctgatccaaaccaactgacacctcaccattgcaaacccaccatcagaagctatcaacaaacaaaaacgccatcatctgaccattagcagccaaatccccattcagcaaaaccatgtcttggtcgtttcttggcgtcagacgctttgttcccttgtcagctgcgttcaccgtccgacgtggacgctctgctcggtgggtgatccaggagagaagggcacgaacacgtgaccgccaaacataggccgcatcagcgcgtcatcgaccttgcgccagtagtagtgcaccgtgtgagtcggcttgctgaggaggctggacggcctcacaatatgtgccatggttcgagcctgcatgcttgtcaggaaaggtgagag

SEQ ID NO: 141401 - DNA, 2543 bp, Zea Mays
agcgctaccaattggcacctcctgctgccgcgccaccatgctctatgctcacctccaccttcgccgcccctgctccccgttcgcctactgcccctacagcaagctatccgtttccatcccaaccctcaaccctctgccacgcgggccgctttctcgccgcgcctgcgcctgcgcccaccggtacctacgacacgtcgcgtcaccggcggatgaggaagaggctgggtacggggagggcagcgtggagggtgatgatctgggacccgcgtcagcggcggcagtggcagcgaccatccgccgggcctccagcgcgtcgcccgtgcggttcaggtgcgtgcttggagaggcagtggaggaaccgcgcggcgaggagggcttggccgacccaagccccgactttcgccggctctgtgcggagcagcttgagattttccgagtgctcatctcccgtgacgccgtactctctgtgtacgtgagacctgctggcagttatattatggatcagctggaactgcgccgagttgctttatatcctggaattaataatctttctgaaaaagatacccctgtcctagtttgtaatttttctatatcttctggactacgagcagcagaagcttttctagtaaaacaacagatggaagtcataagagaatttggggctatagttcttccaatggtgaaacacccctttgttgttgggttccttgtcgtagagcttccagaattacatggtggacgtgctatgaactcttatactgctgatactgagttaccacctaacacatttatggataaatcatctgatgtaactccacatactgcgtgggatattcaaacttatggtgatcaggcaaagggttattctcagcttgttaatgaatggaagaatagtgcccttatgatttctcgaactctggcaatggcttatgttatggatcagaaagcatatctgcttcaacaaacttcctggcaaaataatgttagaatgagtggcttagtggaacagatttggggccccctctctagcattcgtgctcttgcaaagatgttatcctttcacacaaagagaagtgagatcccctatgatattattgaagatatgctcacccaaggtgatcacatgaaagatgctctgcaacaaattcaagatgctgtatatctgactaaggcaaacatagttagaagcaatgaggagactttaaagacaattcagagatcaccacatccttcaagaactttatcagattataaatcagtacctgggaatgattcacagaagttggatccagttttagccctgagttctgatgggtatgacatggtgatgcctatgccacctctatggctggcacctcttcaacaccaatatgataggcagaccatgtgatctctgtgatgtgctgaaggatttagttgcaggagcattaccacttgcttataagcagcagcgcacattagatttaacagaaatttcacatccacttcatgttgctgttgaggaatctgctttaagaaaagccttgagtaatctgattgagggagcgctcctacgtacacagcatggtggagtagttcaaatatgtgcagtcgaagcacctgcaggaggcgctctcgtggtcatcgatgatgatgggcctgatatgcaatacatgactcagatgcgctccctggccccatttggatcagaccttgcagatggtatgctcgaagataacatgacgtggaacttcatcgcgggattaacggtcgcacgtgagctacttgaggaatatggatgcgtcctgcgtgtgatatcacctcgaaggactgatgcggttataggcaccggagggagtcgtgttgagatatggttgccatcttttcagacacaagcagccaagactagtcaagaagtgtagtttacatctgaggaagcgaggcatgcttcgttttcccgtacgttttgaaatctgtagatattggcttaccggaatgttactgtaccagtaacatctcatatgttgaatttgcaaaattacaggacgtgcgcaaatgattgtgatggtgatgttgcattgctgatgctccttttgctacttcatttctacttccattgtctcattgctgatgctccttttacaatataaatggtcgaatatgtgtgtgtgttttcttcatcctgcattcctgctgatccaaaccaactgacacctcaccattgcaaacccaccatcagaagctatcaacaaacaaaaacgccatcatctgaccattagcagccaaatccccattcagcaaaaccatgtcttggtcgtttcttggcgtcagacgctttgttcccttgtcagctgcgttcaccgtccgacgtggacgctctgctcggtgggtgatccaggagagaagggcacgaacacgtgaccgccaaacataggccgcatcagcgcgtcatcgaccttgcgccagtagtagtgcaccgtgtgagtcggcttgctgaggaggctggacggcctcacaatatgtgccatggttcgagcctgcatgcttgtcaggaaaggtgagag

SEQ ID NO: 141402 - DNA, 189 bp, Zea Mays
gtattttgttacctgcttcaaagttgtacacaaacagatttataatttaactacccgagctaatgcagctaaatgcactgataacatattgacatgattacagaatggctaaatgcaacattcacccccttaatcttgtcaaccttctatcttgacgacgcccaattgcctcctaagttctgagaattt

SEQ ID NO: 141403 - DNA, 1758 bp, Zea Mays
atcccggccggccgtgccacaccggagccatatctgacatctagcgctgggcccaccagctggcaagctttagtgagtggtttttgtcgcagtccggttcacaaagtgggtcgggttttttcctcgtgctacctttctcaccgtttctctcctagtctcctctcgtttcccgtcctcctcccgttgggagtataaaatttcctaatccgcaaacgaagcttccagaaggcttcttcttgcgtaccttccacttccacccaacgcgactcgctctttcccgcatctggaagtcgccggctcagatccagccgggctgcggcgctggccggatggccgagcagggcggcgcagccggggaggccgctggcagcgacccccctgcgcctgcgcctgcgactgccccggcgccagccccagcgcttgctgcggacgcggccgggcagaggtccctgccgacgccgttcctgaccaagacgtaccagctggtggacgacccggcggtggacgacgtgatctcgtggaacgaggacggctcgacgttcgtggtgtggcggccggcggagtttgcgcgcgacctcctccccaagtatttcaagcacaataacttctccagctttgtgcggcagctcaacacctacggatttaggaagatggtgcccgaccggtgggagttcgccaacgacttcttccgccgtggggagaagcgcctgctttgcgacatacaccgacggaaggtagcaccggctccggcggcggggctggccactgcggccgccgctgccgcgtccggggccgtaacggtggccgcggcgccgatccccatggctctgccggtgcggccggcctcaccgtcgctctctaccgacgagcatgtcctctcctctaactccggatccgccgaggaccacccgcaggctgccgcttccggctccgtcagcgcgtcggcgtccggcgacacgggggaggaaaacgagcgcctccggcgggagaacgcgcggctgacccgcgagctcgggcagatgaagaagctctgcaacaacatcttgctcctcatgaccaagtacgcctcctcccagcagctagacgcctctgcagcgctctcctctgtcgtcaactgctccggcgagtcatcggaggccgtacccgcgcctccgcccctccccccggcgatcctcgaactaatgcccgcgtgcccgggtcttgccaccgcggccgcgggcctcgtcgccgaagcggatcctgaccaggcctcgaggctgttcggcgtctctatcggcatgaagcggatgcgcgacgacgacgacaccggcgaggaacaggcggaccacggcgccgcagcggatgtgaagacggaggcgtcggatccgcagcatcgcatggagccgtcgccggagtcgccggaccagcatccgtggcccatataccggcctacgcccgtgtaccattcgatgcggccctgcaacgggccggaccagggcgccgggtccgaccaagacgggtccaactccaggtgattgggcccaccgcaccttgtagaagcttctagttctaattaatcaattgccatatcggcaactaattattatcctagagaaacataataatactatattttcttctgtttttcctttgctagttggggattggaagcttctctcccttgttgtaatctgtgcttataaatcagcggttaaaatccatgaacgggcggctctggtgtattttattttatatatatgtgcttgttgttagataaac

SEQ ID NO: 141404 - DNA, 927 bp, Zea Mays
caccaccacccaaaaacaaactgtttttgcgtcgccgatcgagtccgccgcagagtaatgtcgcacaaggtggcgacaatgccgatgacgaccatcgaggtgacggtcctgtccggggaggacgtgcgacgagtgccctcgggccggcccctgtgccgcggcgcctacgccgtggtccacaccgcgtcgtcctccgcgcccacccgcgtcgaccaggaccccgactgccacggctacccgcactggggcgatgcggtgcgcgtggcgctcccggcgggcgcgcgctggctggacgtcgaggtctgccgcgcgcgcgccgggggccagtcggagcccgtggccgcggcgcgcgtccccgtcgaggacttcaccgtcgggcccccaggccacctgcattgcctcagctaccggctgttccactccgccggcggcatgcagcgccggaacggcattgtcaacatcaccgtcaagaggctcgatggtggcgcgccgccggtggaagggaaggcgatgttcaggtcggccgcgaaggccgtggacgccgccggcgcgagcgggagtggctcatgctgcgccgccgccgtggagcaggggaagcccgcggcgcctgctggcgccgtgatgggttaccccgttgggtgctaggcgattcggcatgctagttaggatccacgttcttatatgacctgagaatatatctgatcagtactcgctagtactcagggtcgtttggattttgttcatgcatggagtgcttcaaaaagtctaataaagaaataacagattaacagcccttgtcaaataatctgctgcatttagcattgtttattttctgctgttcttcatgctttgttagttcttctcactcgaatctcaagttgtctcaaggaaatcgcccttgggcattgttctgtatgaaaaaaaaaa

SEQ ID NO: 141405 - DNA, 565 bp, Zea Mays
agagagctgttggagacctattttctttttcttctgtatcagagcaactctagtagttctctaaaatagagcttgctaaaatcatgtttagcaagttgttaaatagctactgggagtaaaaaataggttagtctcctatagttgctcatatttagggagtaactcgattttgaatctagctttggtagtcctgcccctatcggatctggtgtaacaccccgtccagtctcggaccggtggtacttactcctggcagctcactaggatcatatattgtcctcatagaccaacacaagtcttttgtgtgcactttgtcctcactcatgcgcacccaaaaaaacttttcggttggtcacccatcccaaattgctacaagccaagcacgtttaacttggagattctttcgagataggcttccaaaaaaagaagatgcaccttgttggtatgagtacactattaattctattaagccttgggccaggatatcactatcccagaggccaggattacacaatccaccctcttagaagacgacgtcctcgttggttaactccaatccaggaac

SEQ ID NO: 141406 - DNA, 889 bp, Zea Mays
gagaaaaccttcgacagtgacccggtccggtgggtgtggctcgcttcctctctgtccgactcctttccttcattttcctcttctgacctccggcagcaccatggagaacgtcgccgcgaatccttccgctgcggccgccgccgcagggaatggcgtccaagcatcgggggccggaggggagcgcccggaggacgcgtcgaagcagaacctggcgcaggtgacgagctcgatccagaagacgctgggcctgctccaccagctcaacctcaccgtctcctccttcaactctgcctcccagcttcccctcctccagcgcctgaacgcgctcgtggcggagctcgacacgatgcagaaactagccgagggttgtaacatccaggtgccaatggaggtcgtcaatttgatcgacgatgggaagaaccccgacgagtttactagggatgtgctcaacagctgcattgccaagaaccagatcaccaagggcaagactgacgctttcaagagcctacggaagcatctccttgaggagcttgaacaagctttccctgaggacgtagaagcatacagggagatccgtgctacttctgctgctgaggcaaagcggttggctcagtcccatggcaatttgcttaatggagatgtcaaagtgaaagctgagcattgactgaagggtacgactacagagggcaagtttactatctctgtttagtttggggatggctttgttaacgtgaaacgtgcatatctttctagcgcactttcccttcatgtgattgatccgtgaatctgtacatattaatatattatcataacatgtgtggcaattttaattcaacttaaccaataacttctagaaaaaaaaacctagccaatgactgagattaatttc

SEQ ID NO: 141407 - DNA, 926 bp, Zea Mays
gagaaaaccttcgacagtgacccggtccggtgggtgtggctcgcttcctctctgtccgactcctttccttcattttcctcttctgacctccggcagcaccatggagaacgtcgccgcgaatccttccgctgcggccgccgccgcagggaatggcgtccaagcatcgggggccggaggggagcgcccggaggacgcgtcgaagcagaacctggcgcaggtgacgagctcgatccagaagacgctgggcctgctccaccagctcaacctcaccgtctcctccttcaactctgcctcccagcttcccctcctccagcgcctgaacgcgctcgtggcggagctcgacacgatgcagaaactagccgagggttgtaacatccaggtgccaatggaggtcgtcaatttgatcgacgatgggaagaaccccgacgagtttactagggatgtgctcaacagctgcattgccaagaaccagatcaccaagggcaagactgacgctttcaagagcctacggaagcatctccttgaggagcttgaacaagctttccctgaggacgtagaagcatacagggagatccgtgctacttctgctgctgaggcaaagcggttggctcagtcccatggcaatttgcttaatggagatgtcaaagtgaaagctgagcattgactgaagggttgcgcggtatcttcagttgataacttatctttattattcttccctgtcacaaaaaaaagagaggctggatgatatgatggtaaggtcgcatcgaatggcttaagaaacttgtagggggaaatggatatgccttgtgagtgtgagactgatcaaacccttgcaaaagttctgtgatagtcactgcttggctgattgaagtaagtttgatgttgatatctgctgggaatatatataatcaatataaaaacttatc

SEQ ID NO: 141408 - DNA, 116 bp, Zea Mays
tctaagatgaacataagaagcaacaggactgacattgtcaagtactatataccacatgctttggttccaaaaggcgacaaaacttcaaaggcgaaatcttaactttacgatggccc

SEQ ID NO: 141409 - DNA, 1469 bp, Zea Mays
caaacaattcgcacacatcaaacaacctcttgttctccaatcgcaaacgcgatcctaccaatgcgtataaccgaaacattttacgcacgtccacacatacatgcaccacatcgaccaatttatacgaattgacaaccaccaatctctaactcgaaatcataagcatgaccatattacgacctaccgccaaaacatttcaaccacatctatataatttattaatcaagtcaatcgagagcgacatgcatcggctcaccataaacaaactcaaacggcgttttcaagatcgacggtgattccgatttgtgcatcgctccgaacatctgacgagcatcgagcggcttgccttcttctccactcaaaacacggggtgcctctcttccacaaaacaaaaataaaacagcacacatacacaattaatcatatgaaaataacgccgatgtggaatcaaacaaggagcgtcgttgtctcatcgggggtgaaagacgtcgcggatggggctgcgcaaaaacagcaaacacccggcgagcgtcgacggcgtgctgttcactgcgcagcacaaagcagcgacgaagccaggggagtgacagggctgcagtttttggaccggcattgctgcgcagagacttggacgccatggctgcagtccgagcaggggatccttgctgccgcaccagggaaaaggaggaaggggcgagcagcagcaggggagggaagccggctgggaggaagatgaacagcgaggcgctggaaaaaatttctgggcgccatccatagaagctgctgctgcctgcgctgaaccggatcgaaggggagctcgacgtgtgctgcgggagatggccggctagagcagagggaacagggagctcggccatggagaggctgctggaatttctgggcgcctgcccttccctgcgcgatggcgaggccgagttgggagagggaagccgctgctccatgctattggggaagaagggcgtcgctgtcctctgttggccgtcgagcaaggagcagggagctcgcgccaagaggagaacagggagggcgctcggctgcttgccatggacagcagagagagggaggaagagatgggcgccatgggagcagcttcaacgcgccgaggaagaggggcgtcctgctgcagggataccgagcgcagggatcagagggccggccaggggagagaggccagcatcctgggaggagcttcggcggctctgaaaatggagctcacgccatggagaggaggaggaagaaggggactcggctggagcaggcctgcacgagggagaaggagcagggagagcgctcgaccgtggagggaagctcggctgcttgagctacggcggcgccatgggaggtgctgctgccgtgtgccatgggagaaggagctaagctccctgctgccgccaccgtgaggaagaaagagaaggaaaaagaaagtggcggctagggggtagatgaataat

SEQ ID NO: 141410 - DNA, 831 bp, Zea Mays
atggagcaaaagaagttgcgtgccatgggagatagcagggagggagccgagcagggagctgcagcgcggcgtgctagggaagacgagctgggggcgcggccatggcaagggagctcggctgggagagctggaatagggcccagggcgcggcgagcaggaggccaagcgccggccatgggaggtagcatgagagagctctactgggcgccaggaagaagatcgagcaggaaccagggctgggagaagctggagagcggcaagcaggctgagcgcgcgctggaagctcggaccaagacgcaaggagccgtccatggagctcggggagctgcacgcagaggcgaacatggcacggcgaggaacgacggaatgcgcgcgatgcagaggaacagggacgacgaccaggagcttgtacaggagagcacccacggtggagcgtccggcgagtgttgcaagtaccagaggaaggtggagcaaaagaagctgcgcgccatgggagatagcagggagggagctgagcagggagctgcagcgcggcgtgctggggaagacgagctgggggcgcggccatggcaagggagctcgactgggcgagctggaatagggcccagggcgcggcgagcaggaggccaagcgccggccatgggagggagcaggagagagctctgctgggcgccaggaagaagatcgagcaggaaccagggctgggagaagctgggcgagctcggcagagcgcgagcgagccgaggaacgtgcacccagggaagtgaccagggcgctggggaagcttggctggctggggataaacaccagagaggagcggcagagagataa

SEQ ID NO: 141411 - DNA, 872 bp, Zea Mays
gccgtgtcgtcgcccttcgctagtcgcttcgctgccacatctctcctcgtccaaagactccaagctcctgtgcggcctgtgttctgctgccgcctctggtccacatctccccgccgccgccccgtcgtctgccgacacctttagcgctgggaaggatcacaggggatcggcgcgaggcgggggacctgcggtttttgtcgcccggatggcggcggagcgatgacactggcgtcgggagcggcgcggcgttgggatgcggacgatctgcgatgtgtgcgagagcgcaccggcggtgctcttctgtgcggccgacgaggcagcgctttgccggccctgcgacgagaaggtacacatgtgtaacaagcttgctagtcggcatgtgagagttggacttgcagaccctaataaacttgtccggtgtgatatatgtgaaaattcacccgctttcttctactgtgagatagacggcacctcactttgcctgagctgtgatatgactgttcatgttggtggcaagcgaacccatggaagatacctgctcctaaggcaaagggttgaatttccaggagataaaccgggccatatggatgacgtgcctatggaaatccaagatcctgaaaaccagagagaccagaaaaagccacccaaggagcaaacggcaaaccaccataacggcgatgatccggccactgatggcaactgtgatgaccagggtaacattgattcaaaaatgatcgatcttaatatgcgcccggttcgtactcatgggcaagaatcaaattcccaggtctgtcatgctcactgcgattgatgtctaccgtacttctcattacagtttcgatcttgtaacaagtgttctttctgatggtaaa

SEQ ID NO: 141412 - DNA, 1030 bp, Zea Mays
gccgtgtcgtcgcccttcgctagtcgcttcgctgccacatctctcctcgtccaaagactccaagctcctgtgcggcctgtgttctgctgccgcctctggtccacatctccccgccgccgccccgtcgtctgccgacacctttagcgctgggaaggatcacaggggatcggcgcgaggcgggggacctgcggtttttgtcgcccggatggcggcggagcgatgacactggcgtcgggagcggcgcggcgttgggatgcggacgatctgcgatgtgtgcgagagcgcaccggcggtgctcttctgtgcggccgacgaggcagcgctttgccggccctgcgacgagaaggtacacatgtgtaacaagcttgctagtcggcatgtgagagttggacttgcagaccctaataaacttgtccggtgtgatatatgtgaaaattcacccgctttcttctactgtgagatagacggcacctcactttgcctgagctgtgatatgactgttcatgttggtggcaagcgaacccatggaagatacctgctcctaaggcaaagggttgaatttccaggagataaaccgggccatatggatgacgtgcctatggaaatccaagatcctgaaaaccagagagaccagaaaaagccacccaaggagcaaacggcaaaccaccataacggcgatgatccggccactgatggcaactgtgatgaccagggtaacattgattcaaaaatgatcgatcttaatatgcgcccggttcgtactcatgggcaagaatcaaattcccagactcagggggtaggtcttagtgtgaacaaccatgactctccaggggtggtgccaacaagcaattccgaaagagacaccagcaagtaaacgttggaagatcggaatatacatttcaactacatatactgttctatacgagttcattttgtggtgtgtgtgtgtgtcactaatttttactcaattctaaattataagtcattctaacttttttgaagaggtaaagtatctcaggtttgactaaaa

SEQ ID NO: 141413 - DNA, 976 bp, Zea Mays
agtttcagttccaccctcacgcttcattcacgattagctgagctccacctcaaagtcctcggcttgtctccgtccttcagccgacctccatcggtcgtccacacaggccgcgatcgcatcatggcgggctacggcgacgacggcgtggacctcacggagctgacgctgggaccacccggcgtcaatgcgcgcaaggcgagacgagcgaggaagaacggccagcagccgtcgtcgtccgccatgacgatgcaagcgttcgtgaaggtgagcatggacgggacgccgtacctgaggaaggtggacgtggcggcgtacgacgactacggcgagctcgtggaggcgctcaacgagttgttctgctgctgctccatcgggctgatggacggctacggcgagtgggagcacgccgtggtgtacgaggacggcgacggcgactggatgctcgtcggcgacgtgccgtgggagatgttcgtgtcctcgtgcaagcggatgcgggtgatgcgatcgtgcgaggcgagagggctgagctccaacgcctgacaggcatgcatgccggcgccgcactgggaacagaatgacggagatttgaacgtacgtgcagcagaggcgtcatccggacaagacttgcactgctgcacatatatagctcaagtggcgagagggaagctggcgaatgtgacgacgacgcaattctggacacgattccagcacacgattccaacaacaacgtacgatctcctcacgtactacatgagctgcgcctgcgctgcggggatgcagttgacttccctaacatccaaacatttcagttccatctcatccctgcgggattttgattttggccacgcgcacctaccactaccatcacccagctcatgtcacattattgctctttttctgttgtagtatatgtcacatgtacatgaatcaagatcgagtcgttgcacctcccggccgggttttgattttgacacaa

SEQ ID NO: 141414 - DNA, 1653 bp, Zea Mays
atgggagaaatggcgcatgcttgctctgcccctcgcccgtctcccgctcaccatttgtgtgtgcgcatcctactagcgtacctgcttgcggcgcggtggctcgtgccatcctgctcggcggcttctttcttccgcttcccttggcccgccgagcggcacgactaccgtgacgcgctggccaagtccatcctcttcttcgagggccagaggtcggggcggctgccgcctggccagcgcgcgtcgtggcgcggggactccggcgtgtcggacggcgccgcggccggggtcgacctggagggcgggtactacgacgccggcgacaacgtcaagttcggcttccccatggcgttcaccaccaccatgctggcctggagcgtcatcgagttcggcgactccatgccgcgcgacgagcgccgccacgccgccgccgccgtccgctgggccaccgactacctcctcaagacgctcgcccaccccggcgtcatcttcctgcaggcaagcgcgcggcattgctgcgcacgcactgccacgttcgttcatgtcgcactcgcagcagagcagggggtgggcgatccgtggaaggatcacgactgctgggagaggccggaggacatggacacggaccgcacggtgtacaacgtcagcgcggggcgcccgggctcggacatcgcgggggagacggcggcggcactggcggccgcgtccatggtgttccgagatgacgacccggagtacgccgagacgctgctcacgagcgcaaggaaggcgttcgagttcgcggacacgtacaagggcgcgtacagcgacgacccggacctcagggcagggggctgccccttctactgcgacttcaatggctaccaggacgagctgctgtggggggcagcatggctgaggagagcctccaaggatgacacgttcctccagtacattcagaacaacggcaagaccctgggtgcagaggacagcagcaacgagttcgggtgggacaacaagcatgccggcctcaacgtcctcgtctccaaggagttcatagaaggcgccgcgctgcctttgcagtcgtacaaggagttcgcggacagcttcgtatgcacgctcatcccggagtcgtcttcttccccgcacatcacgtacacccccgggggcatgatctacaagcctggaggcagcaacatgcagcacgtcacctccatctctttcctgctcctgacctacgccaagtacctctccaagtcctctcataccgtcgactgcggagacgtttcagttggccctgaaactcttcagctgcaagccaaaagacaggtcgattacctgctaggagacaacccgatgaagatgtcgtacatgatcgggtacggcgaccggtacccgcagcggatccaccaccgggcctcgtcgttgccctcgatcagggaccatcctcagccgatggcgtgcaaggaaggcacgccgtacttcaactcatccggtgcgaatcctaacccgctggtcggcgcggtggtcggcgggccgggggaggacgacgcttacgaggatgaccgtgcggatttcagaaaatctgagcccaccacctacatcaacgctcccttggtaggggtccttgcgtacttcgttggcaacccgaatcctggtcataacaccagacattga

SEQ ID NO: 141415 - DNA, 987 bp, Zea Mays
atcagtagtagtcatcactgagtagactgcagagcaggaggagatgttcacttacgtgctcgcggccgccgccgtgcttatcgtgttcctctacgccgtcgaagcagcaacagcaagctccctccgtcgcccccgtcgctgccgctgatcggccacctccaacgcggtggtcactcgcgcggccaccaggggccgccggggcaacagcaggatgtgctgccggacgcggcgctgatggtgggcttccaaccgcaggatgtgctgccggacgcgccagcgaggtttgtgagatgggcgacgggccttgataagaagctcgccgacatggccgaggcgtgggacaggttgctgtccgagatggtggccgcgcacaaggaggggaccgggcggccggccacgcaggggaggaggatgaggacttcttggacgtgctgctgcggcttagggaagatggcgcggatgggctcgagctcacagacgaccgcatcaaaggcatcctcgaggacatgataggcggtgggactgaaacaaccatccaaacgctggaatgggccatggctgcatggcagagctcatagccaacccgtgggtgatggccaagctcaaggacgagatcgcgcgagtggtcgccgccgatcagcctaccatctcggagtcggatctcggcagaatggaatacctaaaagcagagcaagatgttcaaaaaaattatgaacttctgttacctctttagatgcggctacaagagctagctataattgatgagcaaagcagtgaacacaatatgcataagggcactcttctgcaaactttgcctgaagtccatttcactctccacgcatattactagcaccatcatatccttgtctacgaatattttgaacatctaatttatgatgtgacaaaacaaagtccaactcctttttaagagtggtagatgatgtatcatgaacatgaataagatcaagaaagcgctctcgaataaaa

SEQ ID NO: 141416 - DNA, 874 bp, Zea Mays
aggagaggagggacgagggaggggaaaagagagatggtggaggcatcgccggagtccggcgccgcggcgaccggaggtgcctctagtacggcggcggtgcggaaggggaagtcatgcaagggctgcctctactactcgtcagtgctcaagtcccgcggttacaacccaatctgcgttgggatcccccgctccatcccccaagttcctaactacgtggtggatgaacctaaggaggaggcgacggcgcaggggcatgacctcaggcggttcaggtacgggtgcgcgggttactccatgttcgtggacaacagggacggccagggtggtgagagcgagggcaagacgttgttgccatattgcaggggcctcgagttattggtggacagcagattggtcgagagaaagccatcggcaactgaacaagctccagcacatgttgcaaaggatgcagctaccatccgctctcaccaacaaggacaacagagacctcagaacttgtcgaggcaggaattcttggacaggtttaagaggagcgctggactggtcgcttcaggtgttgcgaagaatctaaacaaaacagccaattatatcaaagaaaatattcaggacatgtacaccgatcgtcgtccaccaaagtagcaaccatgccgagtgattgtcgtcaagagctgaagaaatcgcttgctactggaaactttacatcaggactacctggaaactttactccactctcctcacttgttaaacgaaatggagcttttctgggataccaacttccttttctttacctgcataatcttgtaattttgcggctgtatatgtacatgcaaacaacttctttgaagcgaaaaatcagatctcgtttggtgtattg

SEQ ID NO: 141417 - DNA, 877 bp, Zea Mays
aggagaggagggacgagggaggggaaaagagagatggtggaggcatcgccggagtccggcgccgcggcgaccggaggtgcctctagtacggcggcggtgcggaaggggaagtcatgcaagggctgcctctactactcgtcagtgctcaagtcccgcggttacaacccaatctgcgttgggatcccccgctccatcccccaagttcctaactacgtggtggatgaacctaaggaggaggcgacggcgcaggggcatgacctcaggcggttcaggtacgggtgcgcgggttactccatgttcgtggacaacagggacggccagggtggtgagagcgagggcaagacgttgttgccatattgcaggggcctcgagttattggtggacagcagattggtcgagagaaagccatcggcaactgaacaagctccagcacatgttgcaaaggatgcagcagctaccatccgctctcaccaacaaggacaacagagacctcagaacttgtcgaggcaggaattcttggacaggtttaagaggagcgctggactggtcgcttcaggtgttgcgaagaatctaaacaaaacagccaattatatcaaagaaaatattcaggacatgtacaccgatcgtcgtccaccaaagtagcaaccatgccgagtgattgtcgtcaagagctgaagaaatcgcttgctactggaaactttacatcaggactacctggaaactttactccactctcctcacttgttaaacgaaatggagcttttctgggataccaacttccttttctttacctgcataatcttgtaattttgcggctgtatatgtacatgcaaacaacttctttgaagcgaaaaatcagatctcgtttggtgtattg

SEQ ID NO: 141418 - DNA, 3729 bp, Zea Mays
caacttcaaaaggctttttcagctgccatcgtaatagatataataaataaaattcgataaactatagatacattaggaggtatagatggttctgacaaatttgactttaaaactaactcttaactcagtatcatattaactataaaatttattgcaggggtaggggatttgggcggccgtgtggcggagccgaggagcacgtcgctgcgtcaggactcaggacgggagaataaagagtaaacaaacccatccgcgctgcaacagtgcggtgtttgtgaatgcaaaatctagccagacagctgaggaagggtgaaagcctccttgttcctgtagactgcagtgcgaggaggaggccgccgcatcctccccttccaaaccactccactccggtccccatcccacctgcgccagcttcgtcttgctttgagctttcgcccgccggcgatctgctagctatctcgctcgcacgtggtgcctgactgcctggtggcggtggccatggctgccccgctgggctttttctgcatgctgctgcttcttcttcttcagctgggccactcttcttgtaacaatgtgtacattgtgtacatgggggcgaggaatcccgagctgcacccggcgctggtccgggacgcgcaccacggcatgctcgccggccttctcggcagcgagcaggcggccaaggacgccatcctttacagctacaggcacggcttctccgggttcgccgccgtgctgacggacagccaggcggcgcggctcgccggttcgcctggggttgtgcgagtggtgcggaaccgtgttcttgacctgcacaccaccaggagctgggacttcatgcgagtggatccatcgcattcggctggaatcctcccagagagtaggttcggtgaggattccattatcggtgtgctagacactggaatctggccagagtcggccagttttagagacgacggcatgagcgaggctccgcggcggtggaaagggcaatgcgtcgccggggacaggttcaatgtttccaactgcaacaggataggaaaataataggcgcgaagtggtacatcaaagggtacgaagccgagtacgggaagatgaacaccaccgacatctacgagttcatgtccgcgagagacgccgtcgggcatggcacgcacacagcctccaccgccgctggtgctctggtagccggtgcaagcttcaggggactcgccggtggcgtcgcaaggggaggggcacccagggcgaggctcgcggtctacaaagtgtgctgggccaccggagactgcacttcggcagatatcctcgctgccttcgacgacgcgatacatgatggcgttgacgtgctttcggtgtccctaggccaagcgccaccgctccccgcgtacgttgacgacgtcctgtccattgggtcctttcatgctgtcgcgagagggattgtcgtggtctgctccgcaggaaattctgggccttattcagagacggtgatcaactcggcgccgtggctcgtgaccgtcgctgctggcaccattgataggactttcctcgcaaagatcatccttggcaacaatagcacctatgtgggtcaaacactgtactctggaaagcatcctgggaatagcatgcgcatattctatgctgaagacgttgcatctaataacgcagacgatacagatgcaagaagctgcactgcaggatctctgaactcgactctagtgaagggaactgtggtactttgcttccaaacaagggcacagagatcagctgcagtggcagtggagactgtcaagaaagctcgtggcgtcggagtcatcttcgcccagttcttaactaaggacatcgcgtcttcattcgatattccctgttttcaagtagactaccaggttggaacagctatactcgcatacaccactagcacgagaaatccaacagtccagtttggctcagcaaaaacgattcttggagaactgatgggcccagaagttgcatatttctcatctcggggtccaagttctctgtcccccgctgttctgaagccagacattgctgctccaggtgtcaacattttggcagcatggactcctgctgctgccatatcatcagccattggatctgtgaagttcaagatcgattcgggaacctcgatgtcctgtccccacatctcaggagttgttgctctcctcaaatcaatgcatcccaattggagtcctgctgcagtaaaatcagcacttgttacaacagtgtccatgacacatatgggtttgagattgtatccgaggcggcgccctacaatcaggcgaacccatttgattacggaggcgggcatgtggatccaaacagcgctgcacaccccggtcttgtgtatgacatggggacatctgactatgtgcgcttcctttgctccatgggctacaacgtctcagccatcagctccctggctcaacagcatgagacctgtcagcacacaccaaagacgcagctgaacctgaacctgccatccatcagtattcccgaactgaggggcaggctcactgtgtcaagaacggtcaccaacgttggctcagccttgacgaagtacagagctcgtgtggaagctcctccaggagtggatgtcaccgtgagcccctcactcctgaccttcaactcgacggtgagaaagttgacgttcaaggtgacattccaggccaaactgaaggtgcaagggagatactacttcggcagcttgacatgggaagatggcgtgcacgccgtgaggatccctcttgtggttcggacgatgatcagtaagttctatgccaattcatgagctggtgggtgtttgtgtgtactgtgtactaactttcgctcaccaccggtgacggtgggacagataagatgtaacctgctaatttgtcccaattctaatggcattggtgattggttggggttccttgactagaattcggttactgattattaagagaaattgaatctttcttttgtttgtaataactcataacttcctcctgttacacaacaaggaggctgaattgacaaagcatcttaatctagcatataacacagcaggaaaacaagagaactgtaatgtctcgagtgctaagaattggtaccggcgtatgtgaatctggtgagacgccagcaatctaattcagttcagagcagaagaggtcattacacatgagaggcgcacttcaggatttggcaccttctttgggcttggtatcagcagagtcgtccttgccgccggagcctgaggaggccgcgcgcgcggcgagggccttgtcgtacgcgtcgagctcgtcgaaatatatgtcccagacgcagcgaacgcagccgctgccgcagcagtcgcccgggagaggcttctcgggcggcagcggcgttggcgcgggcgtgggagccggcgcggcgtcgggcttcccggtgccgccatcgcaaggggtggccgaggccatgggcgtttcgggcgggaggtagtggcggcggcggaggagaggggcgcgtcggcccgggcaggaaaggtaggatcgggcccgggacacggacgacggcgcccagcatacagcccctcgctcgtcgaaaggggaggggaggggacggtcgcggaggccaagaggctgcgtgattgggacgcaggagaatccaactgccacaaggcaactcggacgaaccaattggcaaacgacacatcgtgctcggttgattggttggttatgtagtcatgttgag

SEQ ID NO: 141419 - DNA, 3392 bp, Zea Mays
gtgtttgtgaatgcaaaatctagccagacagctgaggaagggtgaaagcctccttgttcctgtagactgcagtgcgaggaggaggccgccgcatcctccccttccaaaccactccactccggtccccatcccacctgcgccagcttcgtcttgctttgagctttcgcccgccggcgatctgctagctatctcgctcgcacgtggtgcctgactgcctggtggcggtggccatggctgccccgctgggctttttctgcatgctgctgcttcttcttcttcagctgggccactcttcttgtaacaatgtgtacattgtgtacatgggggcgaggaatcccgagctgcacccggcgctggtccgggacgcgcaccacggcatgctcgccggccttctcggcagcgagcaggcggccaaggacgccatcctttacagctacaggcacggcttctccgggttcgccgccgtgctgacggacagccaggcggcgcggctcgccggttcgcctggggttgtgcgagtggtgcggaaccgtgttcttgacctgcacaccaccaggagctgggacttcatgcgagtggatccatcgcattcggctggaatcctcccagagagtaggttcggtgaggattccattatcggtgtgctagacactggaatctggccagagtcggccagttttagagacgacggcatgagcgaggctccgcggcggtggaaagggcaatgcgtcgccggggacaggttcaatgtttccaactgcaacaggaaaataataggcgcgaagtggtacatcaaagggtacgaagccgagtacgggaagatgaacaccaccgacatctacgagttcatgtccgcgagagacgccgtcgggcatggcacgcacacagcctccaccgccgctggtgctctggtagccggtgcaagcttcaggggactcgccggtggcgtcgcaaggggaggggcacccagggcgaggctcgcggtctacaaagtgtgctgggccaccggagactgcacttcggcagatatcctcgctgccttcgacgacgcgatacatgatggcgttgacgtgctttcggtgtccctaggccaagcgccaccgctccccgcgtacgttgacgacgtcctgtccattgggtcctttcatgctgtcgcgagagggattgtcgtggtctgctccgcaggaaattctgggccttattcagagacggtgatcaactcggcgccgtggctcgtgaccgtcgctgctggcaccattgataggactttcctcgcaaagatcatccttggcaacaatagcacctatgtgggtcaaacactgtactctggaaagcatcctgggaatagcatgcgcatattctatgctgaagacgttgcatctaataacgcagacgatacagatgcaagaagctgcactgcaggatctctgaactcgactctagtgaagggaactgtggtactttgcttccaaacaagggcacagagatcagctgcagtggcagtggagactgtcaagaaagctcgtggcgtcggagtcatcttcgcccagttcttaactaaggacatcgcgtcttcattcgatattccctgttttcaagtagactaccaggttggaacagctatactcgcatacaccactagcacgaggtatgcaaacagtgccgcacatgttccaacagtcgtaacaatctagcaatatgctgtagctgtcagcaactttccaataatttctgttttccatacacagaaatccaacagtccagtttggctcagcaaaaacgattcttggagaactgatgggcccagaagttgcatatttctcatctcggggtccaagttctctgtcccccgctgttctgaagccagacattgctgctccaggtgtcaacattttggcagcatggactcctgctgctgccatatcatcagccattggatctgtgaagttcaagatcgattcgggaacctcgatgtcctgtccccacatctcaggagttgttgctctcctcaaatcaatgcatcccaattggagtcctgctgcagtaaaatcagcacttgttacaacagccagtgtccatgacacatatgggtttgagattgtatccgaggcggcgccctacaatcaggcgaacccatttgattacggaggcgggcatgtggatccaaacagcgctgcacaccccggtcttgtgtatgacatggggacatctgactatgtgcgcttcctttgctccatgggctacaacgtctcagccatcagctccctggctcaacagcatgagacctgtcagcacacaccaaagacgcagctgaacctgaacctgccatccatcagtattcccgaactgaggggcaggctcactgtgtcaagaacggtcaccaacgttggctcagccttgacgaagtacagagctcgtgtggaagctcctccaggagtggatgtcaccgtgagcccctcactcctgaccttcaactcgacggtgagaaagttgacgttcaaggtgacattccaggccaaactgaaggtgcaagggagatactacttcggcagcttgacatgggaagatggcgtgcacgccgtgaggatccctcttgtggttcggacgatgatcagtaagttctatgccaattcatgagctggtgggtgtttgtgtgtactgtgtactaactttcgctcaccaccggtgacggtgggacagataagatgtaacctgctaatttgtcccaattctaatggcattggtgattggttggggttccttgactagaattcggttactgattattaagagaaattgaatctttcttttgtttgtaataactcataacttcctcctgttacacaacaaggaggctgaattgacaaagcatcttaatctagcatataacacagcaggaaaacaagagaactgtaatgtctcgagtgctaagaattggtaccggcgtatgtgaatctggtgagacgccagcaatctaattcagttcagagcagaagaggtcattacacatgagaggcgcacttcaggatttggcaccttctttgggcttggtatcagcagagtcgtccttgccgccggagcctgaggaggccgcgcgcgcggcgagggccttgtcgtacgcgtcgagctcgtcgaaatatatgtcccagacgcagcgaacgcagccgctgccgcagcagtcgcccgggagaggcttctcgggcggcagcggcgttggcgcgggcgtgggagccggcgcggcgtcgggcttcccggtgccgccatcgcaaggggtggccgaggccatgggcgtttcgggcgggaggtagtggcggcggcggaggagaggggcgcgtcggcccgggcaggaaaggtaggatcgggcccgggacacggacgacggcgcccagcat

SEQ ID NO: 141420 - DNA, 3371 bp, Zea Mays
gtgtttgtgaatgcaaaatctagccagacagctgaggaagggtgaaagcctccttgttcctgtagactgcagtgcgaggaggaggccgccgcatcctccccttccaaaccactccactccggtccccatcccacctgcgccagcttcgtcttgctttgagctttcgcccgccggcgatctgctagctatctcgctcgcacgtggtgcctgactgcctggtggcggtggccatggctgccccgctgggctttttctgcatgctgctgcttcttcttcttcagctgggccactcttcttgtaacaatgtgtacattgtgtacatgggggcgaggaatcccgagctgcacccggcgctggtccgggacgcgcaccacggcatgctcgccggccttctcggcagcgagcaggcggccaaggacgccatcctttacagctacaggcacggcttctccgggttcgccgccgtgctgacggacagccaggcggcgcggctcgccggttcgcctggggttgtgcgagtggtgcggaaccgtgttcttgacctgcacaccaccaggagctgggacttcatgcgagtggatccatcgcattcggctggaatcctcccagagagtaggttcggtgaggattccattatcggtgtgctagacactggaatctggccagagtcggccagttttagagacgacggcatgagcgaggctccgcggcggtggaaagggcaatgcgtcgccggggacaggttcaatgtttccaactgcaacaggaaaataataggcgcgaagtggtacatcaaagggtacgaagccgagtacgggaagatgaacaccaccgacatctacgagttcatgtccgcgagagacgccgtcgggcatggcacgcacacagcctccaccgccgctggtgctctggtagccggtgcaagcttcaggggactcgccggtggcgtcgcaaggggaggggcacccagggcgaggctcgcggtctacaaagtgtgctgggccaccggagactgcacttcggcagatatcctcgctgccttcgacgacgcgatacatgatggcgttgacgtgctttcggtgtccctaggccaagcgccaccgctccccgcgtacgttgacgacgtcctgtccattgggtcctttcatgctgtcgcgagagggattgtcgtggtctgctccgcaggaaattctgggccttattcagagacggtgatcaactcggcgccgtggctcgtgaccgtcgctgctggcaccattgataggactttcctcgcaaagatcatccttggcaacaatagcacctatgtgggtcaaacactgtactctggaaagcatcctgggaatagcatgcgcatattctatgctgaagacgttgcatctaataacgcagacgatacagatgcaagaagctgcactgcaggatctctgaactcgactctagtgaagggaactgtggtactttgcttccaaacaagggcacagagatcagctgcagtggcagtggagactgtcaagaaagctcgtggcgtcggagtcatcttcgcccagttcttaactaaggacatcgcgtcttcattcgatattccctgttttcaagtagactaccaggttggaacagctatactcgcatacaccactagcacgagaaatccaacagtccagtttggctcagcaaaaacgattcttggagaactgatgggcccagaagttgcatatttctcatctcggggtccaagttctctgtcccccgctgttctgaagccagacattgctgctccaggtgtcaacattttggcagcatggactcctgctgctgccatatcatcagccattggatctgtgaagttcaagatcgattcgggaacctcgatgtcctgtccccacatctcaggagttgttgctctcctcaaatcaatgcatcccaattggagtcctgctgcagtaaaatcagcacttgttacaacaggtaatgcgccatccgcttctctaagcgatgcaaagatgttttgagcctaacaagtcaacacatctgcagccagtgtccatgacacatatgggtttgagattgtatccgaggcggcgccctacaatcaggcgaacccatttgattacggaggcgggcatgtggatccaaacagcgctgcacaccccggtcttgtgtatgacatggggacatctgactatgtgcgcttcctttgctccatgggctacaacgtctcagccatcagctccctggctcaacagcatgagacctgtcagcacacaccaaagacgcagctgaacctgaacctgccatccatcagtattcccgaactgaggggcaggctcactgtgtcaagaacggtcaccaacgttggctcagccttgacgaagtacagagctcgtgtggaagctcctccaggagtggatgtcaccgtgagcccctcactcctgaccttcaactcgacggtgagaaagttgacgttcaaggtgacattccaggccaaactgaaggtgcaagggagatactacttcggcagcttgacatgggaagatggcgtgcacgccgtgaggatccctcttgtggttcggacgatgatcagtaagttctatgccaattcatgagctggtgggtgtttgtgtgtactgtgtactaactttcgctcaccaccggtgacggtgggacagataagatgtaacctgctaatttgtcccaattctaatggcattggtgattggttggggttccttgactagaattcggttactgattattaagagaaattgaatctttcttttgtttgtaataactcataacttcctcctgttacacaacaaggaggctgaattgacaaagcatcttaatctagcatataacacagcaggaaaacaagagaactgtaatgtctcgagtgctaagaattggtaccggcgtatgtgaatctggtgagacgccagcaatctaattcagttcagagcagaagaggtcattacacatgagaggcgcacttcaggatttggcaccttctttgggcttggtatcagcagagtcgtccttgccgccggagcctgaggaggccgcgcgcgcggcgagggccttgtcgtacgcgtcgagctcgtcgaaatatatgtcccagacgcagcgaacgcagccgctgccgcagcagtcgcccgggagaggcttctcgggcggcagcggcgttggcgcgggcgtgggagccggcgcggcgtcgggcttcccggtgccgccatcgcaaggggtggccgaggccatgggcgtttcgggcgggaggtagtggcggcggcggaggagaggggcgcgtcggcccgggcaggaaaggtaggatcgggcccgggacacggacgacggcgcccagcatacagcccctc

SEQ ID NO: 141421 - DNA, 2613 bp, Zea Mays
cctccttgttcctgtagactgcagtgcgaggaggaggccgccgcatcctccccttccaaaccactccactccggtccccatcccacctgcgccagcttcgtcttgctttgagctttcgcccgccggcgatctgctagctatctcgctcgcacgtggtgcctgactgcctggtggcggtggccatggctgccccgctgggctttttctgcatgctgctgcttcttcttcttcagctgggccactcttcttgtaacaatgtgtacattgtgtacatgggggcgaggaatcccgagctgcacccggcgctggtccgggacgcgcaccacggcatgctcgccggccttctcggcagcgagcaggcggccaaggacgccatcctttacagctacaggcacggcttctccgggttcgccgccgtgctgacggacagccaggcggcgcggctcgccggttcgcctggggttgtgcgagtggtgcggaaccgtgttcttgacctgcacaccaccaggagctgggacttcatgcgagtggatccatcgcattcggctggaatcctcccagagagtaggttcggtgaggattccattatcggtgtgctagacactggaatctggccagagtcggccagttttagagacgacggcatgagcgaggctccgcggcggtggaaagggcaatgcgtcgccggggacaggttcaatgtttccaactgcaacaggataggaaaataataggcgcgaagtggtacatcaaagggtacgaagccgagtacgggaagatgaacaccaccgacatctacgagttcatgtccgcgagagacgccgtcgggcatggcacgcacacagcctccaccgccgctggtgctctggtagccggtgcaagcttcaggggactcgccggtggcgtcgcaaggggaggggcacccagggcgaggctcgcggtctacaaagtgtgctgggccaccggagactgcacttcggcagatatcctcgctgccttcgacgacgcgatacatgatggcgttgacgtgctttcggtgtccctaggccaagcgccaccgctccccgcgtacgttgacgacgtcctgtccattgggtcctttcatgctgtcgcgagagggattgtcgtggtctgctccgcaggaaattctgggccttattcagagacggtgatcaactcggcgccgtggctcgtgaccgtcgctgctggcaccattgataggactttcctcgcaaagatcatccttggcaacaatagcacctatgtgggtcaaacactgtactctggaaagcatcctgggaatagcatgcgcatattctatgctgaagacgttgcatctaataacgcagacgatacagatgcaagaagctgcactgcaggatctctgaactcgactctagtgaagggaactgtggtactttgcttccaaacaagggcacagagatcagctgcagtggcagtggagactgtcaagaaagctcgtggcgtcggagtcatcttcgcccagttcttaactaaggacatcgcgtcttcattcgatattccctgttttcaagtagactaccaggttggaacagctatactcgcatacaccactagcacgagaaatccaacagtccagtttggctcagcaaaaacgattcttggagaactgatgggcccagaagttgcatatttctcatctcggggtccaagttctctgtcccccgctgttctgaagccagacattgctgctccaggtgtcaacattttggcagcatggactcctgctgctgccatatcatcagccattggatctgtgaagttcaagatcgattcgggaacctcgatgtcctgtccccacatctcaggagttgttgctctcctcaaatcaatgcatcccaattggagtcctgctgcagtaaaatcagcacttgttacaacagtgtccatgacacatatgggtttgagattgtatccgaggcggcgccctacaatcaggcgaacccatttgattacggaggcgggcatgtggatccaaacagcgctgcacaccccggtcttgtgtatgacatggggacatctgactatgtgcgcttcctttgctccatgggctacaacgtctcagccatcagctccctggctcaacagcatgagacctgtcagcacacaccaaagacgcagctgaacctgaacctgccatccatcagtattcccgaactgaggggcaggctcactgtgtcaagaacggtcaccaacgttggctcagccttgacgaagtacagagctcgtgtggaagctcctccaggagtggatgtcaccgtgagcccctcactcctgaccttcaactcgacggtgagaaagttgacgttcaaggtgacattccaggccaaactgaaggtgcaagggagatactacttcggcagcttgacatgggaagatggcgtgcacgccgtgaggatccctcttgtggttcggacgatgatcagtaagttctatgccaattcatgagctggtgggtgtttgtgtgtactgtgtactaactttcgctcaccaccggtgacggtgggacagataagatgtaacctgctaatttgtcccaattctaatggcattggtgattggttggggttc

SEQ ID NO: 141422 - DNA, 280 bp, Zea Mays
tcgtcaggatactgaactacagtactggaaagactaggagaaacattatcataattcatttcaggcagatgttgaaatctacgtataggttcttgtgttagaatgtcggtagtgtaaactaggagaccggaaactgtagataatattgtttgtagaatgaagtttaaaataagggagccttatagaactgatatagaatctgcaatcaaaactaatggtgagaaacttactatattactgaacagacaacatcaaagccataagtcatctttcaggtaaa

SEQ ID NO: 141423 - DNA, 666 bp, Zea Mays
atgcacccattcgacgccgcgtccttcttctcaactacccccgaagggggaagcttcgacgcacggcagcaggaggaggagcttgctggagccgcgtcgtcgtcgccgacgccgtcccgtggcacgcgagctggcgtggaaaacgcgagcatcagatgccaggactgcgggcaccgggccaaggcgtactactgcgcgcactgctgcagcgaccgcggcttcgtctgccccggccacgcgaagaccccttacgtcccagcgtcccagtgcagcaagcgccagcagaggctcgcggccgttgacgtcgagctcatgcccatctccaagcgcccacacaggcccgcgcttccctccgtcgccgcccacaccaccacatcgtccgttgatcagccgatcgtaacgccggcgctgcagaggttcgcgcgggaagtgagcttggacgccgtgttccgccgcgtgcggctaggagggcccgagccggacgtcgcgtactacaccaccatcaccatcgctgggcacgtgttcaggggagtcctgtatgacgtcggcccccacagtggcagtggcagcacggctgcctcggatacggacgggagcggtgaagaagtagggtcgtcgctcaccacggccggcggcagctgcctggatctaacgctgggaatgtga

SEQ ID NO: 141424 - DNA, 1410 bp, Zea Mays
ataggtatagccaaccgtccaacccattgctactccacaccgatgcgatgctcccatcgccgccggcgacctcgccggcgcggctgcacaagctggtgacctcgcagcaggacccgctcctcgcgctggagctcgtcaacgtcacctccccgactaccacgccgcaccctgccacgctccactctctcctgctccgcctcgcccgccgccgcgaccacctaccccacgcgctcgcgctcctccgccgcctcccgtccccgccgtccccgcgcctccttctcccgcttctcctcgcggcgctccgtctccgccggccgcctcagctctttctctccaccttcaactccctcttcgtctcggggccaagccccctgccgctccacccccatctcctcctccgcctcctcggcgttctatcctccaccccatcccacttcccgtccgcgcttcacctccttcgcctcgtctcttcgcggctacctctccccgctccgctcgtcctcgcctcccacaacctgctaatcgacgccgcggcacgatccggccacgtcgccgtgtcactctcgctcttccaccgcctccgctcactccatgtatcccccgacgccgacacctaccgcattcttacccaatcactctgccgcaaggcccaggtccgcaccgcggctacactgctcgacgaaatgctgcacaggggcatccctgccgatccgctggcgtacaccaccgtgctgaacgctctctgccgcaagaagcagctccgagaggcataccgcctgctctgtctcatgcgaggccgtggagtctcccctgacattgtgcattacaacacggtcatcgttggcatgtgccgcgagggccggccactggatgcctgcaaggttgttgttgatatgatggacaatggatgtacaccgaatgcagtgacatatggcacagtggtgaatgggctgtgcgtaagcggattatacgataaggcggaggcctacctggtggacatggttggtaaagggcttgtgccacatttctcggtgtttcattcagttatcaggggttgctgtacagttgggaaagtagaagaggctgcacaaattatgagtcggatgcttgatcttggagtggttccgcatgttgagagctggagttcagtgatcaggtgcgtttgtaaggatgaggattgtattgaggcagaattgttgcagattgtgggaaggcagcgtggttcaaacatgatctctgacagagtaccttaagtgatttcacttgacatatgcaaaacaaactattgagctttaatctctgttggatgtaaaggaacaattctgcaagaagatagcagtagatgtggcaaaaactggacagcatgaacaattttcttgctgaagtgcctctagtggagtattaggagca

SEQ ID NO: 141425 - DNA, 2615 bp, Zea Mays
ctgctctgttgcgcgtttccctggcctctgctgcgaacctgcaggtgcggacttgcggctgcggcgccccactgcagcactgctgtactgtactggccgcagcgttcgccgtcctccgccacagaaaattcacgcacgattccgagcagccgccctccgccacaatttcgccatgggcgcgccctagccccgcccttcttatccccgctcttccccgcctatggctgccgctgctacagctgacgcctccgcgcagcccctcccatggctctgcttgcgctacggttcgggccgcttctccctgccccgccccaccaccgtcgggtcctgcggaaccgatgccgagtccggatcgtcgcctccaatgcccccacccccgtgagggacgggggcgctgccgcggtggtgtggtttaagcatgatctccgcatcgacgaccacccgggcctcgccgccgccgtctcggagccgcggcgccccgtcgtgccgctttacgtcttcgaccgacgcatcctcgccggctattcagataaaatgctggaactgctgctatttgctctgaaagatcttaagatgacgttgaaatctcaagattctgatttgctcataggcctgggaaacgctgaagatgttgtgctgaagcttgtgaatgaggtacaagcaggtctcgtttttacagaagaagaagttgaatatagagtgcgtgatgttcttgccaatgttgaatcatctttatctaatgggtcattctcatggggaagccctcccaagatagtggcttggagtgccccattgtatgactataagaatctgggagcagtaccgacatcacatgacgattttttaaagaaaaaattaccattggccacaccttcttgctgcggcgaccttgcctgctctaaatttggagttagacacaggttctctacccactctggaagaattaaaatgtttcctgaaagaaataacaccagaggacaattgggctcctctcaagagaatgcccgcaagatctatccttaaaaggacaatcagtcaaaggaagatcaaaagtaatgctacattaagcaccatcaatgaagaaaacatagatgatgctgccaccatggattctgttgcatcaggaaagaggattataaactcgaagtttgcatcagagaactcactggaagttagtggtggaacagaaattactttggatgctttggctgcttacctaaaatatcttgaaggcacaggaaatgctagttggcaagagttgcatgataaagtgcgtttagctgaaaccagatatggtgcttcattctacatcttgtttggtcctgcaattcaacttggagtcatatctaggaggaaagcttacactgagactatccaatatgaaaaagatcgcaatgcaggttttctatcaccatttgggtactcaacacctacagtaacatcagcagtagatgctatatgttcaatggagtggtattggctcttggcatcaaaatcccaagtatgcatcgaggggaaatattctataagaatttggagatggaagggttatcttgtacagtacacctttcttggcaacgaaggtccacctgttcttcttgtgcatggttttggagctttcctggagcattttcgtgacaatatagacaagattgctgctacgggccaccgagtttgggcaattactcttgttggctttgggaaatcagagaaaccaaatgtcaactattcagaacttttctggtctgaactactgagggattttattgttgaaattgtgagggagcctgttcatcttcttggcaactctattggaggttatctctgtgctattgctgctggtttatggccttctcttgcaaagtctctggttcttttaaactcagctggttcagttgttccaaattactccttcatcccactgagtgaagaaagacgaacatcatggatttccaggttgcaggcacagctccttttgctcttcttgaggtcaagggcagaaggcattcttaaagaatattatcctacaagaactgaacgggtggacaagccacttctggaccagattgtaagagcttcatatgatcctggtgctgcaaaagtccttgagagtgtattcaacttcaatctttcaattcctcttaacttcttatttgattcttttggagggaagatattagttatccagggtatgaaagacccccttacaaaatctgaggcatttgtcaccatgctccgagaacattgcagcaaggttcaaatcagagagttaaatgcaggtcatgctccacatgatgaagttccagatgaagtaaataccatactatgtaaatgggtggagcagattgaagttaagccagccctggagaagaccaaggcaatataggtaacatttagaattatggacaccctatccattggttgattgtttaacatgatcttcaggagcaccttggtacattttcagtgacctaccaaaacttgtgtgattaaagcattgtgaattgttagccctatacaaattgtgattaaagtattgtgaattgttagctatatacaaaacttggtacattttctttcagctgatgttgagatgaacatacatgaaaccaaaa

SEQ ID NO: 141426 - DNA, 147 bp, Zea Mays
gcaccttatcagctttccccctctctcttggtttcaccaaatctgacggtgacgcgcccggtgcatggcctccggaagatgtcaagttgcaggtgaccgttccatccctcacaagctactgacctcctccccctcttccctctaatg

SEQ ID NO: 141427 - DNA, 569 bp, Zea Mays
tcaattactcatgttagtactaaccatgattaatgaggtgatgatggataacttattccattctacaaaccagataacttattcctcaaaccaaataccctataaatgcatcaacgtcatccacaacgtaactaaaagaacgtcacccacaacgtacaaagaggcgatttcaactgctcttctttatgcacacatttttgctgactaattagtgactcgtgcaatttgcgaacaaaatggcctaacaaggtacaatttagcaatatatacgcaaccatgtatacaacagcaagaacttctacaacctctctttgtgattgtgaagaaacacatctttcttcgagatcttcaagaaccagttttatctctttgagattgattggcctgtgctcctccccttctcaattgcatcccagccgttagttggttcgagatacaggagtgcgtgcaaggactcttcatgatcttcctgcgatgtggtcatccacctttgacaacctcgataccaatgcttttattacttacgtatctacgttcactggcagcaaagcaacacaagcagatgagat

SEQ ID NO: 141428 - DNA, 1849 bp, Zea Mays
gattcgccatcctcttcaccaagttaggcgacgactggcgcccatcgtcgattccccgttctccgtttccgtctcgcgtgtttggtgctttcgatctccccaaggcggcaggcggcagcgccgtacgcgttgcgggaagattttggttggtggattgttggtggcggctccactccgtcccagtgcactggtccaatccaaatggcggccaataatagcgacccgatccaggatcagctgggggaaggaggggcgggcgtgaggcacgaggctgaggaggaggaggtgggggaggagacgtcttctgccgcggcgcaggcgaccgcgacgacgatgctgccccggtcgagctcgcggccgcagctggacctcagcggcgcggcgatccacgggacgctggaggaccgtaaccctaccatccttttgcccaaccagtccgacgacatctctcacctcgcccttgacatcggcggatctcttataaaactggtgtacttctcgcgacatgctgagctctccactgaagataagcacaagatatccacaaagagaagacttgggatgtttaatggtggcaggagaagctacccgattcttggagggaggctccacttcgtaaagtttgagactgggaagctaaatgaatgtttggacttcatttcttccaaacaactacatcgtggtggaattgattcaccttcatggcgctctggggctcagtctgatgacattgtaattaaggcaacaggtggtggagcattcaagtatgcagatgtcttcaaggaaagattgggagtcagccttgaaaaggaagatgaaatggactgtcttgtggctggagcaaactttttgcttaaggctatacgtcatgaagcttttacacacatggatggccagaagcaatatgttcagattgatcagaatgacttgtttcccttccttcttgttaatgtcggatctggtgttagtataatcaaggttgatgggcatgggaaatttcagcgagtaagtgggacaaatgttggtggtggtacgtactggggattggggaggctaatgacgaagtgcaaaagttttgatgagttgctagagttgagccagcgtggagacaatagcaccatggacatgcttgtaggagacatatatggtggtctggactactccaagattggcctttcagcatctacaattgcctctagttttggaaagataatttcagaaaacaaggagctatcagattatagacctgaagatatatcgctctctctgttacggatgatttcatataatattggccagatttcctatcttaatgcacttcgttatggactcaagaggatattttttggtggattcttcatccgtggtcatgcctacactatggatacaatttcttttgcagtgcatttctggtcaaaaggagaggcacaagctatgtttctgcgccatgagggctttctaggagctcttggtgcatttatgagttatgagaagcatggtcttgatgacttaagggtacatcatttggttgaacgcttcccaatgggtgctccatatgttggtggaaagattcacgggccacctcttggagatctcaatgagaaggcaagagcatcttctcctgatcatgcttaagtttatggctatgatggtttggttatttttctaagtatgacatcctctactaacacaaatttgatgctcgataaattacacctttgaaaactcaaaatgagtgttagatgtcactcaatctaactatacgacggacatgcacaagaaccaaaaggatcaaccaaaattttacctatattgaaaagactgctagaattttgtcgataaccttttg

SEQ ID NO: 141429 - DNA, 237 bp, Zea Mays
cttctgtgtacctacgaatcatgcttcacctgtattttcttagcattgaatagcagttatatatacgctgcaggaattgattcaccttcatggcgctctggggctcagtctgatgacattgtaattaaggtaaaaactaaagagacaacatgatcgatatgtctgaagactccatataactatataagtattaagtaaatgtttggattcaggacacctcaacagtccttaaataag

SEQ ID NO: 141430 - DNA, 1036 bp, Zea Mays
attttgaactgtgcagatatcatggatggagaagtttgtgcaaaagggtactcagattatagcccctgtacctatgggagttccagctacgacaggtatgggaggctttgaaaggccgactgctaagggtgacatcttgcggtcagatgcaagtgcagcgctaaatgtcggtgttctccatcttgtacccacattggatgtatttccattgttggaagatccaaagacgtatgaaccaaacacaattgatcttgaccaggatgagttcaagtactggttcaagattttgtcagatcattcgccggacctcgtggacaaggcagttgctagtgaaggtgggactgatgatgccaaaagacggggtgatgcatttgcacatgccttttctgctcatctggcaagattgatggaggagccagctgcttatggaaagtttggtttggccaacctgttggaattgagagaagaatgtctgagggaatttcagttcgttgatgcatatattagcatcaagcaaagggaaaatgaagcttcactggctgttttaccggatcttctgatggaacttgatagtatgaatgaggaagctaggctgcttgcactaattgaaggtgtccttgctgcaaatatatttgattgggggtctcgagcttgtgtagaactttatcacaagggaactataatagaaatctatcgcatgagtcgcaagaagatgcaacgtccttggcggattgatgactttgacatgttcaaaaagagaatgcttactgataggaaggaccaatcatacaaaagagcactgctttttgttgataactcaggtgctgatgtggtccttggaatgcttcctttagctagggagcttttacgccatggaacagagggagttcagacccttgcgcaacttcttattggaagggccaataagggtcaagcttacttcctcccaccagtcatcaaaggaagtagaattgagactaggagtgagatgctgcaaaccgacagctttcaggatattaaaccaaacttcccttga

SEQ ID NO: 141431 - DNA, 723 bp, Zea Mays
taatttgatcaggtagttcttgttgcaaattcgttgccggctttgaatgatgttaccgctaatgaacttccagaagttatagctgaagcctcaaagcactgtggtatccttcggaaagctgcagaagctggtggattgatagtcgatgcaatggctggcatccaagatgatctcaaggatgagacagtgtcagtgccactaatggttgttgagaatggatgcggcagtccatgtattgatttccggcaggttagctcagagcttgctgctgctgcaaaggatgcagatttgttaattttagaaggcatggggcgatcactgcataccaacctcaatgcccgttttaagtgtgatgctctaaagcttgctatggtcaagaatcagcgattggcagaaaaactcttcaatgggagtctatacgactgcatctgtaaatttgaaccagttccttaacaacatggtagcgactgcggagggttggtattgctcactagtttttccacggcattgctcaaatctggtatctgttcttcagtttaatcacccgttttcagttgtgtcatcttgcagcaactagcagaagcagcttgattggtgtagccggtgagacagaaacaatcatacagcgtacggcataaccgatccttccatgtacggggtacaagaaacgccctttcaataaaacaataacagtgttttctgaaacgatataataaaggctct

SEQ ID NO: 141432 - DNA, 2202 bp, Zea Mays
taatttgatcaggtagttcttgttgcaaattcgttgccggctttgaatgatgttaccgctaatgaacttccagaagttatagctgaagcctcaaagcactgtggtatccttcggaaagctgcagaagctggtggattgatagtcgatgcaatggctggcatccaagatgatctcaaggatgagacagtgtcagtgccactaatggttgttgagaatggatgcggcagtccatgtattgatttccggcaggttagctcagagcttgctgctgctgcaaaggatgcagatttgttaattttagaaggcatggggcgatcactgcataccaacctcaatgcccgttttaagtgtgatgctctaaagcttgctatggtcaagaatcagcgattggcagaaaaactcttcaatgggagtctatacgactgcatctgtaaatttgaaccagttccttaacaacatggtagcgactgcggaggcaactagcagaagcagcttgattggtgtagccggtgagacagaaacaatcatacagcgtacggcataaccgatccttccatgtacggggtacaagaaacgccctttcaataaaacaataacagtgttttctgaaacgatataataaaggctctaaaggctctttccagaaatattgaagggaaaagtttgagccagcaactggagttcgtgtttaagccagaactagttagcagcctaccatggcgaaagtaacatactcgaaccaatcttggaaagatcctgtcattcttgtgccatgctcgaatcaatccataaattgttcagacactgccgggacaatgccatcactcaaatgctaagaatcagttattagtcttcgcatgtgggcaactataataaatcaataaacgacacagtagtcacgagacatgtaaaacaagaggggatgtgaggcattttttcttcagcatacaccagttgatccactaatcaacaagccgtccatcgctccagaaactaccagctctaggcaaagttgatgtcatacgccttactgccgtccgccctgaagatgccaaagtggcgctcgaactcggggccgggcttgccgtcctcgtcgtacaagtcgaacaggaacacctccacgggcacgccgggccgcttcggcgtgccgacgccgcgcgccgccctctccacaatcttggcgttgtacgctgcggcgttctgcggggtggcggccgggtgccccgcggttggccacccggtctcggtcaccgcgaccggcacgccgtcgaacccctccttctccagcgcggccaccagcgcgtctaccgtggcgtcgaacaggttcgtgtacaccagcgcgccgtcctgcaccggcgccgcgcccgctccgaagagcgcgtacgcgagctgcacgttcgccgggtcgttcacgtggctgatgaaagggtaggcgttcaccatgaagggcgcaccggtgtcggccaggaaccgcagcatggggcggaggacggggagggaggcggcgtcgaacgcgccggcggagggcgggtacgaggcggccagcaccgaggaggcgtgcgcggaggagaccttgaccctgccgtccagccccagggtggcgagcgcggcgtgcaggttccgcatggccggcacgaggtgaggcgcatagaactggttgttgtacagcacctcgttgccgacggcgaggcaccggacgcgctcggcgggggcgtgggccaggaccgcggaccgcagccactgcgccgcgccctcgggccccgccgcggccaggaaggtgaggttctcgttgggcacgcccaccatgaggtcgatgcccgccgcggcgaaggccgggagcacggccgggtccggcaggaagagccgcgccttggtgatcccgttccgcttgagcagtgccgcggcggccgacggcggcgggaggttactgccaacgcggccgtggcagatgccgatcttgcccgcgtcaccggccgccgccgccactgccatcgacgcgacggcgaggaggacgtggccgagaagacacaaggctattctcgtggccattggtgaaggaaagaaggaaggaagaatgccacgctttggttgtgttgtcgccgttaaatagattctgctttggcaagaattgtatggttctggttgcttgtagttgtagttgtggcagatcgaggaagttaaggttgagacttgaggatgggc

SEQ ID NO: 141433 - DNA, 1688 bp, Zea Mays
ccgtgccgacgccgctcgctgcctcgctcctccgtgcattcaatcagactcggtgatcttccagccgcccgccaagaacaaaccgacgcggcgtggctgacactcgtcgacccatcccaatagaaaaatcggaaccgtccaagcccgcctcctataaactaaccaacgaccaaccttcctcagcccggcccgggtggcagaggcagtccccagattcattctcttctcgctgcacgccgcactgcgccagcgtcagcatgggcggctgcggcctcggacgcggccgccgcaccgcctgcctgctgctgctcctcccgccgcttctcctgttcgccgtggccgatgccgccgcctcggggaaggagaagcagggggtgtccggtaagctgcggttccggcgggagagcgggacgttcaaggtggtgcaggtggcggacatgcactacgcggacggccggagcacggcctgcgaggacgtgctcccttcccaggtggccggctgcaccgacctcaacaccaccgccttcctctaccgcgtcttccgcgccgaggaccccgacctcgtcgtcttcacaggtgataacatctatggtgctgattcaactgatgcagccaagtctatggatgcagcaattgctccagccattgacatgaaactgccttgggctgctgtgatcgggaaccatgaccaagagggtacgctatcgcgtgagggtgtgatgcgtcaccttgtgggcatgaaaaacacccttgcaagcttcaatccggaaggaattgaaattgatggttacggaaattacaatttggaagtttccggggttgaagggacatccatggatgaaaaatcagtgctcaacctgtatttcctggacagcggtgactattccactgtgccgtcaatcaatggttatggttggatcaaggcttcacagcaagtctggttccaacaaacatcttcaagtctacaggcaaagtatatgaataagaacccgaaacagaaggaaccagcacctggccttgtatttttccacattccactaccagagttcagcagttttacggcatccaatttcacaggagtaaagcaggagggtatcagctcagcatcaattaactctgggttctttgcctccatggtggaggctggagatgtgagagctgcctttgtgggacatgatcacattaatgacttctgtgggaagctcagtggtattcagctctgctatgctggtggatttggttaccatgcctatgggaaagctgggtggtcaagaagagcgagggtactgtctgtgcaacttgagaaaacagacagcggtgaatggcgaggagtcaagtccatcaagacatggaagaggcttgatgataaacatctgagcacaattgactctgaggttctctggaacagaggctctaatgacaggaatggtgctccataagggatctctacatcggtgtgtattgttggatggccagtttactatagaatcagaaatatgcagaagtgtgtacatgggggagaaggtcaaatacagacacatacacgcaggtggtctcatagactcgtatatagtgtggtcaaaggaaaacgagaatgcaatgtcattgtagtctcatctctcgtgtattgttaaactcggtcggaaagagaaagactgtccttccaatattatattaaaaaaagaccg

SEQ ID NO: 141434 - DNA, 2140 bp, Zea Mays
ccgtgccgacgccgctcgctgcctcgctcctccgtgcattcaatcagactcggtgatcttccagccgcccgccaagaacaaaccgacgcggcgtggctgacactcgtcgacccatcccaatagaaaaatcggaaccgtccaagcccgcctcctataaactaaccaacgaccaaccttcctcagcccggcccgggtggcagaggcagtccccagattcattctcttctcgctgcacgccgcactgcgccagcgtcagcatgggcggctgcggcctcggacgcggccgccgcaccgcctgcctgctgctgctcctcccgccgcttctcctgttcgccgtggccgatgccgccgcctcggggaaggagaagcagggggtgtccggtaagctgcggttccggcgggagagcgggacgttcaaggtggtgcaggtggcggacatgcactacgcggacggccggagcacggcctgcgaggacgtgctcccttcccaggtggccggctgcaccgacctcaacaccaccgccttcctctaccgcgtcttccgcgccgaggaccccgacctcgtcgtcttcacaggtgataacatctatggtgctgattcaactgatgcagccaagtctatggatgcagcaattgctccagccattgacatgaaactgccttgggctgctgtgatcgggaaccatgaccaagagggtacgctatcgcgtgagggtgtgatgcgtcaccttgtgggcatgaaaaacacccttgcaagcttcaatccggaaggaattgaaattgatggttacggaaattacaatttggaagtttccggggttgaagggacatccatggatgaaaaatcagtgctcaacctgtatttcctggacagcggtgactattccactgtgccgtcaatcaatggttatggttggatcaaggcttcacagcaagtctggttccaacaaacatcttcaagtctacaggcaaagtatatgaataagaacccgaaacagaaggaaccagcacctggccttgtatttttccacattccactaccagagttcagcagttttacggcatccaatttcacaggagtaaagcaggagggtatcagctcagcatcaattaactctgggttctttgcctccatggtggaggctggagatgtgagagctgcctttgtgggacatgatcacattaatgacttctgtgggaagctcagtggtattcagctctgctatgctggtggatttggttaccatgcctatgggaaagctgggtggtcaagaagagcgagggtactgtctgtgcaacttgagaaaacagacagcggtgaatggcgaggagtcaagtccatcaagacatggaagaggcttgatgataaacatctgagcacaattgactctgaggttctctggaacagaggctctaatgggaggcgcgggaaaaatcctgatggtagttaacttttgatgcagacaggaatggtgctccataagggatctctacatcggtgtgtattgttggatggccagtttactatagaatcagaaatatgcagaagtgtgtacatgggggagaaggtcaaatacagacacatacacgcaggtttctgctgttgcatttttccatgttattagaaaataagtaatcaaaattcagtgctgctgtcaattattgcaggtggtctcatagactcgtatatagtgtggtcaaaggaaaacgagaatgcaatgtcattgtagtctcatctctcgtgtattgttaaactcggtcggaaagagaaagactgtccttccaatattatattaaaaaaagaccgaaacatggtttctgtcaagaaaatccttgaaccctagtgcccattactagcaggctgtcaccatgtaacccaggagcaggcaaagcacaacaagtggatttttttaaccatgttagaaattcgtcctcgagggaatcgaatcgaagacctagaggggttactcggaagttttaaccattacactagaggccctttcacttatctcatgtattgttactagcaccgtctagctgcaactgaaacctcagagctgccacaatatcatttttcatatatactgaatgttcttatgcaaatttgcaatcaattaagaagctgataagtaaaaacaat

SEQ ID NO: 141435 - DNA, 865 bp, Zea Mays
tttttcggtgaataatttatataaatattgttgtaaaccgtcccaacgcacagacaatcacctagtttatagttacataaatgcagccctctcccctaatggggtaaaactgtaaaaggccaaaactggcaggaagagagagaaacagataataataatattaataataataaaggaagaaaataataagaaaaatactcccgtgttcttcgaccggcggcggtggtgcgaagcgaggcggtaagggagacgagatgagggggacgaagcggccgctcggcgtggtgacgtcgtgggtgcggcggcagccgcccaaggtgaaggccttccttgccgttgtcaccggcatggccgcgctcgtcttcatccgcttcatcgtccacgaccacgacaacctcttcgtcgctgccgaggctgcgcacgcgctcggcataggcgtcctcatctacaagctaaccaaggagaagacctgcgccggtttgtttccgtccgcttccttgacacacgttcccgatctgtcgagatcgccgtgcccggcgcgatagggtttaggattttataggatttggtcccccaattcagcgtttcagaagacgatttccctagcatgatttgcaatttttattttgcaaagaattggtagtttactgctgtgtacatctagattctagaagcggaaggttataatgtttattcgatgtatctatagttaccccttatgttttcttgtgaggcattacggtttggggttcttatacgggcccagtgctaaagtatatttcggagctgcaagacgtgtttggttacagtatcctttgatttgactggatgaaatctatatagacttatttgagtcgttttaaga

SEQ ID NO: 141436 - DNA, 1494 bp, Zea Mays
tttttcggtgaataatttatataaatattgttgtaaaccgtcccaacgcacagacaatcacctagtttatagttacataaatgcagccctctcccctaatggggtaaaactgtaaaaggccaaaactggcaggaagagagagaaacagataataataatattaataataataaaggaagaaaataataagaaaaatactcccgtgttcttcgaccggcggcggtggtgcgaagcgaggcggtaagggagacgagatgagggggacgaagcggccgctcggcgtggtgacgtcgtgggtgcggcggcagccgcccaaggtgaaggccttccttgccgttgtcaccggcatggccgcgctcgtcttcatccgcttcatcgtccacgaccacgacaacctcttcgtcgctgccgaggctgcgcacgcgctcggcataggcgtcctcatctacaagctaaccaaggagaagacctgcgccggactatccctcaagtctcaggatttaactgcattatttctagctgttagactgtactgcagctttgtcatggagtatgacatccatacaattctggacactgctacacttgtagccacactgtttgttatttatatgatacggttcaaactgaggtcaacttatatggtggataaggataactttgcgttgtattatgtggtgttaccgtgtgctggactggcactacttattcatccgtcaacatctcataacattgtgaaccggatctcctgggggttctgtgtttacttggaagctgtttcagtgcttccgcagttacacttgatgcaaaatactaagattgttgaaccctttacagctcactatgtatttgcattgggagttgcaaggtttcttagctgcgcccactgggttctacaggttttggacacgcgtggtcgtctgttgacagctcttggctatggtttgtggccgtctatggtgcttttatcagaaatcgtgcagacattcatccttgcagatttctgctactactatgtgaagagtcttgttggtgggcaactggtgctacggcttccctcaggggtggtgtaagaagtgcagaagagatactctgaataacagttatgctctagtgcccaacctgggagccttcttttagctgatgatgttgcaagtaatgactatgtatgacaaaattgctgcaagggttctcttaaaacatagtttgtcattgagacttcatagctgcgccgtttcttgatgcccaatctccgagtactagcttcctgtgactgtcgtggtggtcttagaatcaggtggttagtgatctcattggattatataattctataatgctttcatatgaaacagattgatcttgatgtatcagcagaactagccacgtgaaaatggttggaccaaggtcatcaggtttgtatttacttaacattgggattatcagtaggggttcctttcgggtccactactaatctttagtactagttttctttta

SEQ ID NO: 141437 - DNA, 1376 bp, Zea Mays
agccatatagacatctatacccccacccacccaaccttcggcagtccccatcctctcctgtgggcgctccctctccccggcccccaaatcaccgcgcctccctcgccacgcctcacagggccggttgcgtaggagaaaggagaaaggaaggaggggaggcggtcgtcgggcgagatgagcgactccttctgccccgactgcaagaagcatacggaggtggcgttcgaccactcggcgggggacatggtgtgcaccgagtgcggcctcgtcctcgaggcgcactccgtcgacgagacctccgagtggcgcaccttcgcgaacgagtccaacgacaacgaccccgtccgtgtcggtggccccaccaacccgctcctcaccgatggcggcctctccaccgtcatcgccaagcccaacggtgcgcagggcgacttcctatcctcctccctcggcaggtggcagaaccgcggctccaaccccgaccgatccctcatcctcgccttccgcaccatcgccaacatggctgaccggctaggtcttgtggctactattaaggaccgagcaaatgaaatctacaagaaagttgaagatctcaaatctatcaggggaagaaatcaagatgccatattagctgcatgcctatatattgcttgtagacaagaagatcggcctagaactgtgaaagaaatatgttcagttgctaatggggccacaaagaaagaaattggcagagcaaaagaatttatagtgaaacaactggaagttgagatggggcaatctatggagatgggaaccattcacgctggaaattttctgagacgtttctgctcaactcttgggatgaacaatcaagctgttagggcagcccaggatgcagttaagcactcggaggagcttgatataaggaggagccctatctcaattgcagccgctgtcatttatatgataacccaactctcagaggacaagaagccacttaaagatatatccttggctactggtgtagcagaaggcaccatcagaaattcgtacaaggatctgtatccttatgcctcaaggctcatcccgaatacctacgccaaggaagaagacctgaagaatctctgcacaccttaggaggcttacttttttccccctttctgttactacataattcggaattagatttgtcaaagaggagtgagtgaagttgttcctcgttgtgactgtaccgggcaaggtgtcgtccccgccgtgcttaactttatgatggaatttcttttcagagcacctaccacctgaagatttgtgggatacgtatactcacttcggaaagaatgtagatagcaagcagttggacaagcacaagattttaatttaaaacatgattttgttctcca

SEQ ID NO: 141438 - DNA, 1623 bp, Zea Mays
acccccacccacccaaccttcggcagtccccatcctctcctgtgggcgctccctctccccggcccccaaatcaccgcgcctccctcgccacgcctcacagggccggttgcgtaggagaaaggagaaaggaaggaggggaggcggtcgtcgggcgagatgagcgactccttctgccccgactgcaagaagcatacggaggtggcgttcgaccactcggcgggggacatggtgtgcaccgagtgcggcctcgtcctcgaggcgcactccgtcgacgagacctccgagtggcgcaccttcgcgaacgagtccaacgacaacgaccccgtccgtgtcggtggccccaccaacccgctcctcaccgatggcggcctctccaccgtcatcgccaagcccaacggtgcgcagggcgacttcctatcctcctccctcggcaggtggcagaaccgcggctccaaccccgaccgatccctcatcctcgccttccgcaccatcgccaacatggctgaccggctaggtcttgtggctactattaagaccagagaaaaagtcattcaaaatagattttgaccatcaatttctcttgtaatgtaaagtcgacggtctaaaaataaataccatcttataggcacttttaacacaaatctattgatgcagattatatgctctaaactttaatggaatttgattagttggtcaaaatttatgaagtttgactttttctctggccaaatatgattaccacttctgaacggagggagtaattatttgtttttgtctttactcttcaaggaccgagcaaatgaaatctacaagaaagttgaagatctcaaatctatcaggggaagaaatcaagatgccatattagctgcatgcctatatattgcttgtagacaagaagatcggcctagaactgtgaaagaaatatgttcagttgctaatggggccacaaagaaagaaattggcagagcaaaagaatttatagtgaaacaactggaagttgagatggggcaatctatggagatgggaaccattcacgctggaaattttctgagacgtttctgctcaactcttgggatgaacaatcaagctgttagggcagcccaggatgcagttaagcactcggaggagcttgatataaggaggagccctatctcaattgcagccgctgtcatttatatgataacccaactctcagaggacaagaagccacttaaagatatatccttggctactggtgtagcagaaggcaccatcagaaattcgtacaaggatctgtatccttatgcctcaaggctcatcccgaatacctacgccaaggaagaagacctgaagaatctctgcacaccttaggaggcttacttttttccccctttctgttactacataattcggaattagatttgtcaaagaggagtgagtgaagttgttcctcgttgtgactgtaccgggcaaggtgtcgtccccgccgtgcttaactttatgatggaatttcttttcagagcacctaccacctgaagatttgtgggatacgtatactcacttcggaaagaatgtagatagcaagcagttggacaagcacaagattttaatttaaaacatgattttgttctccatcttctgaag

SEQ ID NO: 141439 - DNA, 806 bp, Zea Mays
tctcctgtgggcgctccctctccccggcccccaaatcaccgcgcctccctcgccacgcctcacagggccggttgcgtaggagaaaggagaaaggaaggaggggaggcggtcgtcgggcgagatgagcgactccttctgccccgactgcaagaagcatacggaggtggcgttcgaccactcggcgggggacatggtgtgcaccgagtgcggcctcgtcctcgaggcgcactccgtcgacgagacctccgagtggcgcaccttcgcgaacgagtccaacgacaacgaccccgtccgtgtcggtggccccaccaacccgctcctcaccgatggcggcctctccaccgtcatcgccaagcccaacggtgcgcagggcgacttcctatcctcctccctcggcaggtggcagaaccgcggctccaaccccgaccgatccctcatcctcgccttccgcaccatcgccaacatggctgaccggtccgcctccccccttctccgctgctcccttttctcacgctataggtccgatccgattcgatcaaattatgtggcttgctagtagtttgcgctgatttgtaggatatggcgtgtgcttgttacgttcatgcgtgcggcgcgctgcctgattttacgcctggggctatggaatgtgaccagggttggttatgactgcgggtctagatttggaacatctgattgatatattgcgtctagtatttttgcatgttcttgcagggtttggtgctggatgatttgtcccttggatctactgaaatcccgttctttataatatgggaacccatctaata

SEQ ID NO: 141440 - DNA, 1212 bp, Zea Mays
tctcctgtgggcgctccctctccccggcccccaaatcaccgcgcctccctcgccacgcctcacagggccggttgcgtaggagaaaggagaaaggaaggaggggaggcggtcgtcgggcgagatgagcgactccttctgccccgactgcaagaagcatacggaggtggcgttcgaccactcggcgggggacatggtgtgcaccgagtgcggcctcgtcctcgaggcgcactccgtcgacgagacctccgagtggcgcaccttcgcgaacgagtccaacgacaacgaccccgtccgtgtcggtggccccaccaacccgctcctcaccgatggcggcctctccaccgtcatcgccaagcccaacggtgcgcagggcgacttcctatcctcctccctcggcaggtggcagaaccgcggctccaaccccgaccgatccctcatcctcgccttccgcaccatcgccaacatggctgaccggctaggtcttgtggctactattaaggaccgagcaaatgaaatctacaagaaagttgaagatctcaaatctatcaggggaagaaatcaagatgccatattagctgcatgcctatatattgcttgtagacaagaagatcggcctagaactgtgaaagaaatatgttcagttgctaatggggccacaaagaaagaaattggcagagcaaaagaatttatagtgaaacaactggaagttgagatggggcaatctatggagatgggaaccattcacgctggaaattttctgagacgtttctgctcaactcttgggatgaacaatcaagctgttagggcagcccaggatgcagttaagcactcggaggagcttgatataaggaggagccctatctcaattgcagccgctgtcatttatatgataacccaactctcagaggacaagaagccacttaaagatatatccttggctactggtgtagcagaaggcaccatcagaaattcgtacaaggatctgtatccttatgcctcaaggctcatcccgaatacctacgccaaggaagaagacctgaagaatctctgcacaccttaggaggcttacttttttccccctttctgttactacataattcggaattagatttgtcaaagaggaagcacctaccacctgaagatttgtgggatacgtatactcacttcggaaagaatgtagatagcaagcagttggacaagcacaagatttta

SEQ ID NO: 141441 - DNA, 1629 bp, Zea Mays
atcagtttacacaaaacgcaagatcgattatccggtcgcctcccgggccgggggcctttaactcgagtcgctaatccgtttccttgtatcgccccgtctccgacctcgctcgccgccatggatggttcgaaggggagcgtaggtggcggggacgggaccgggcccgaaaagccaagcgccgattcgaaccctagccttgacccgccccaacctaccgcggcggctgtcgaagccacagatgacggtgcggccgcggctgcggccgaggcggccaggcggcccttcacggccctcagccaagaggaagctgacctcgccctcgcccgcgtcctgcaggagcaggagcgggcgtacatgttgcttcggatgaacgggggcggtggcgagggcagcgactacgggagctctgatgaagggagctacgaatatgacgaagagggagaggaggactacgaagaggaactggagcaccgcctccgcgtccaccaccacgagcacccctcgggcgatggtgagggagagggcgggggcgagggcgagggcgccgaggggagcgactacgacgaagagttcgaggaggacgaagaaggggagccggaggtagatcccgcggagtttgaggacgatgaggcttatgcgcgtgcgctgcaggatgctgaggagcgtgaggtcgccgcacggcttatggctctcgctggtctcagcgattggcgaacagtggaggtggagcatgaggaggatcatgcgaatgatccacaggaggcatggcaagaggtcgatccagatgaatactcttatgaggagctagtcgcattgggtgaagtagttggcacagaaaacagaggtctctctgctgatacacttggttctttaccttcagtaacatacaagctgcaacatgttcaggatggcaacacagagcaatgcgtaatttgccgtgtggaattggaggagggtgaatctttgattgcactcccctgcaagcacttataccatcctgaatgcataaaccagtggctgcaaataaataagtatatatttcagcatttctgctggcggatcatgccatgtcaacccctaccttgaaaagtaacttctattatgcacactacctggcttgagttaatttcaacatgttttccgatcaacatgacgtggatacatctagacaacagctctcattgctccaaaatttgacaaaatatcccctgattcttgcaggtatgccctatgtgcagcgcagaagtatcaacctcgggtaacaaggagccatgactgctcctccgatggctatcttgggaacttggtgggaataactagcggcatcactgcagcatctgtattgtcgaaacaaaagcagaaaaaacggtctacatacatgcaaggagatcaggatataatcctcttgtcagtctaaagttctgcccttggttccctgctaactggattgattggccttgccgcttattatctcagttccctatgaacgccttatggctgttgtatgatccataaattatgctaattatattatattgttagtcattctttttactgatcgcatgatcatcttatatatttgcttgtcaactgattttagtttttttcttcttaattctaatcccttcg

SEQ ID NO: 141442 - DNA, 1497 bp, Zea Mays
atcagtttacacaaaacgcaagatcgattatccggtcgcctcccgggccgggggcctttaactcgagtcgctaatccgtttccttgtatcgccccgtctccgacctcgctcgccgccatggatggttcgaaggggagcgtaggtggcggggacgggaccgggcccgaaaagccaagcgccgattcgaaccctagccttgacccgccccaacctaccgcggcggctgtcgaagccacagatgacggtgcggccgcggctgcggccgaggcggccaggcggcccttcacggccctcagccaagaggaagctgacctcgccctcgcccgcgtcctgcaggagcaggagcgggcgtacatgttgcttcggatgaacgggggcggtggcgagggcagcgactacgggagctctgatgaagggagctacgaatatgacgaagagggagaggaggactacgaagaggaactggagcaccgcctccgcgtccaccaccacgagcacccctcgggcgatggtgagggagagggcgggggcgagggcgagggcgccgaggggagcgactacgacgaagagttcgaggaggacgaagaaggggagccggaggtagatcccgcggagtttgaggacgatgaggcttatgcgcgtgcgctgcaggatgctgaggagcgtgaggtcgccgcacggcttatggctctcgctggtctcagcgattggcgaacagtggaggtggagcatgaggaggatcatgcgaatgatccacaggaggcatggcaagaggtcgatccagatgaatactcttatgaggagctagtcgcattgggtgaagtagttggcacagaaaacagaggtctctctgctgatacacttggttctttaccttcagtaacatacaagctgcaacatgttcaggatggcaacacagagcaatgcgtaatttgccgtgtggaattggaggagggtgaatctttgattgcactcccctgcaagcacttataccatcctgaatgcataaaccagtggctgcaaataaataagtatatatttcagcatttctgctggcggatcatgccatgtcaacccctaccttgaaaagtatgccctatgtgcagcgcagaagtatcaacctcgggtaacaaggagccatgactgctcctccgatggctatcttgggaacttggtgggaataactagcggcatcactgcagcatctgtattgtcgaaacaaaagcagaaaaaacggtctacatacatgcaaggagatcaggatataatcctcttgtcagtctaaagttctgcccttggttccctgctaactggattgattggccttgccgcttattatctcagttccctatgaacgccttatggctgttgtatgatccataaattatgctaattatattatattgttagtcattctttttactgatcgcatgatcatcttatatatttgcttgtcaactgattttagtttttttcttcttaattctaatcccttcg

SEQ ID NO: 141443 - DNA, 1440 bp, Zea Mays
atcagtttacacaaaacgcaagatcgattatccggtcgcctcccgggccgggggcctttaactcgagtcgctaatccgtttccttgtatcgccccgtctccgacctcgctcgccgccatggatggttcgaaggggagcgtaggtggcggggacgggaccgggcccgaaaagccaagcgccgattcgaaccctagccttgacccgccccaacctaccgcggcggctgtcgaagccacagatgacggtgcggccgcggctgcggccgaggcggccaggcggcccttcacggccctcagccaagaggaagctgacctcgccctcgcccgcgtcctgcaggagcaggagcgggcgtacatgttgcttcggatgaacgggggcggtggcgagggcagcgactacgggagctctgatgaagggagctacgaatatgacgaagagggagaggaggactacgaagaggaactggagcaccgcctccgcgtccaccaccacgagcacccctcgggcgatggtgagggagagggcgggggcgagggcgagggcgccgaggggagcgactacgacgaagagttcgaggaggacgaagaaggggagccggaggtagatcccgcggagtttgaggacgatgaggcttatgcgcgtgcgctgcaggatgctgaggagcgtgaggtcgccgcacggcttatggctctcgctggtctcagcgattggcgaacagtggaggtggagcatgaggaggatcatgcgaatgatccacaggaggcatggcaagaggtcgatccagatgaatactcttatgaggagctagtcgcattgggtgaagtagttggcacagaaaacagaggtctctctgctgatacacttggttctttaccttcagtaacatacaagctgcaacatgttcaggatggcaacacagagcaatgcgtaatttgccgtgtggaattggaggagggtgaatctttgattgcactcccctgcaagcacttataccatcctgaatgcataaaccagtggctgcaaataaataaggtatgccctatgtgcagcgcagaagtatcaacctcgggtaacaaggagccatgactgctcctccgatggctatcttgggaacttggtgggaataactagcggcatcactgcagcatctgtattgtcgaaacaaaagcagaaaaaacggtctacatacatgcaaggagatcaggatataatcctcttgtcagtctaaagttctgcccttggttccctgctaactggattgattggccttgccgcttattatctcagttccctatgaacgccttatggctgttgtatgatccataaattatgctaattatattatattgttagtcattctttttactgatcgcatgatcatcttatatatttgcttgtcaactgattttagtttttttcttcttaattctaatcccttcg

SEQ ID NO: 141444 - DNA, 1848 bp, Zea Mays
ctgcctcgcttcaaaacgcccctacccctaccgttgcctagctcaccagatcgatcttaccatggctttcctcaccatcctcctcctcgcgcgcatttccagctccattgccatctcgtccaactacatctcaaggagcgccgagcagcaggtcatcgccaccgtcgcgccggccattgttcctgacatcgacggccagggcgcgcagccgttcctcacctcgccctccggatcgtacgccgcgtacctccgccgcgccgtggacggcgccggcggcctcggcggggacgcgtgctatgtccaagtccagcaagatggcgccagcggcagcgtatgggagtcggactgcaccccggtgggtggagctgacgcgtgcgacctgtcgttctcgccggtgggcctcgagctcttcgccggagggcactcgttgtgggacaccggggtcgacgccgatccgggaacgctgagccttgacgacggcggcgacatgaagattgttagcaaggaaggtgtgacggtgtggacggcaagcggcgagccatggactgggcaacagtgcggggcgcccttgccggtgtcaacgaccgcgccttcaatggaggcgctcccaccgccgtcgactgccactgccactgccagcacaaaactcgtgacgccaccagcagcgactcttgctggtgcggggagcgcggactctccttacggagaccaaccagcgccgccacctgtcgacacgttgccggactttccgggccagccgccagttgacacggcaccggaacagccactgccaccgccgccagcagacgcgtctcccgccttgccggacctgtcgctgccaccgccgccagcttacacgcctcccgactcgccggaccagccgctgctggcacccccaccagctgacatgttgccggacgagccgctgtactcgtcgccgcctccagctccagccacctttggccctcaaacgccattattgccaccattcggcgtgccactcgccgccccgccgaccggcgacacagtcccggacacggccacgccatctggcgagccaggatcgcctggccgcgtgcctttctcgggaccatctcctgtcggcatgccgcaccagcacgggcatccacaccagcagccccttgtaggctcgccgccgctgccggacgcgctggcgccgggcgtccacggtgcgggagccgggcagcccggtgcccccttcggccatgggcagcagcaggcggggcagggcgtgttcggccagcagccgcagctgctcaacggcgaggggcagccgttggaggacagcgccgccggtgggtggtcaagaacaagaagcgagagcggcagggtggccgcgtgcgtggccttgttcggtctcatgacgttgggctttgccttttagtttgtttcccttttgtgttgtgttttggtttttgggattgcatggtcatttctgtagtactccttccgtttctttttatttgtcgctggataatgtaaaattgcactatccagcgacaaataaaaagaaacggagggagtactgtttattctccattggtctgatatgacttatgaggggtctgtcttttgtggattgtagtaaaaaaattgtgtgtaaaacctgtcatatggtgcgctgtctgattcattctgtaggatagcatgatctaccgtatgtacatctgtcaatctgtgtattatcgtgtgtaaatgtcaaatttaagcgcgatttgcggttgtactaaaaattgattagtaatcttgtcttagcgtgtgttatctgtttttttcttcgtgatcatgtttagtagtatgtactccctctattttttttcatttgtc

SEQ ID NO: 141445 - DNA, 1808 bp, Zea Mays
agcagataacgtggcagcattattattgcaaataacacaatgaaactcttaacgagaatagcctgattactagtacaacagcctgtgaaaattccgtaactgcatatgtttattcctttgctcgtcccacgagcaattcatcactagacacagtgcactgcatacacgtacgggacgcacacgttacacatgaatgaatacgtatatacacatcgcatttacctgttcctgtatgcaaatatactgcacgactggagtgtacactacacagtacatacactgcaatggcagtacggccgcaacactggcacacgtacgtacgtacgggctcgtcgatcgaagccgtcacgtcacgcggtgccatcgacgcgcgccttggtgactccggcgcaggcgtcgacgaagtcgccgtcgatgaagtcggtggagaagacctgcagcttgtcgccgaggcccttggcgaaggcctcggcgatgaagagccgcgcgtagccgtggatccgcttcgtgacgggccacacgcacagcaccgggttgtcggccttgggcgtcaccgtgttctccacccggtagaagaacctccggccggccaccggcggctgctgccccaggaacttgaggttgctctcgaacttggtctccggcaggtccgtgtcgatccagttgtccttgaggtagccggcgctccacagcgggtccccgggcctgggcggcggcgacttgcggggcttccagacgcagatgacccgccgcgggagcagctccgcgacggtcctgtggaacaccgcctcgtcctgcgggatcaggtgctcgcccagcttgtcggccaggaacctgtcgaaccccggcgggtcctcgtgcccgaactcggtgcggatctccaagatgaccagctcggactcggtctcgctcaggaaccggctcacgtcgtccagcaccacgtccacggggtacgtcgccaggatgccgtggcagacccggcgctcctcctgcacgcgcacgtcgacgacgcgcgtgcccatggccagctgctcgtacacggacatggactggcactgcgcgaaggggcgggtcaccagcggcacgccgatcttgttggtggccgagtcgtgcgtgccgggccacaccacctggtgcacgcgcagcttgtcggcgcccagctccgccatccaccgcttccggtccgccggccggtgctccgaccccgggaacgtgtcgccggaggaggacagccgcgtggccagcgcccgcttctcggtggtcaccagcttccgccggtccacctgcttcgagaagaaggcgcccatggcttccagcgggttgctgctgctgttggaattggaggaagccatggatggataaattataaagggagtcctgtgcctcgagctcagacctggacctggacgtcgctgtaagctggagatcgattataaatagcagcaagacaatcaaggaagaaaaatatcagtgcgtcgtgggattagccaacatgtggcgatggtttttttgtaggggcttggctgatcgatgattgatccggagaggagggaagtgttcttgcgacctccgctgctgctttcggttaccttggattattggaatggatggtagaattggcgccgttaggtgtggacgtgtgctgatgccaggccggtcgagagagagatttttcttttcttttctttggcaattgccaattggcatatatctctatccaaattgctactactggacagagccatagagggtttggttcgctcggagcatggacgaggcaattcttttatggcgagagagacggcgac

SEQ ID NO: 141446 - DNA, 587 bp, Zea Mays
ggcaatagctctgttaacctagtctctcacgggcactgtgcgggggtatttataggtgtctgagcacccagcgtctcgtgttaaggacgcatgtgccctcagacacttaggttatccccagaatattctcataaagcagggttacagactgtaattacagggatgcctttacagattaggcccgtaatacgcagcggccacgcagagcccgttacaatgggccggatcacacgtgggcctccgagttggacaaggccgcatggtggaatgacctcgtcgcaggccttcgtctgatgtcatgtggggcgaagggtgtccctgtccgttttatctccgttggaccaacgactgcagcgaaggcctcgagcgaagggtggcgtctttgccttcgccccaacagtcgtcactattcgtttgctttgatcataaattttgtcttccatcatgcatacaggaaaggatagtcttcacacacacaaaacagcaaaggtcaacctgcttccaatcatttgacttccacgtgttcaaaacacaacctgtgcagatgtgctccgcgttcaactgctcctaacgaagtaacgagatgc

SEQ ID NO: 141447 - DNA, 561 bp, Zea Mays
atggatagcaggtccatctatattgctgacatacctatgaggtgcaaggttatttctgattggttagcttcttacccctttttcatcacatacagaatcggctatcttaaggctgggcaaaaggttcgtgaagaaagtgaaaggctgcgagtctgcgacagcaggaacgctagcagaggacttggtctcacaacacatattattgatcactgcaagctgtataatgctcagttcaagatttttgaacctctagaatacaaatatgatgtctgtgaaactatcttattgtgggaacagtaccgcaacatgacaactgtattgacaagggaatacttggatgtgaggccggatggatggttggattatgcagctaaaaggaccgcacagcttggtgttgataaatgttacaaccgcactctctgtgatgagcttcttagcattgtactgcctgctaaaccccctttccatccacgccagttcgcgacatgtgcagttgttgaccaacagctacatggctttcttcctgctgattccaactctgattttttagaagagctttga

SEQ ID NO: 141448 - DNA, 472 bp, Zea Mays
atggagtggatgaggccggagacggcgtccttgtccttgagcgcgtcgcgcttgaacgcgagcaccttcctgtccttgacgccgggggccaccagcacggcctgcagggggctgcttccaaccatggtgatgacgagacgattgacgacgcgcgcgatagatgagcagcgggatcgaacttgttcgatggagaactcgtgttgacgagacgatgaccgatccaacggacctggcaagtgatgccaagcaggccctgaggcgagaaggtcgtctggtgagacgcgtctcttggtgtgtgtgcggggttgctcggcatgagtctggcgccatatataggagtgcccgcggctggccatgggggaggtgctcacgtttcatcggtggaatctggaatgggttaggtgggccggaagccggagagaggcaccgcgggagggcgatgtggttcggtgtggtgccggggtgcggctga

SEQ ID NO: 141449 - DNA, 108 bp, Zea Mays
cttttctcttagatttaatttgtataatcatataatcattcatatattgttacaacaggatttggttcagcttctcactttgttttttaatgagaagaagcagacaac

SEQ ID NO: 141450 - DNA, 421 bp, Zea Mays
atggaagattttggatcgagcgaagctaagcttttcatcgagatggcgcttgttgtcttcggcaagaatggcgggctcgagcagatcggtagcaggaagggctatgtggatgccacaactttgaccaagattagtgaggatagagatgacgccatcgatctggacgaatggcgagctcgacgatctagagtcagatctggtggggaagaagactggtcggtcgttaccgacggcaacactgactgcagagctgatcgtgccactagcacaagagatcaaggagttctttgccatcgtcgaggcggccagtacaagcgcttcgcttccaagaaataactcttgaccatgtgaaggcagttggctttcttggagatggttttggcaccacaccagagatgagcaaatgaaacttgatataggt

SEQ ID NO: 141451 - DNA, 1762 bp, Zea Mays
gctgcagcgcgatcgagcagccagaggccagagccagtttcacttcactatcactcaccagaggtacggtgggttttagtggtccaccggccgatcgatcataccataccataccatatggatgtgaaggtgctgagctccaagctcgtgaaaccgtcgtacccggcgggcgcgccgcggccggacaccacggagcacgtgccgtcgtccgtgttcgacagagccacgtacaacatgcagatggccatcatctacgccttctccccgccgggtccctccccgggcgccatcgagcgcggcctcgccgcggtgctgggcgcgtaccggctcttcgcggggcaggtccgcgcgggcccggacgacggcggcgcgccgggggtgctgctcaacgaccacggcgcccgcctcgtcgaggcgtccgtggacgcgcgcctcgccgacatcgcccccaccaagccgtcgcccgcggtgctgcgcctgcacccggacctggacggcgacatccaggaggtggtgcaggtgcagctcacgcgcttcgcgtgcggctccctcgccgtggggttcacggccaaccacgccgtggcggacggccacgccaccagcgacttcctcgtcgcctggggccgcgccgcgcgggggctgggcccgtcgtcgtccccggtgccagtccaccgcccgggcctcttcccgccgcgccacccgccgcgcgccgagttcgagcaccgcggcgtggagtactgctactacaggcccgcgccgccgtcgccggcacacgcacaccaccctgccgcggcccacggaggagacacccggcacagcgtcgtgatccacaaggcacacttcaccaaggacttcgtcgcggggctccgcgccagggcgtcccaaggccgcggccgccccttcagccggttcgagacgatcctagcgcacgtgtggcgcgccatgacgcgcgcgcgggggctcggcgtcgacccgctccagacctccaccgtgcgcatctccgtggacgggcggccgcgcctcgcggcgccggccggctacttcggcaacctggtcctctgggcgttcccgcgcgccacggtgggggacctgctcagccggccgctgaagcacgcggcgcaggcgatccacgacgccgtcgcgcgcgtggacggcgcctacttccagtcgttcgtggactgggccagctccggcgccgtcgacaaggaagtgctgcagaccacggccgtgctcaaggacgtgctgtgcccggacctcgaggtggacagctggctcaccttcccgttctacgagctggacttcggcacgggcagcccgacctacttcatgccgtcctacttccccacggaagggatgctgttcctcgtgccgtcctacctgggcgacggcagcgtggacgccttcgtgccgctgttcgagcacaacctggaggcgttcaagcagtgctgctactccatggaggagtagctaagctagcgtcaactcgatcctgtattcctgtgcatatgcatgcatgcatgcatgcgtaattattctgcttatgcgtatacttgcgtgcatgcgagcatatatatgcaacgttggttattaccattatcaccataaaaaaccatacgtatctggtacttccatacgtatatatgcacccacacccagcagtatttatttccatccccatacgtacatgcatatgcacattttacaactaagacctaagttaccttcttgttttttttttgaacttgtacgaggatttgtgatc

SEQ ID NO: 141452 - DNA, 560 bp, Zea Mays
gaattgaactgaattctaaactgaactgtattctgaactgaatctgaactcaactgatttctgaactgaacaggaagctaaactgaactgaactgttatattggataatctgaactgaacagttcataaatcaactatcaatactagaaatcctcatcttcatcttctatggacatgtcatcattgttgtcgtcgccaccatcattaaaatattgaagcattgtattatcttcctcctcatcctcactatcttcaagaataatagcagtttccttctttttcttattagttcctctaaattgccttcaattagactggctagtccaccttcaacattgtgcaggacctgattatcatcaccttcttgcactatatgctcagtatcagaacaataatcatcctgatgcacatcattactgccctcatattttcagccacatcataaatattcctatgttcaaatttctgcacaactcggaaatctttacattgtggagttgtgtcttgcaggtaaaatatctttttcgcttggtctgccaagataaaaggatcggacttgt

SEQ ID NO: 141453 - DNA, 784 bp, Zea Mays
aactactatgatattgctttactgaaggaatttagttaccttcagatgaagctttgttattacaaaatgcattgcagagatgatttggcaattaggttatttaaaaccaaaagatttccccatgtaaactgagttcctccagtgcctcaatcgaaacagtatgatacctatgtctgcagaacactgaattcaacattgcaactaagattaagctcataaaacagaaatatattgtgttctttgttatccaatttagtttactgctatgtttagaaaaattctatgttgagaagatgatttgccacgaggatgctattacttaacttttaatgaggctttgttttttacaaaagccattacttaccttcagatgaggctttgttcattcttttatttccccatgttaatctaatttgcacatcactaaacaatatgatacctattgttttttattgttattgatttcttcttattttttgtccaattacctatagaaacgacatcgaaaggaacttcaagctcaacaagcgaaagcatctatacaaagactgtctgaaatcttctagaaaaacctaaaccctatcgggaatggagacgctctcggcgaagcaggagggcaaggtggacgtgaagctgaagccgacttctaaccaatccaactcgtaggcgagcggggaagcggatgtgccaactaaaagagtggtctctctcagcgcttgcttgacaaacgtgtgttattaaccgttgtatataatgttattaattaatgtcctttattccctga

SEQ ID NO: 141454 - DNA, 1377 bp, Zea Mays
caagcaagtagtcacctgtgtcatcttattccgatcctagcccctcccatctccaattcctcgcttcctcctcccttctctagttctctgatcctcagcacttagcatcaagcttagcacaccggcgagatggcctccacctccaccttcctgtccaccctcgccagcaggtccgcggcagccgatagcctgcgcagcgccgtgccgtccttcgccaagatcgtcaggttcttgcccgcgcaggcgcagatcagccgcaggcggcgcgcggcggtgctgcccacgccgagggcggcggtgtcgggcaccgagaaggcgccgtcgagcaagcacgagcgcgtggtcagggtgcacagcacccaggagttcgacgacgcgctcaaggccgccaagaaccggctggtggtggtggagttcgcggcgagcgacagcgaggacagcagccagatctacccgaccatggtgcagctcagccgcacctgcggcgacgtggacttcctgctggtcctgcgcgacgacgagtcggaggccaccgaggagctgttccgccgggagggcgtcacgaaggtgccccacttcaacttctacaagggcgccgagaaggtgcacgaggaggaggccatcggccccgagcggctcgcgggcgacgtcctctactacggcgacagccactcggcggtggtgcagctgcactcgcgggaggacgtggaggcgctcatcgacgagcaccgcggcgacaagggcaagctcgtcgtgctggacgtgggcctcaagcactgcgggccctgcgtcaaggtgtaccccaccgtgctgaagctgtcgcggtccatggtcgacaacaccgtcttcgcgcgcatgaacggcgacgagaacgacagctgcatggagttcctcagggccatgaagatcgtggaggtgcccactttcgtcttcatcagggacggccagatcgtcggccgctacgtcggctccggcaagggggagctcgtcggtgagatcctccgatacaacggcgtcagggtcacctactgaagtgaagtagtgaacaacaaaccagtcagagtcagagcaagcgcaagccgacaagcaacgcttcgatacaaaattgaagacgatacaaaattttagattactgcgacatccatcgacgattggccgatgtttagactgtttattgtgtaccattaccatacttgcccgttaatcgctactattcaatagtaatagtaggcttttgtagggctagcagctgcttgctgctttgcaactttaatcttgtttggtgatctatcagcttgattgtccaactagtgtcttgcaaagttccaagtttacatgttcctgcagtcgagaaaaaactgtaatttttcatttcac

SEQ ID NO: 141455 - DNA, 2045 bp, Zea Mays
cgtctccccgtctcatcccatgtcatgactcagcaccacctcccccatcctcctctgtcctcgtataaagcgccgcagtccacgacggcgacgccgcccatgggagctggagcaccagcacacgccgctgccccggctctgcgccgcgaaccctagccgaccgcctcatggccgccgagtcctgcggcagccgcggcgcctcgcccccgccgcctccctccgctggcggcgcggccgggaggcgccgcaaggcggaggcctacgccgaggtgctccgccgcatccgcgctggcgccggcggctacggtgctgcccgccccgggttggaggacgagctctgggcccacttccaaggcctacccgccagatatgctttggatgtcaatgtagaacgggttgaagatgtcttactgcacaagaaattgctggagcaagcccataaacccatgaatggtctggtctttgatgttcgtcctgcacagggttttactctggaggaaagcactggatttgagtccacaacttcctttaagcaagaagaacaagatccccagtcctcagtattcacatcaagagatcaaaggcctttgcatgaagttatatttgcatgtgacgataagccaaagcttcttagtcagttaacctctctcctcggggagcttggtcttaatatccaagaagcacatgcatattcgacgagtgatggctattccttggacatctttgttgttgatggctgggagtatgaggctgacattctccaaagtgcattgagggaaggcgttgataaaataaagtacagagcatggccgttggtaccgtcgatgtctgctaggatggatcaccaaccattggaggtttctccttcatctgactttgtccagataccagctgatgcagttgatgtttgggaagtcgatctcaggcttctcaaatttgaacaaaaattagcgtctggatcatttggtgatctataccatgggacgtactgtagtcaagatgtagctatcaaagtactcaagcctgagcgggttagcgttgatatgctacgtgagtttgcacaggaagtttatataatgaaaaaggttcgtcacaaaaatgttgtgcaatttattggtgcatgcacgagacctcctgttttgtgtattattacagaattcatgcatggaggcagtatttttgacttcctttacaatagacgaggaaattttcaactcccggatgtgattagaattgcatctgatgtgtccaagggaatgaattacttgcatcagattaatattgttcatagggatttgaagactgcaaatcttcttatggatgatcaggttgtcaaggttgcagactttggggttgcaagggttaaagaccagtcaggagttatgactgcagaaacaggaacctacagatggatggcccctgaggtcattgagcatttgccgtatgatcatagagcagatgttttcagttttgggatagttctttgggagctgctgaccggaaagcttccatatgaagacatgacacctcttcaggcagcagttgctgttgttcaaaaggatctgaggcctactattgctgttgatactcatcctatgctcgctgagctactccagagatgctggcagaaagatcctgctctaagaccaacatttgcagagattgtggatatattgaactctataaaggaggcggttcggagttctgtgcatcacaaaaggcattcatgtcgatctcactccgggagaagacgaggctgttgatgtgccagttttatgtggtgccgcacgcccttttcattttatttttgtagtcgagcgataacttcagaatacggccagaagagcttactgtgttcattccgagaggttttggtaactttattttttttaatttggacttatgcttcaaggattttcatcgttaaaaagcttagaggtgcatatccacgtttacatttggcatgtatctgtatctcgtactcgttttcttaagtttggcaggcaaccaagattttaatgaaaatctttaaccattactcactc

SEQ ID NO: 141456 - DNA, 2154 bp, Zea Mays
accgagcctcccagtcccagtccgcgcgcccggcgcctccctcgagcgcctctgtcctccgtcggccgtcgcactgtgcccccgtccgcctccggcctccgccaacccgcgtccgcccacgactaggcggctctgggcaggtccttccacaaagatgtgaaggattaaagctcatgtgaaagattctaagactacaattggtatcaagcggttgctttcttatttctcatacgctcaaccatgctcctgcatgctaaggattcagttaggaagatgcattcagttgctaagaactactttgtgtctgatcttactcatcctccaagatccttgaacagagcttccagacatgttgttccattcaagacccgtttctttactcattgctcacttgagagccgttcagttgaccaagagattgtgattgctatgggaagcaatgtaggcgatagagtcagtacattcaacagggcattgcagctgatgaaaagctcagacgtgaacatcactaggcatgcctgtctctatgagaccgcccctgcttatttgactgatcagccgcggtttcttaactctgccattcggggcacaactaggctcaggccacatgagcttcttaaactgctaaaggaaattgagaaggatattggccgcactggcggaataaggtacggcccaagacctatcgatctagacatacttctttatggtaactcccagatccatagtgagactctaattgtgccacatgagcgcatccatgagaggtcatttgttttagcacctcttgttgaccttctaggtgcatctagtgacaacggtatcgaaacaagttggcactctctctcaaagtgtagtggaggtttctttgagttatggaataaccttgggggtgaatctataattggaacagaaagcattaaaagggtattacctgttggggatcgtttgttggattggtgtgagaggactcttgtcatgggggtccttaatttgacaccagacagctttagtgatggaggtaagtttctagaagtgggagctgccatttctcaggctaagtcattaatctcagaaggtgcagatatcattgatattggtgctcaatctaccaggccctttgcaaaaagattatctccaaatgaggagcttgagaggttggttcctgttctggatgagattacaaaaatccctgagatggagggcaagttactctcagtggatacattctatgcagaagttgccagtgaagctgtgaaaagaggagctcacatgatcaacgatgtatccagtggacagcttgatccaagaattcttaaagtggcagctgaactgggagttccatatgttgcaatgcacatgaggggagatccgtcaactatgcaaagcgaacaaaatgtacactatgataatgtctgcaaggaagttgctttggagctatacacacaggtgagagaagcagagttatctgggattccattgtggaggctggttcttgatcctggcattggcttctccaagaaatctggacataaccttgaagtaattatgggattggaatccattaggagggagatgggtaaaatgagtataggtgcttcacatgtgccaatattactgggaccttcaaggaaaagctttttgggtgaaatatgcaatcgtgccaatccagttgagagagatgttgctactgttgcagccgtgacagctgggattttgaatggtgctaacattgtaagaatccataatgctggatatggtgtagacgctgcaaaggtttgtgatgcattgcgtaagcgtaagggaagttgcagaaactgaactatctgatcaaactgataccacgctccagttttatacaagaaaaaggtgatgtcgaaaaatgtgatttgtgaagtatcgttgttgtaatgaaccagagataatgctttttcttgtgtcaccaaggaataaagtcaagaagctgcgactcaagttgcattggtcctattcagatgattttgctgaacttattttttgcctatttagtgggtgtttggtttctagggactaatttttagtccctttattttatttaattttagttcctaaattgtcaaatctgtattttgcaatttagggacaaagtgaataaaatgaagggcctaaattgtc

SEQ ID NO: 141457 - DNA, 2208 bp, Zea Mays
taaccagctgcctctcctctctctcctaggctttcagccgctctcctagtctcctactctcctctcagccgtcgccgtcgctctccacaccgctctcctctctcctccgagccgcagctcttctctctccctctcccctgcgtgccgccactgcgggcaccctgcacgccgccgctgcgtggccctacacgccaccgctacgggtgccctacgcgccgccgtcactgctccagctctcctctgtttcccagccaatgccgccgctctaactccccaaggcatcgccccgacgacggctcaacgaagccccgtcgacgcctcgcggacgccctgcgccgcagcgggcgctttacgctccatggcaaggcgcgttagatgcctcaggttccacaggcgccttagcgcctaagcgacgctaaggcggcgcttcagataagcatgcttttgaataagatgtgaaggattaaagctcatgtgaaagattctaagactacaattggtatcaagcggttgctttcttatttctcatacgctcaaccatgctcctgcatgctaaggattcagttaggaagatgcattcagttgctaagaactactttgtgtctgatcttactcatcctccaagatccttgaacagagcttccagacatgttgttccattcaagacccgtttctttactcattgctcacttgagagccgttcagttgaccaagagattgtgattgctatgggaagcaatgtaggcgatagagtcagtacattcaacagggcattgcagctgatgaaaagctcagacgtgaacatcactaggcatgcctgtctctatgagaccgcccctgcttatttgactgatcagccgcggtttcttaactctgccattcggggcacaactaggctcaggccacatgagcttcttaaactgctaaaggaaattgagaaggatattggccgcactggcggaataaggtacggcccaagacctatcgatctagacatacttctttatggtaactcccagatccatagtgagactctaattgtgccacatgagcgcatccatgagaggtcatttgttttagcacctcttgttgaccttctaggtgcatctagtgacaacggtatcgaaacaagttggcactctctctcaaagtgtagtggaggtttctttgagttatggaataaccttgggggtgaatctataattggaacagaaagcattaaaagggtattacctgttggggatcgtttgttggattggtgtgagaggactcttgtcatgggggtccttaatttgacaccagacagctttagtgatggaggtaagtttctagaagtgggagctgccatttctcaggctaagtcattaatctcagaaggtgcagatatcattgatattggtgctcaatctaccaggccctttgcaaaaagattatctccaaatgaggagcttgagaggttggttcctgttctggatgagattacaaaaatccctgagatggagggcaagttactctcagtggatacattctatgcagaagttgccagtgaagctgtgaaaagaggagctcacatgatcaacgatgtatccagtggacagcttgatccaagaattcttaaagtggcagctgaactgggagttccatatgttgcaatgcacatgaggggagatccgtcaactatgcaaagcgaacaaaatgtacactatgataatgtctgcaaggaagttgctttggagctatacacacaggtgagagaagcagagttatctgggattccattgtggaggctggttcttgatcctggcattggcttctccaagaaatctggacataaccttgaagtaattatgggattggaatccattaggagggagatgggtaaaatgagtataggtgcttcacatgtgccaatattactgggaccttcaaggaaaagctttttgggtgaaatatgcaatcgtgccaatccagttgagagagatgttgctactgttgcagccgtgacagctgggattttgaatggtgctaacattgtaagaatccataatgctggatatggtgtagacgctgcaaaggtttgtgatgcattgcgtaagcgtaagggaagttgcagaaactgaactatctgatcaaactgataccacgctccagttttatacaagaaaaaggtgatgtcgaaaaatgtgatttgtgaagtatcgttgttgt

SEQ ID NO: 141458 - DNA, 1044 bp, Zea Mays
gtccccagctcgcgcgacatggcgcccgccgcccggtggtccacgtcccctgtgctcttcctcctcctgctgctcgcggcggccacggcgacgacgaccactacggcaaaggatgggcatccgtcgccgacgccgtggccggagcgtttccacgcggtgctgttcacgaacctgaccaactacacggaagcctccacgggcccgccgctgcgcgtgacggacctctactacgactggccgcggcggcggaacctgaacctggtgcggcaccagctgtcggccgacccgctgtacgacgtggagtggaacaacggcaccggcttctacttcgactccaaggcgtgccgcgtggagcagttccccgtgggcgtgctgccgccgtggtggctctccggcggcggcgccgagtacgtgggccgccgcgtcgcgggcgggatcgactgccacgtgtggggcaaggccggcttcatcttctactacgaggaggcgcgcacggggcggcccgtgcgctgggacttcgtcgacgtgacggggatccagcagttcgtgatgagcttcgaacccggagctgcgctggaggacgacgcgcagtggcaggctcctgcatactgcttcccggacgacgacgatgccgcaaggagcagtggtgaggaggaagctggggttgggcttgaggcggcgagcagattactcaggaagctagcaggagctgcagcaacctattgactgtgttgtgttgtactgtaggatttatgtaccgtattaatttcgagcacaacagatatacttatgttcttgtagtactacctaattgcctagtttcctattgctggcttgctgctcctgttgtaaacaaacagatatacttagtaaattatgaaatcgtgctgtcggcttccggatctccacacacactactttagtttcagaatatatgggcacagctcatacaaaaagaatctctatatcatcccacctattcagcatagcatagattattgcaggggtatgacaattgtgccactgttatcaacctaataatac

SEQ ID NO: 141459 - DNA, 2989 bp, Zea Mays
cgtgattcccagcccaattaacccggaacagaagagaagagctcgccacgccaccggtgggatcgccggacacctacgcgggcctggccttgggatccccggaacgcggggcgtgggaaaccgaggaggagcatgtcgcgggtggcgtcgctgtcgccgtccttgtcgggcgacgaggtggaggtggaggaggaagaggaggacgagggcgtcgacggctaccgcaagggcggctaccacgccgtccgccccggggaccagttcgccgccggccgctacgtcgcccagcggaagctcggctggggcaacttctccaccgtctggctcgccttcgacgtccagtcacagagatacgtggccctgaagatccaaaagagtgcgcctgagtttgcgcaagctgctcttcatgaaatcgagttcctgtcagagatcaccaagaaggacccattgaactgcaaatgcattattcagctgatagatcacttcaagcacacggggcctaacggacagcatatctgcctcgtctttgagttactgggagatagcttgcttaagctggtacagtacaaccggtacaaaggcatcgggcttgatagggtgaggcaaatatgcaagtcgatcttggtaggtcttgactacttgcacaatgagcttggcatcatccactcagatttgaagctcgagaaccttctccttctctcgaccattgatccctccaaggaccccattcgctctggcctcaaaccttgccttgagaggcctgagggaaaccctaacggtgaagctgggattaatgcgattgagaataagctaaagatgagagcaaggagggtgcttgcaaagcttgctgagaaaagaaaatcagctgtggaatcttcacgctcagaaaggagcttgggtggaattgatcttacatgcaagattgtagactttgggaatgcttgctgggccgacaaacaatttacagattttattcagacaaggcagtaccgggcaccagaggtcattctaggtgcaggatactcgttttctgttgacatgtggtcatttgcgtgtatcgcttttgagctcgcaaccggagaaatgctatttacacccaaggaaggccatggatacagtgaagatgaggatcacttggctttaatgatggaactacttggcaaggtgccgaagaagattgcaaccacgggaacacgatcaaaggaatattttgaccgccatggagatctgaagcggataagaaggctgaaattatcatccattgaacgtgtccttgttgacaaatacaaaatttctgaatctgatgcccgggaatttgccaattttctttgcccattacttgactttgcaccagagaagaggccaacagctttaggttgcctaaagcatccatggcttcattataacgaggataaaacttgtcagtctcttaacaataatgatgccaagaacattgacctggcccaaagcccagggagcatcaccagcggatattgtacaaatattgatttgacgagcaaaaaaggcggacccactggaacttgtgataagactgctgatgcaaaatataacaccagaagcattaccagcaatgctaccatgaacactgatgtacagcccaatattggaagcattgctaacggacttgccaaaaatgttgatgtaaatccgaacattggatccatcactaatagagatgccaagagttctgatatgaagccccacattggaagcatcaccatcagtaacgccaaaagctctaatgtaaagctggatacaggtaacatcactgatagaaatgccaaaactgtcgatataaagcccaactctgacatctctagcagagatgacaagagcagtaatgtggacaccaccacttccagtgttatcaacaaagatgcgaagcgcagcattagaagtgtcgttaattcttatatcaagaatttcgatgcaaagtgcaacactggaagcactgctaacagtgatgctagggacccatcagatacgaaatccagcactaaaattgttagtagtgctgataatgctaagtgtgtggacataaaaccgatcagtggaagtgataagagcaatgacaccagtgataagagcaatgacaccgtcgatgctaatgtgaaatccaactctggaattgttgcaaacagtgatgctagcaacaccgatgtacagactaacactggaagtgtcgacagcagcgatgattacagcattgactcaaaaccaaacattggccgggttgctgcaagcatacagaggttggagagcagtatggggaaatacaggtgatacaactcattgtagtgctggcgaaatacctatttttactggcttggatatgttcattgtggagaggctcattcttttgcattaatttttttactattgatttgattgctgaggataataactacttatccagggccgacctttctcaagattgaggatctggcaggtaccagctggcgttattgtatatctctattcctgctgactgtacaaagttttgtatttgcctacagaacttacacggaggtaaatattccccatacataccctggaacaaattatgtcaatgctcacggattgactgcactgagaattacataacattcttttggacattttagtgggtaaacgtggaatctctttgggaatatacttgtacatgcagtagtaacagaagattgctgttcctagtatggtggatgcactggaaggggaagaattatactctgaccagtcacacgtcatctctcttgattatgttcatattctgccctcagtgaaaaaaaagagatttctttatgtcatttaacaaggatcaccatttatctgagcaagggtgacatttttgtttggtttatggtgtgaggtttgcttgtaaaaagcgggacatgtgttgtataaaactattctttgttcattttgtagtgaaacaatcatatagatgaaatgtttttttttcacttta

SEQ ID NO: 141460 - DNA, 2916 bp, Zea Mays
atgtcgcgggtggcgtcgctgtcgccgtccttgtcgggcgacgaggtggaggtggaggaggaagaggaggacgagggcgtcgacggctaccgcaagggcggctaccacgccgtccgccccggggaccagttcgccgccggccgctacgtcgcccagcggaagctcggctggggcaacttctccaccgtctggctcgccttcgacgtccagtcacagagatacgtggccctgaagatccaaaagagtgcgcctgagtttgcgcaagctgctcttcatgaaatcgagttcctgtcagagatcaccaagaaggacccattgaactgcaaatgcattattcagctgatagatcacttcaagcacacggggcctaacggacagcatatctgcctcgtctttgagttactgggagatagcttgcttaagctggtacagtacaaccggtacaaaggcatcgggcttgatagggtgaggcaaatatgcaagtcgatcttggtaggtcttgactacttgcacaatgagcttggcatcatccactcagatttgaagctcgagaaccttctccttctctcgaccattgatccctccaaggaccccattcgctctggcctcaaaccttgccttgagaggcctgagggaaaccctaacggtgaagctgggattaatgcgattgagaataagctaaagatgagagcaaggagggtgcttgcaaagcttgctgagaaaagaaaatcagctgtggaatcttcacgctcagaaaggagcttgggtggaattgatcttacatgcaagattgtagactttgggaatgcttgctgggccgacaaacaatttacagattttattcagacaaggcagtaccgggcaccagaggtcattctaggtgcaggatactcgttttctgttgacatgtggtcatttgcgtgtatcgcttttgagctcgcaaccggagaaatgctatttacacccaaggaaggccatggatacagtgaagatgaggatcacttggctttaatgatggaactacttggcaaggtgccgaagaagattgcaaccacgggaacacgatcaaaggaatattttgaccgccatggagatctgaagcggataagaaggctgaaattatcatccattgaacgtgtccttgttgacaaatacaaaatttctgaatctgatgcccgggaatttgccaattttctttgcccattacttgactttgcaccagagaagaggccaacagctttaggttgcctaaagcatccatggcttcattataacgaggataaaacttgtcagtctcttaacaataatgatgccaagaacattgacctggcccaaagcccagggagcatcaccagcggatattgtacaaatattgatttgacgagcaaaaaaggcggacccactggaacttgtgataagactgctgatgcaaaatataacaccagaagcattaccagcaatgctaccatgaacactgatgtacagcccaatattggaagcattgctaacggacttgccaaaaatgttgatgtaaatccgaacattggatccatcactaatagagatgccaagagttctgatatgaagccccacattggaagcatcaccatcagtaacgccaaaagctctaatgtaaagctggatacaggtaacatcactgatagaaatgccaaaactgtcgatataaagcccaactctgacatctctagcagagatgacaagagcagtaatgtggacaccaccacttccagtgttatcaacaaagatgcgaagcgcagcattagaagtgtcgttaattcttatatcaagaatttcgatgcaaagtgcaacactggaagcactgctaacagtgatgctagggacccatcagatacgaaatccagcactaaaattgttagtagtgctgataatgctaagtgtgtggacataaaaccgatcagtggaagtgataagagcaatgacaccagtgataagagcaatgacaccgtcgatgctaatgtgaaatccaactctggaattgttgcaaacagtgatgctagcaacaccgatgtacagactaacactggaagtgtcgacagcagcgatgattacagcattgactcaaaaccaaacattggccgggttgctgcaagcatacagaggttggagagcagtatggggaaatacagggccgacctttctcaagattgaggatctggcaggtaccagctggcgttattgtatatctctattcctgctgactgtacaaagttttgtatttgcctacagaacttacacggaggtaaatattccccatacataccctggaacaaattatgtcaatgctcacggattgactgcactgagaattacataacattcttttggacattttagtgggtaaacgtggaatctctttgggaatatacttgtacatgcagtagtaacagaagattgctgttcctagtatggtggatgcactggaaggggaagaattatactctgaccagtcacacgtcatctctcttgattatgttcatattctgccctcagtgaaaaaaaagagatttctttatgtcatttaacaaggatcaccatttatctgagcaagggtgacatttttgtttggtttatggtgtgaggtttgcttgtaaaaagcgggacatgtgttgtataaaactattctttgttcattttgtagtgaaacaatcatatagatgaaatgtttttttttcactttaggctggttcagttaggagtggatcggaggggattaagggctactttggtgactagtgaaataaaggggatccctaggggaggaatcccttgctattccctaggatccctttcatttctttaatcaccaaagcagccttgaaaaaaattaaatcccttcctattcaaaattgaataggaatagttttaattctgttc

SEQ ID NO: 141461 - DNA, 3050 bp, Zea Mays
gattcgcctatgatgatttcctctgttctctgccctccggccgccggcgccgccgccggcgccgccggagcgggcgcgccaccgatcatagggtctcggtccagttccctccatcctcctcccccctccgcctcccgtatccacctcccccgcctaccgccgccaccttctccctattcctccagcacacccaccagccccttccccagccacgcttcctccgcactccaacccttcgacgaggttctctcctccatgtccccacgggaacagacctccctcctctcgcggcagcgctgctggcgccgcgccagggacctcttcaaccgcctgcgcgcgctccccggatacgcccccaaccccgtccatgacgccgtcctcctgcgccacctcgcccgcgcgcgccggtgggccgagctccaccgcgcctggatcgggatgcccttcccaccctccaacccggcctacgcagccctcgccgacgcactcgccaaggccgggttggcgcggggagccctcctcctgctccgccacatgcggacccggggtgtcgcgcctgatgaggtgtccatgaacaccttcgtccgcatcctcaaggacgagggccgccacgacgacgcgctcgctctcttccacagttggtgcgacggcaggttcgaggtcgatttccttgatcttgactgcatcacagttgatttggacggtcctatgcagttcttgcttgctgacatgtacgacgacaaaattgctgctcctgctgctggtgttgcaccagagcgtcctaggaagcccaagcttgtggtgacgtataacgtgttgattgatctctatgggaaagctgggaagctgaagaatgcgctagacatgtttttggacatgccagctcatggggttatgccagatacgtatacgttcaatacactaatcaacatatttgggttttctggcaattcagcgcaggcagaggtgctgtttgctagcatggtgattaggggtgtcaaacctgatactaagacatacaatgtaatgatgactgtgtttgcatccattggagatttagagggagttctgaagtactactgtcaaatcaggaatgcaggcttacatcctgatgctgtgacctataggattttgctgcaggtgctatgtgagaggaagatggtacacaaagcagaagatgtgattgaagggattctcaaagctggcagttttgttcatgaacagtcccttcctgttgtcatgaagatgtatgttgatctaggattgcttgatgaggcgattgcattctttgagaaacattgccgaggtaaaggggtctcatccaagaacttcagtgcgatcatggatgtttttgcagggagaggtctgtgggaagaagctgaacatatcttctgctctgaaagaggagatgggaatgagaaggacattgtggaatataatgtgatgataaaggcttatggtcaggcaaagcagtatgacagagtctcttctttgtttgagagcatggaggaatctggtgttccatcagatgagtgcacatataattcgttgattcaaatgttttcttttggtggatttccacacagagctaagaagctgttaggtaaaatgaaagatgcaggatttgaaccgaaatgtgagacatactctgccatcattagaagttattctcgccattgcttggtaccggaggccatagatctgttcaatgaaatgaaggcatcaggtgttgagccgaatgtcattgtttatggaattttgattgacatgtttgcagagacagggaatgttaaggaagcacttcattatagtaacttgttggaacaatctggaatctctccaaaccatattgttctaacttctcttataaaagcctacagcaaatttaattcctggaaggaagcacaggatttgtattcaaggatgaatgacatggatggtggccctgacatcattgcctccaatgccatgctaaacctttatgcaaaacttgagatggtcactgaggcaaaagagatctttgacagcttaagaagaaataaccatgctgatgctgtttcatacactaccatggcatacctctacaagagcattggtttgcttagtgagtccattaggatcacacataaattacaaaaatcaggtttgctatctgattgtgcttcatgcaatgctgttatggcgtgttatggggctaagggcaacctaagagattgtgcagagttagtgcatcaaatggtggtggctaacattccaccagacgcgtcaacatttgaaatgatattttctctactgaaaaatggtcatgtttcaacaaaagaaattttacagctagaatcagcatatgatgatggcaagaagtctgccaagcaagctatcattgcattcttgttctccgtagctggcatgcatgatgctgcattagagatttgcgggaagatgttaatgccacagtcgacattggatgcatgtgcatataatgtttgcttcaaggtctatgcttcctctaggaaggtggaaaaagctttcagtttgttcatgtggatgcgtgatctcgggcttaaaccggacacatctacttgcaaccatttggccacttgttatgggagacttggagcattggaaggcgtgcatacaaatggttttactgaatacagaactagtgagcttagtatgccttcacataagaccatgcccagcagttcactcatatgatcatccaaaacattgttttgcactatagactgcactgtttgcaaactagagtttaaatatgggtataaatataggtaagctgttgaagatagcttaacacactggttgcttgtatagagtctggaaaaataatgttgcagttcagttagttaagaaatgatatgtaccaaacatataggatctttttatactttatacttcacaagaaaggttgacttagttgtaccttccgaaacttgaagcaaacatgtctggtgatcacaagtggactagattcgcttcaatatacagaaagccagataaattggaaaaagattagtatctttacttagtaa

SEQ ID NO: 141462 - DNA, 770 bp, Zea Mays
tgcattcattcatttcatcatcacccgcccggccggccggctccgaatcgaatgaatatgcatgcaaatctggagtattttaatttatttgattgtgttcatggatggatcagagacatgtaggcatgcatgcatgtgcgcacggagatacgttcgtgctgcgtgtgtcttgtcgtactcacatgatgaggacttggttccagaggtggctctcggcggcggcggcggcagcggcggcggcctcagctccacccgcggagtccaggctgagcccggagtggttggtgaaggacgccacggtggcgttggaggccgagagaccgtcggaggacgtcgtcgcccgtccgccatgctgctgctgctgctgcgtcgtcgctgccggcgccatcgataccgggggcggccacctcgccgcgggggacggcggccacgcgccgtaggcagccgggtgctgcatgtcgcgccaccaggaggaggccgacggcggcgtctggggcggcggggagctggcgacggaggcctcagagccctcctgcgccatgcactgcatgcacggcagctggtgcagcgcagcctagctacacgtacctactagctgattagacgactagctgagctccaatccctcgctcttgttgcgccgcgccgtgcagtgatgggggagatcgacaacgaacgagcgtgcatatatgaatgaatttttgcttgcgcgtgcctgtgctgtgtgtgtgtggaggtcaggtgataggaggagaggaccacatcgcagt

SEQ ID NO: 141463 - DNA, 1210 bp, Zea Mays
ccttctccgcggagggccacgggcacggcgacgcatccggcttccggccctcctgtccccggaggtcaccgccgccgtcttcgtgggcggccataccggccacgatgaatagcatcaagtcggctatcttctccggccatcggtcgcacccccacgtgggggcggcggcggtcccgcagcagcagctggggagcaccgcttcgttccactcgacacccattctgcagcggaagcacaagacccagtggcacaacagattcaactattatacgagacgtaggaggaacagagaaactaaaaggtcaatgctacggaacatgtcagaatatgcagagtctctctttcagagttggcgtgatgaagatgagaaaaatgctgcatctgctgggccttcatggtttagaggacatcgttgggtcagaaattcaagcaacaatggtttccgtacacacgatttttattacgggaatttcaaaagcaaaggaggatttgagttttgcacaagtgatgaggatgaaccagagaatctgtttcgtaatgtttttcgagaccagcacacatattattggtctttttcatctgataattttcagaggaactccaaacgtgctcgctcacaaaaatccagaaactggagttttgaaacagacgaggaggatgaagtatcagctccatcagaggtatctttggcacgacaagctcttgggttgagcacttctggtccgcttaaacttgaagatgttaaaagcgcataccgagcatgtgcacttagatggcatccagatcgccacaatggatcatctaagtttttgcctctttcgcataggtcctcactcagcatgcacaagtctacagcggaggagaaattcaagcattgcagtgcagcatacaagaccttatgtgatagtttggccgctgcatagataattttgaatgaagatggactctggatgagccccttccaaactttctagctgcaaattctgaagagctgccacatgcttgtggtagctccgaccatcccaatcccaagaggcgggagtcgcatttcttggttattgaggcgattgagtcaattcaaaattgaccggataatatatgtactgtaccgtgtaaaattttttctcacagctcattgttgtattatttttatagatacgaagatattgttcacaccactcaataaattttcttggctgagttgtatcac

SEQ ID NO: 141464 - DNA, 1249 bp, Zea Mays
ccttctccgcggagggccacgggcacggcgacgcatccggcttccggccctcctgtccccggaggtcaccgccgccgtcttcgtgggcggccataccggccacgatgaatagcatcaagtcggctatcttctccggccatcggtcgcacccccacgtgggggcggcggcggtcccgcagcagcagctggggagcaccgcttcgttccactcgacacccattctgcagcggaagcacaagacccagtggcacaacgtaaatacagattcaactattatacgagacgtaggaggaacagagaaactaaaaggtcaatgctacggaacatgtcagaatatgcagagtctctctttcagagttggcgtgatgaagatgagaaaaatgctgcatctgctgggccttcatggtttagaggacatcgttgggtcagaaattcaagcaacaatggtttccgtacacacgatttttattacgggaatttcaaaagcaaaggaggatttgagttttgcacaagtgatgaggatgaaccagagaatctgtttcgtaatgtttttcgagaccagcacacatattattggtctttttcatctgataattttcagaggaactccaaacgtgctcgctcacaaaaatccagaaactggagttttgaaacagacgaggaggatgaagtatcagctccatcagaggtatctttggcacgacaagctcttgggttgagcacttctggtccgcttaaacttgaagatgttaaaagcgcataccgagcatgtgcacttagatggcatccagatcgccacaatggatcatctaagtctacagcggaggagaaattcaagcattgcagtgcagcatacaagaccttatgtgatagtttggccgctgcatagataattttgaatgaagatggactctggatgagccccttccaaactttctagctgcaaattctgaagagctgccacatgcttgtggtagctccgaccatcccaatcccaagaggcgggagtcgcatttcttggttattgaggcgattgagtcaattcaaaattgaccggataatatatgtactgtaccgtgtaaaattttttctcacagctcattgttgtattatttttatagatacgaagatattgttcacaccactcaataaattttcttggctgagttgtatcacaatttaggtttggatgttttccgtgggttgcatttgtcagtgttcaatgaaggtcatacatttagatattgcc

SEQ ID NO: 141465 - DNA, 1143 bp, Zea Mays
cggcgacgcatccggcttccggccctcctgtccccggaggtcaccgccgccgtcttcgtgggcggccataccggccacgatgaatagcatcaagtcggctatcttctccggccatcggtcgcacccccacgtgggggcggcggcggtcccgcagcagcagctggggagcaccgcttcgttccactcgacacccattctgcagcggaagcacaagacccagtggcacaacagattcaactattatacgagacgtaggaggaacagagaaactaaaaggtcaatgctacggaacatgtcagaatatgcagagtctctctttcagagttggcgtgatgaagatgagaaaaatgctgcatctgctgggccttcatggtttagaggacatcgttgggtcagaaattcaagcaacaatggtttccgtacacacgatttttattacgggaatttcaaaagcaaaggaggatttgagttttgcacaagtgatgaggatgaaccagagaatctgtttcgtaatgtttttcgagaccagcacacatattattggtctttttcatctgataattttcagaggaactccaaacgtgctcgctcacaaaaatccagaaactggagttttgaaacagacgaggaggatgaagtatcagctccatcagaggtatctttggcacgacaagctcttgggttgagcacttctggtccgcttaaacttgaagatgttaaaagcgcataccgagcatgtgcacttagatggcatccagatcgccacaatggatcatctaagtctacagcggaggagaaattcaagcattgcagtgcagcatacaagaccttatgtgatagtttggccgctgcatagataattttgaatgaagatggactctggatgagccccttccaaactttctagctgcaaattctgaagagctgccacatgcttgtggtagctccgaccatcccaatcccaagaggcgggagtcgcatttcttggttattgaggcgattgagtcaattcaaaattgaccggataatatatgtactgtaccgtgtaaaattttttctcacagctcattgttgtattatttttatagatacgaagatattgttcacaccactcaataaattttcttggctgagttgtatcac

SEQ ID NO: 141466 - DNA, 1191 bp, Zea Mays
gccttggactttgactcgcggcagtcaattgttctgatttcctcgtcggctcatcctttccccgaacccctcgtcagagtctcgccatgcgctcgacccacctcgtcgacggcgaccttgcttcggcctcggcgatgggaggccactccgaccgtctgttcagggcgctggctgtcgcttccctctacattcttatccgccggtggcgcgcctttggggtcggcctcagcgagcggccggcgccggcggagatcgctgccgtggctgcgctctgcacctccgtggcgtggctgtacgttctcccagcccttggtctccgccggagcacgcaccgacgtcggcaccaagattagttgacaagtggctgttgttgcgttgctggtaaccatccctattctccctcttttttaaggtttggatttggaatccaatttgtcaaacacagcccgaggaaatgtatgtgtaagtacggatacgaatggttgaaatattagtcactaagaatgatcatgtaagtacggatctaacggtccagttcaagattgggctgatcccaactgttcaatgatttactggttcatatgtcagtgtatagacatggtaacctcaaaccagttacctgtatggtcaccagtgactggacaaagagaatttctcaaggttgtttgttaatctcctgcttttcttcaagtgactatttctaacttacagttcaaatactttgcctaggacctttaagtcgctaaacagtctcaactcttaacacaacttacacaggttgacaggtagttatcataatcatgatgattatgcccaagcccattcaagagcgtccacttccacacccttgtcgtgcaaagtgacacctctctctccctctctctcaccaggaagctaagccctaagcatcctatagttgttcacaatttactacaaaaaatgaagtataaagtataaacatgactatttgatacttcacatctcgctggtagatggttcaatcacaatgtgatttcgcacaattacttagactctatgcttccatgcctcactctggttttgttccacttgattctgatataactgaagtttccaatgctgcctatccccaagcacttacccgtttcacagaaggaatatgtttctttattttattcataaattatgcacaaagaactccagaagggggag

SEQ ID NO: 141467 - DNA, 1026 bp, Zea Mays
accgtaccatcaattgacatccaaactatggctctgttcaagtgcatgtgtgtcttcttagtctcgcttctgctcaccctcaccttcaccaacgcccagggtggagcttcacagcggacgctcccgccatttccctgcatcccaggccagcaacgacccccatggctgccaccctgtccgccgccgccagctgagtgctacacatccctatcagggctgaagccatgcgtggacttcctcacccacaccggggtgccaccggcgccacccacgagcgcctgctgcgacggtctcaggtcgctcgtcactgacgcgcccatctgcctgtgtcacgtcgtcaacggtgacatcaacgagcttctgccgacgcccatggtacccgtgcgcatggtggcgctcccccgcttgtgtgctgtccccttcccacgtgccacgctccgccagtgcatcagagggcatgtgccacctatgaccccacctccaccagaagcatcaccgccggaatcaccatcgactctaccagcatcatcatcgtcaactctgtcagcagcatcaccaccgacaccaccagcatcatcaccgtcgtcgactaactccaccagcgacatcaccgctagagtcaccgccaactccaccaacaacatcgccaccggaaccgccgtcgactcaaccaccggagtcaccattgactccaccgccgacactagtgacggcgccaccggaatcaccgtcaaatccatcgtcgacgacagtagctatgccaccggcgactccatccccatcatcttaatcacgacacatattttaaaagtagtagtacagtctagtaaaaatagatatgcattttaggattttagctgataggcgttattgttccgttcgcatcgtatgcagcagtgtgttagctataattagttgtatacctattattactaagttttttttagaagtatctgtaataatatttaagatctttctcatccataaaatatatacaaggacatcactgatgtattattttatata

SEQ ID NO: 141468 - DNA, 1071 bp, Zea Mays
caggtgtagtacgatatgttgtggttgcaaaggtatatgcgtcttcgcactatgcaggcctagtgcagtacgctctgatagatcgagcacgaccctgcttttgtttgggcggcctgctccgatctattgattggtatgccaattgccaaccaatatatatacaactgttagagcttccctcagcccatgcggtggggctcggtggtgaggtctggtcgaacacccgaataataaaaaactatggttatgcttactgcgaactggggtgtaagaacagagtaagcatcctgttgtcatcatcattagccgaaagcaggtaccttagagcaatgtggttactgcgtttgaataatatgccacgcaatgacgcagtactgttcatcatttagggtcgcatgtgcctgtcgttgtcacattgctttgcacccgcaccctccatgatcgataaatgagggaacagcagtacaactcacacctatcggttacgaacttgaacaattgccaaagttgcagtcaccaaacttgttgagcgtgcaattcaagcatgtcctacagtcgtgcatgccatgcatggtaatattgtgacaatttgatatattcatctccacctgtcatgcatggtatcgtgcaggccatcggccgggaggcccgggcgctatacaacctgggacaggcggaggggctcactatctggtcacccaacgtgaatatcttccgtgacccgcgctggggccgcgggcaagagacacccggcgaggacccggcggtggccagcaagtacgccgtcgccttcgtccggggcatccaggggagcaaccccgccggcgcggcggccgcgccgctccaggcctccgcttgctgcaagcacgccacggcctacgacctcgaggactggaacggcgtggcgcgctataacttcgacgcccgggtgacgctgcaggacctggccgacacgttcaacccgccgttccagagctgcgtcgtcgacggcaaggccagctgcgtcatgtgcgcctacactgtgatcaacggcgtccccgcctgcgccagctcagacctgctcaccaagac

SEQ ID NO: 141469 - DNA, 1438 bp, Zea Mays
aaaacaccagtggccctacgcccaggccctttttccccgctctgctctgcacgcccctctcctccctagtccctccccctacccccgcccgtcaaagcgagagcgccgtatcacctgtctctccgtccaccgccgtctcgatccgcgcccaaagatacctttcccccaccccttcctcgcgccgccgttttggtgcgaccatgacggcggagggggaggccaagaacccgtcggccggtggcggaggggataacccccagcaccagcaggctgcgccggcgccggcgccggcacagggggaagtggcgcaggaggctgcagtgcaggggacgggacaagagcaggagcgggacaaggcggatcgagaggtgcagggcggcgcgggggagaaggacgacggcgcgtgcagagatctggtcctggtcgaggatccggaggtcctcgccgtcgaggatccggaggaagctgcagcaaccgcagcactccaggaagaaatgaaagcgcttgtggcatcgatccctgatggtgctggagcagcattcacagccatgcagcttcaggagctagagcagcagtcccgggtgtaccagtacatggctgcccgagtacctgtgcctactcacctcgtcttcccggtatggaagagtgtgaccggtgcatcctctgaaggcgcccagaagtaccctactttgatgggcttagcaacgctctgcttggactttgggaagaacccggaaccagaaccagggaggtgtcggcgaacagatggtaagaaatggcgatgttggagaaacactatcccaaacgagaaatactgcgaacgtcacatgcatcgtggccgcaagcgtcctgtacaggttttcctggaggacgacgagcccgattctgcttcagggtcaaaacccgccgctcctggcaaggctaccgaaggtgccaagaaggccgatgacaagagcccaagcagcaagaagcttgcagtggcagcgcctgccgctgtgcagtctacatagtcaattgcagctttagtagcccgcagaaagagcataacagcgctggcaactggcgccttcttattgcatgtaatccccagaagactctagcgtggtcgtggtcgtaggtataacctcgttcccagcgtctgtgggaggaagccgcaacaacttccccttagctgtcaactgaaaatttcactctttaggtgtatagtttgatttagctttgtcgcggtaggcgatgcggcatgatattataaatcctgcctgaactgacaagacaaaatcgaattgtgacccaagaagccggcggaagaacttgtgaaattgcattgacgtgctttttggtgtccgcctttattgggctgtgcgcaattgtgtgattcatcagttgtataacgaagtgtaagatccataattttatgccttgtggaggttaccacctg

SEQ ID NO: 141470 - DNA, 1415 bp, Zea Mays
cctttttccccgctctgctctgcacgcccctctcctccctagtccctccccctacccccgcccgtcaaagcgagagcgccgtatcacctgtctctccgtccaccgccgtctcgatccgcgcccaaagatacctttcccccaccccttcctcgcgccgccgttttggtgcgaccatgacggcggagggggaggccaagaacccgtcggccggtggcggaggggataacccccagcaccagcaggctgcgccggcgccggcgccggcacagggggaagtggcgcaggaggctgcagtgcaggggacgggacaagagcaggagcgggacaaggcggatcgagaggtgcagggcggcgcgggggagaaggacgacggcgcgtgcagagatctggtcctggtcgaggatccggaggtcctcgccgtcgaggatccggaggaagctgcagcaaccgcagcactccaggaagaaatgaaagcgcttgtggcatcgatccctgatggtgctggagcagcattcacagccatgcagcttcaggagctagagcagcagtcccgggtgtaccagtacatggctgcccgagtacctgtgcctactcacctcgtcttcccggtatggaagagtgtgaccggtgcatcctctgaaggcgcccagaagtaccctactttgatgggcttagcaacgctctgcttggactttgggaagaacccggaaccagaaccagggaggtgtcggcgaacagatggttttcctggaggacgacgagcccgattctgcttcagggtcaaaacccgccgctcctggcaaggctaccgaaggtgccaagaaggccgatgacaagagcccaagcagcaagaagcttgcagtggcagcgcctgccgctgtgcagtctacatagtcaattgcagctttagtagcccgcagaaagagcataacagcgctggcaactggcgccttcttattgcatgtaatccccagaagactctagcgtggtcgtggtcgtaggtataacctcgttcccagcgtctgtgggaggaagccgcaacaacttccccttagctgtcaactgaaaatttcactctttaggtgtatagtttgatttagctttgtcgcggtaggcgatgcggcatgatattataaatcctgcctgaactgacaagacaaaatcgaattgtgacccaagaagccggcggaagaacttgtgaaattgcattgacgtgctttttggtgtccgcctttattgggctgtgcgcaattgtgtgattcatcagttgtataacgaagtgtaagatccataattttatgccttgtggaggttaccacctgatgtgcagtgattatgtcattatgatgatagtagggcaaatgtaattggctgattgaatgacaaagcctgtttattgagacggattggcagtg

SEQ ID NO: 141471 - DNA, 247 bp, Zea Mays
atctagcatataatttatttaagttatagactttttgtgttcaagtgaatgaataagcgaaaagtaaatgttataattattttaactaatatgaatgatgaaaaagagttgtctgtgtatttctaaatcttaaaaattaggcaatacatcactttattatgtttttgttaaaactacaaaatagttatctttccgactatagattatcgttttcgatcgttttcaaataaccaacaattttgattcc

SEQ ID NO: 141472 - DNA, 2185 bp, Zea Mays
ccgctcacgagcactgaaaaactgccaaaaccgagcgaaccacacaccccttgtcaacgctgtggcggcacggcaggcgatccaaggaaagcgatgacggcgtacgaccccaaagacgacgtcgaccgcctcttcgcctgcttcaaatgcggcgtctcccctcccaagtcggccttcagggagaggccgctcccgcaggccaagaagtcgcggggctcgcccgtgtcggagactgccggtagcggtggccggagctcctccgatgtttccaccacgccggatgccgcagcggacaagcgcgcggcgccgtcgtcggccaaatctacaggccgcaagcacatgtccccattcgtgttctacggctccccgcggggcgtccaagtcaaaaggccgcagagcttcctgaggctgctgcacgtgatccgcattgatctcaagaagcaaaccgacttcaaccccagggatgttgtctgggctacatttcctaggcaagacgaggcgatcaggttctctaaggcatacgcacataccaatgtcttttgctatcaagagcatatgtccggtacgcgaaggttccttgtgtctacatacgacgagttctggaaaaggtacaacgatatggattccaaaattcgccatcattatgaggttatccaggaggcttcgccttgccacatttactttgatcttgagtttgatacaagattgaacaagaagagagacacagatgaaatggtggatatattgattgctgttgtattcagtgctttgcgtgataaatattctattgaaggacatgaagagtggatcacagagctagactcatccactgaagaaaagttttcacgccatctaatcattcgtatacccaagattgcatttaaagacaactcccatgttggtgcgtttgtctgtgaggtctgttcacaaattgcagctcagcgtacaaccaatcatgaccttgataaactttatattacaaaagaaatcagctcaggtcctgttgatcggctctttatggatactgcagtttactctcgtaatcgttgtttccgtttagttttctcatcaaagtctgggaagaaatcatttcttgtgccgaccaaacgtttcaaatgccaggaactgaatgataaagatgtctttatggagtcacttatttgtagactggatgataactgtgaaaaactgttgatatgcaaactagacttggaatgcaagaaaacattgcattttgactctgaaatcagcatgtctcaaattcaaggaaggagctacaggcaccgcattgctacatatcaaaatgatttttctcatgcatatacttgtggaaaatctccttttccacctttggatggttttatagaatccatcgcttcttttggaaatgtttcagggaaaattcgatcttggttctggttttcacaggagagtttgataatctacaacatgttacgaagcagatactgtgagaatattggaagagagcataagggcaatcatgtgttttacattgttgatttccagagagcagcatactaccaaaagtgtcatgaccctgattgtcgaggttaccgttctcccctgcgtcctgtaccttgggatgtgattcctgagctagtggagtcagaccagatagaataccagggccatgccatggaaaccaacattgaaaacagcagcatgagcggtaaatcaatcacgggggctggtgctgaggatcctgaatggtgggaacaagtggtggaatttgcggacagcatcgagaacatggatcattctttggctaccttggaagtgaaatctgacgccagcatcgagaacatggatcatgctcccagcttgtgtgcctcggaagaaaacggttgttttgaagctgaccctgagtgggtgatgcacgcggaaagagccatggagcagtacgaggaacaaagcggaggatcgcagtcacacgcaacttcccaagtctttgatctcgaggatgtttaacagtagatgctgttctaaacaatttgaacagtgacttgtaaatatacgttttatgatatattttaatctaaaaatatgtagataaataataaaaatggatattatgaatgaagcagtgagaacataatctgtatacgtgttcatgttttaacatcgtgttaacataaacaatataaaacaagaagttttaggaagt

SEQ ID NO: 141473 - DNA, 1110 bp, Zea Mays
tatctcctatctccagcagctcctccagacctccacctctctatggcgcgcctgctcctcttcccatcccaagcgtgcgtcgatcctggccgccacctcctcctccacccgccggtctccaggccccgtgctgtccggtctgggcctcctcccgccgcgccacgccgcaccggggtcgtctctcttcccggccgttgcccaccgcccctttgctggaaccaccatccatttcttccttatcatcaaagagaggatgggtcgtttttgcttcagaaaacgtacaagaaatttcttctcaccttcctcgcaaggatgaaaggagaagtgggaatttgcttctgcgattcagtgcactcccatattgcactatggcttggttgagcactgctcaattagcacaatctagtgttggggaaaagctaaatatggtttatgaggtcggggagctgtttgagctgggaattcagctgtcttatctgctcatacttattggactgcttggagctggtacattttttgttatccgtcaggttcttgttcgtagggagcttgatctttctgccaaagagttgcaagaacaagtgagaagcggtgatgcaagtgctactgagtattttgagcttggagcagtcatgctacggagaaaattttatccagctgctatcaaatatctgcagcaagcaattgacaaatgggacagagacgagcaagatcttgcgcaggtctacaatgccctgggggtcagctacaagcgagagaacaaacttgacaaggcgattcagcagtttcagaaggccgtggagctccagccaggctatgtgacagcttggaacaacctgggtgacgcatatgagcagcagaaggacctgaaatcggctctcaaggccttcgaggaggtcctcctctttgatcccaacaacaaggttgcaaggccacgcgtcgatgacctcaggccgcgcgtgagcatgtacaagggtgtgcctgtaaaatccgaaaagcgatagctattcttttttggtggtaaatcatgcatctgtctagtccccagaatagcggttgtttatttttgaacggtagcatttgtaaacatgatgagatgtgtagtagcat

SEQ ID NO: 141474 - DNA, 1114 bp, Zea Mays
tatctcctatctccagcagctcctccagacctccacctctctatggcgcgcctgctcctcttcccatcccaagcgtgcgtcgatcctggccgccacctcctcctccacccgccggtctccaggccccgtgctgtccggtctgggcctcctcccgccgcgccacgccgcaccggggtcgtctctcttcccggccgttgcccaccgcccctttgctggaaccaccatccatttcttccttgcagatcatcaaagagaggatgggtcgtttttgcttcagaaaacgtacaagaaatttcttctcaccttcctcgcaaggatgaaaggagaagtgggaatttgcttctgcgattcagtgcactcccatattgcactatggcttggttgagcactgctcaattagcacaatctagtgttggggaaaagctaaatatggtttatgaggtcggggagctgtttgagctgggaattcagctgtcttatctgctcatacttattggactgcttggagctggtacattttttgttatccgtcaggttcttgttcgtagggagcttgatctttctgccaaagagttgcaagaacaagtgagaagcggtgatgcaagtgctactgagtattttgagcttggagcagtcatgctacggagaaaattttatccagctgctatcaaatatctgcagcaagcaattgacaaatgggacagagacgagcaagatcttgcgcaggtctacaatgccctgggggtcagctacaagcgagagaacaaacttgacaaggcgattcagcagtttcagaaggccgtggagctccagccaggctatgtgacagcttggaacaacctgggtgacgcatatgagcagcagaaggacctgaaatcggctctcaaggccttcgaggaggtcctcctctttgatcccaacaacaaggttgcaaggccacgcgtcgatgacctcaggccgcgcgtgagcatgtacaagggtgtgcctgtaaaatccgaaaagcgatagctattcttttttggtggtaaatcatgcatctgtctagtccccagaatagcggttgtttatttttgaacggtagcatttgtaaacatgatgagatgtgtagtagcat

SEQ ID NO: 141475 - DNA, 859 bp, Zea Mays
atcgcagctccccttcgatgtcgcacgcccgcgcctccccgctgtggcgctgtcccctccctggcacccaccctcacaaagcatcagcctctccaatcagacgcgagccacccaccgcgcgacctcagggtgcctgtgcctgctcccgctgttccttcctcatggccaccgcctgccacctcgccgcgccgctcggcctcgccccgttgccccgcggctgcgcctctgctggcgtcgtggccgtcgtccggtgcgctcggtcgtcaggctccaagatcccgagaggcgttgctgtcagggcgacgtccggcggcgagggcgccacggaggaggtgccggagattgtgaaggctgcgcaggacgcgtgggacaaagttgaggacaagtacgccgtggccaccatcggtgtcgctgccatcgtcgcgctctggacggtagtaggtgccatcaaggccatcgacaagcttcctcttctgcctggtgtccttgagattgttggaattgggtatacagggggaggctctgatcggcaaaatcaagagcacttacaaagaaatcaccgggagcagcaactgatcgaacatcatttacaagatgggttcttaagcatatggtagaattgcatccgtaagcactgaagctgccatgcaagtgaaagtgcttctggtcccgacctcagtcagagaaaaaaaactctgcagttgagcaagccgttttactttgtttcagtgtaatatttatgacgtattcccagttctttttccggactactgtttactacgaaaatcccgatctgtgtaaaaatgtgctgcaacaaattcaaaagaaaacacaaatagtacaacctcatgatgttcgt

SEQ ID NO: 141476 - DNA, 897 bp, Zea Mays
atcgcagctccccttcgatgtcgcacgcccgcgcctccccgctgtggcgctgtcccctccctggcacccaccctcacaaagcatcagcctctccaatcagacgcgagccacccaccgcgcgacctcagggtgcctgtgcctgctcccgctgttccttcctcatggccaccgcctgccacctcgccgcgccgctcggcctcgccccgttgccccgcggctgcgcctctgctggcgtcgtggccgtcgtccggtgcgctcggtcgtcaggctccaagatcccgagaggcgttgctgtcagggcgacgtccggcggcgagggcgccacggaggaggtgccggagattgtgaaggctgcgcaggacgcgtgggacaaagttgaggacaagtacgccgtggccaccatcggtgtcgctgccatcgtcgcgctctggacggtagtaggtgccatcaaggccatcgacaagcttcctcttctgcctggtgtccttgagattgttggaattgggtatacagggtggttcacataccgtaacctcgtcttccagccagacagggaggctctgatcggcaaaatcaagagcacttacaaagaaatcaccgggagcagcaactgatcgaacatcatttacaagatgggttcttaagcatatggtagaattgcatccgtaagcactgaagctgccatgcaagtgaaagtgcttctggtcccgacctcagtcagagaaaaaaaactctgcagttgagcaagccgttttactttgtttcagtgtaatatttatgacgtattcccagttctttttccggactactgtttactacgaaaatcccgatctgtgtaaaaatgtgctgcaacaaattcaaaagaaaacacaaatagtacaacctcatgatgttcgt

SEQ ID NO: 141477 - DNA, 92 bp, Zea Mays
gcatcactccgaaggcacatgacgacctttatcgatggtttgacgatgatgacgcgctggaagaagcaatgggtggagagtacgttctttat

SEQ ID NO: 141478 - DNA, 820 bp, Zea Mays
aaaatttcgcaaaatctagtgttggaatataattagtgcaatcagcagggtctcttgtgcaaacaccccgtccactgcacagccaattccccatcgcgataggcccgttcgcacgaatcactgctctgctttcaccccccgcatcgaacctcacccccgatctgatcgaatcgaaggctgcggcggcgatgggcggtgaccatggcggtgggcacgccggcggcgacttccgccagaaggtatggagcatgacgggcggcccgtactgccgccccgtccactggcgccgtaacaccgccatcgccatgttcggcgtcttcctcatctgcatccccatcgctatgaagtccgcagagctcgagcaacgcccgcatcacccagtccggccaatcccatctcaactgtggtgcaaaaactttggtaagaaggaatactgaaggaccctccaactagcatgaagtgcgggcaccttgcttttgccttctttttgtggaaacctgtgcctagccataatgctgggttaagtgttaggagcatctctggaatgcttcgcgtagtatcttttgattcttctttccttcgtgttacatgtgaaatgcctgatgaactcaaataatgaccggtgatacaaaagcctgtgatgaatttactcgagggttttgatcatgtaattgtaaacatggcatgtcgtctgcacacttaatgttgaagcttgattcataagcctcgtgtatgtgtggttggctgacggttatggtgtgcctacgtgtcaaggttcgttttcagaagtgattttttagggtgtttggttcccacctcc

SEQ ID NO: 141479 - DNA, 187 bp, Zea Mays
tttgagttcatgtgacttattttagaaacttgagctcacaaactttctcttatttagtctctacatgttggaattatgtcattctataatccatgttcgttcagtcagtcgttgtgaactctcttctaatcgctcacttcattggtcgtgttgtaacaagacatattagatggagtaaaaataacat

SEQ ID NO: 141480 - DNA, 3067 bp, Zea Mays
agggagcccagacaattcaaatccctactagccgagggccgaggcttccgtttgaagactgggcgtgcggtcctcctccgggcggggctctcgcgcggagagatctccgagcatccttgctactcccgttgtaaagggatgggtgggcaaggtacaggaaacactgtctctgttcccctgctagggaaggcactgtccctctccttgtaagttttcctgtgagctctctgctgctgttcaaggagctttatccggtgatagtatcaaagcaccaagatgaagtccagcgcggttactacaaagggcaaggctatatttgagctcaagcacaagctggtacaagctgttaacaagattgcagacagagacacttaccagattggattggatgagatcgagaagatggcggataccctggcccctgacatgattggccccttcttgtcatgtgtcattgacactgatgctgagcagaagagtgcagtgcggaaggagtgcatcaaggtgattggcacactggcacgactacatggaaacctattggcacctcacatggcgaaaatggtgtccagtgtagttaagcgcctgaaggacaccgattcagttgttagagatgcatgtgttgacacttgtggtacccttgcaatgtgcgccagaagttatggggatggtggtgcagcgttggtgacattggtgcgccccttgtttgaatcactgggtgaacagaataggtatattcaggctggggcagcactgtgcctggccaaggttatagatgagagcaattacttccctgggcctgtgctcccgcagatgcttgttcgtgttgttaagctgctcaagaacccccacttcatggcgaagcccgctgcgattgacttgataagaagcattattcaggctgaaggtgcttccacagagcaggcattatcatcagctctaacaagtattatggatgcgctgaagagtactgactggaatacaaggaaggctgcctcactagctctttcaagtattgcggtcagttctgggtatttggttacctctttcagaacttcctgccttcgctcccttgagcgtagtaaatttgacaaggtaaaaccggtacgtgacaccattatacatgcaattcagctgtggaaagctattccagggtctcatactcctgaaccatcagaagctgggtcatcaacaaaagagaactactttggagaccatcatgacgccagaagtatacatgatggaggatcaagagatacttcttttaggagaacagatcatgggccttctgtatctgttatcagtggtagttctctcagttcagcaaagcggaggtctcctttatctattaacaaagtagccataaacaatgctgcaaatttgcaacggatgaagactggtgattggcgtgttgaggtgtcagttccaaagcagagtatgataccgctggttaataatgacgagaagggatccagtaaagcctgcagcctaaaagatacaaagagaaatgcatatgaaagtgttgatgtagacagtaagtttgactatgacattgtagatgataaacaagaatgctcctctgtgtcagaagtagccagcaggagttttgagacaaagcatgtcactactgctcaggaatgcactgaagattgtgattcagcagaagttacagaacaatgtcccaggggtcgagaaagtaagagcataggctcaacaattacagatgttactactcatgacacacatagttgttgtctgaatactatgaatgaattggcccttgttaggaagcaacttcaagagatggagaggaagcaagcaaatttttttgatttgttgcaggaatttatggccagctcagcagagaacatgtcagtgctaaatttgaaggtgcacaacttggagaatgctgcagacaaaactgtatatacaattactcagagcgaaagccggtatcatcttcctggctccaagcattttaagaaccaaagcgtctcttctttgcctaggctttcgacttctacacctagatcatctatggatgttaactacaagccaccaccaatctcagagttgaaacatgagaagtggatgcgtgatctaccatctcggggctcaaacatgtgttgtaaagagggagctgattttcgaaaggatcatgttcgcagtaaagttaggaagcttgggcctgtgagcttagagggtaacttgggaagatgtgatccaagctcagcaagaagtcgaacatcaggggttaaagggacttatccagtttcatttaccagttcctgtgaacaatctggactgcgaaatgcattgtgcacctcaaatcaacctggtgagtttcaagatactgatggcatggaacctgcatacatggaagccctgaactgtggtgattatgatgatctgattgacctaatggatagaactggaccagttctcgaaaagttgtcgtgtgagacgacaaatgagcttttgagggttatagctgaacaatttcttaataagaagttctttgacttggcactgccttggcttcaacagttagcagatttaagcacgatttataagccaactcaactttttgcatctgtgagagcacaaaaggagttcctttctgcattggaggaagctgcaacgggtggatctatggaaccagccttgaggattgcaattgcacagctcggatttaaactatccaaagcttttgaggttggcccatgcaggaaaatctcagccagaatgtgcagagaaaatgaaactatcatgaccaatgcaatgtgagatgtttcttgtctagtatatgctcaggccacgaaaacagtgctttagggagcttaagttaatttcttgtagcagcacaacctttgtaacttgtcgtatgatctgtttaattagcgtgtgaaaggctagaagatttcaatagaggttgatagtttggtagtttaaaacatgcgtgctttggttctctactgtaggactggaaacttttgctgtgtagcaatgtggcatgacttatgtttggtgctttcagacggggccgtacagatttttgcttgaatta

SEQ ID NO: 141481 - DNA, 3133 bp, Zea Mays
agggagcccagacaattcaaatccctactagccgagggccgaggcttccgtttgaagactgggcgtgcggtcctcctccgggcggggctctcgcgcggagagatctccgagcatccttgctactcccgttgtacggcacgcgggagtggggatggaaccggcgatttcaaaaatttccctcccacccaatgatcaggtaaagggatgggtgggcaaggtacaggaaacactgtctctgttcccctgctagggaaggcactgtccctctccttgtaagttttcctgtgagctctctgctgctgttcaaggagctttatccggtgatagtatcaaagcaccaagatgaagtccagcgcggttactacaaagggcaaggctatatttgagctcaagcacaagctggtacaagctgttaacaagattgcagacagagacacttaccagattggattggatgagatcgagaagatggcggataccctggcccctgacatgattggccccttcttgtcatgtgtcattgacactgatgctgagcagaagagtgcagtgcggaaggagtgcatcaaggtgattggcacactggcacgactacatggaaacctattggcacctcacatggcgaaaatggtgtccagtgtagttaagcgcctgaaggacaccgattcagttgttagagatgcatgtgttgacacttgtggtacccttgcaatgtgcgccagaagttatggggatggtggtgcagcgttggtgacattggtgcgccccttgtttgaatcactgggtgaacagaataggtatattcaggctggggcagcactgtgcctggccaaggttatagatgagagcaattacttccctgggcctgtgctcccgcagatgcttgttcgtgttgttaagctgctcaagaacccccacttcatggcgaagcccgctgcgattgacttgataagaagcattattcaggctgaaggtgcttccacagagcaggcattatcatcagctctaacaagtattatggatgcgctgaagagtactgactggaatacaaggaaggctgcctcactagctctttcaagtattgcggtcagttctgggtatttggttacctctttcagaacttcctgccttcgctcccttgagcgtagtaaatttgacaaggtaaaaccggtacgtgacaccattatacatgcaattcagctgtggaaagctattccagggtctcatactcctgaaccatcagaagctgggtcatcaacaaaagagaactactttggagaccatcatgacgccagaagtatacatgatggaggatcaagagatacttcttttaggagaacagatcatgggccttctgtatctgttatcagtggtagttctctcagttcagcaaagcggaggtctcctttatctattaacaaagtagccataaacaatgctgcaaatttgcaacggatgaagactggtgattggcgtgttgaggtgtcagttccaaagcagagtatgataccgctggttaataatgacgagaagggatccagtaaagcctgcagcctaaaagatacaaagagaaatgcatatgaaagtgttgatgtagacagtaagtttgactatgacattgtagatgataaacaagaatgctcctctgtgtcagaagtagccagcaggagttttgagacaaagcatgtcactactgctcaggaatgcactgaagattgtgattcagcagaagttacagaacaatgtcccaggggtcgagaaagtaagagcataggctcaacaattacagatgttactactcatgacacacatagttgttgtctgaatactatgaatgaattggcccttgttaggaagcaacttcaagagatggagaggaagcaagcaaatttttttgatttgttgcaggaatttatggccagctcagcagagaacatgtcagtgctaaatttgaaggtgcacaacttggagaatgctgcagacaaaactgtatatacaattactcagagcgaaagccggtatcatcttcctggctccaagcattttaagaaccaaagcgtctcttctttgcctaggctttcgacttctacacctagatcatctatggatgttaactacaagccaccaccaatctcagagttgaaacatgagaagtggatgcgtgatctaccatctcggggctcaaacatgtgttgtaaagagggagctgattttcgaaaggatcatgttcgcagtaaagttaggaagcttgggcctgtgagcttagagggtaacttgggaagatgtgatccaagctcagcaagaagtcgaacatcaggggttaaagggacttatccagtttcatttaccagttcctgtgaacaatctggactgcgaaatgcattgtgcacctcaaatcaacctggtgagtttcaagatactgatggcatggaacctgcatacatggaagccctgaactgtggtgattatgatgatctgattgacctaatggatagaactggaccagttctcgaaaagttgtcgtgtgagacgacaaatgagcttttgagggttatagctgaacaatttcttaataagaagttctttgacttggcactgccttggcttcaacagttagcagatttaagcacgatttataagccaactcaactttttgcatctgtgagagcacaaaaggagttcctttctgcattggaggaagctgcaacgggtggatctatggaaccagccttgaggattgcaattgcacagctcggatttaaactatccaaagcttttgaggttggcccatgcaggaaaatctcagccagaatgtgcagagaaaatgaaactatcatgaccaatgcaatgtgagatgtttcttgtctagtatatgctcaggccacgaaaacagtgctttagggagcttaagttaatttcttgtagcagcacaacctttgtaacttgtcgtatgatctgtttaattagcgtgtgaaaggctagaagatttcaatagaggttgatagtttggtagtttaaaacatgcgtgctttggttctctactgtaggactggaaacttttgctgtgtagcaatgtggcatgacttatgtttggtgctttcagacggggccgtacagatttttgcttgaatta

SEQ ID NO: 141482 - DNA, 3133 bp, Zea Mays
agggagcccagacaattcaaatccctactagccgagggccgaggcttccgtttgaagactgggcgtgcggtcctcctccgggcggggctctcgcgcggagagatctccgagcatccttgctactcccgttatcaggtaaagggatgggtgggcaaggtacaggaaacactgtctctgttcccctgctagggaaggcactgtccctctccttgtaagttttcctgtgagctctctgctgctgttcaaggagctttatccggtgatagtatcaaagcaccaagatgaagtccagcgcggttactacaaagggcaaggctatatttgagctcaagcacaagctggtacaagctgttaacaagattgcagacagagacacttaccagattggattggatgagatcgagaagatggcggataccctggcccctgacatgattggccccttcttgtcatgtgtcattgacactgatgctgagcagaagagtgcagtgcggaaggagtgcatcaaggtgattggcacactggcacgactacatggaaacctattggcacctcacatggcgaaaatggtgtccagtgtagttaagcgcctgaaggacaccgattcagttgttagagatgcatgtgttgacacttgtggtacccttgcaatgtgcgccagaagttatggggatggtggtgcagcgttggtgacattggtgcgccccttgtttgaatcactgggtgaacagaataggtatattcaggctggggcagcactgtgcctggccaaggttatagatgagagcaattacttccctgggcctgtgctcccgcagatgcttgttcgtgttgttaagctgctcaagaacccccacttcatggcgaagcccgctgcgattgacttgataagaagcattattcaggctgaaggtgcttccacagagcaggcattatcatcagctctaacaagtattatggatgcgctgaagagtactgactggaatacaaggaaggctgcctcactagctctttcaagtattgcggtcagttctgggtatttggttacctctttcagaacttcctgccttcgctcccttgagcgtagtaaatttgacaaggtaaaaccggtacgtgacaccattatacatgcaattcagctgtggaaagctattccagggtctcatactcctgaaccatcagaagctgggtcatcaacaaaagagaactactttggagaccatcatgacgccagaagtatacatgatggaggatcaagagatacttcttttaggagaacagatcatgggccttctgtatctgttatcagtggtagttctctcagttcagcaaagcggaggtctcctttatctattaacaaagtagccataaacaatgctgcaaatttgcaacggatgaagactggtgattggcgtgttgaggtgtcagttccaaagcagagtatgataccgctggttaataatgacgagaagggatccagtaaagcctgcagcctaaaagatacaaagagaaatgcatatgaaagtgttgatgtagacagtaagtttgactatgacattgtagatgataaacaagaatgctcctctgtgtcagaagtagccagcaggagttttgagacaaagcatgtcactactgctcaggaatgcactgaagattgtgattcagcagaagttacagaacaatgtcccaggggtcgagaaagtaagagcataggctcaacaattacagatgttactactcatgacacacatagttgttgtctgaatactatgaatgaattggcccttgttaggaagcaacttcaagagatggagaggaagcaagcaaatttttttgatttgttgcaggaatttatggccagctcagcagagaacatgtcagtgctaaatttgaaggtgcacaacttggagaatgctgcagacaaaactgtatatacaattactcagagcgaaagccggtatcatcttcctggctccaagcattttaagaaccaaagcgtctcttctttgcctaggctttcgacttctacacctagatcatctatggatgttaactacaagccaccaccaatctcagagttgaaacatgagaagtggatgcgtgatctaccatctcggggctcaaacatgtgttgtaaagagggagctgattttcgaaaggatcatgttcgcagtaaagttaggaagcttgggcctgtgagcttagagggtaacttgggaagatgtgatccaagctcagcaagaagtcgaacatcaggggttaaagggacttatccagtttcatttaccagttcctgtgaacaatctggactgcgaaatgcattgtgcacctcaaatcaacctggtgagtttcaagatactgatggcatggaacctgcatacatggaagccctgaactgtggtgattatgatgatctgattgacctaatggatagaactggaccagttctcgaaaagttgtcgtgtgagacgacaaatgagcttttgagggttatagctgaacaatttcttaataagaagttctttgacttggcactgccttggcttcaacagttagcagatttaagcacgatttataagccaactcaactttttgcatctgtgagagcacaaaaggagttcctttctgcattggaggaagctgcaacgggtggatctatggaaccagccttgaggattgcaattgcacagctcggatttaaactatccaaagcttttgaggttggcccatgcaggtggacgtgcaaaacactgttatgtcacttagataggccagactttgaaataggcggtgaggaaaatctcagccagaatgtgcagagaaaatgaaactatcatgaccaatgcaatgtgagatgtttcttgtctagtatatgctcaggccacgaaaacagtgctttagggagcttaagttaatttcttgtagcagcacaacctttgtaacttgtcgtatgatctgtttaattagcgtgtgaaaggctagaagatttcaatagaggttgatagtttggtagtttaaaacatgcgtgctttggttctctactgtaggactggaaacttttgctgtgtagcaatgtggcatgacttatgtttggtgctttcagacggggccgtacagatttttgcttgaatta

SEQ ID NO: 141483 - DNA, 681 bp, Zea Mays
gtaccactgacacagccagccaaccagctgccagcatcgcttgctcctggcctgctggccggccggatgcccgaatgccgcacgcgcagtctactctatatgagcatacgacggcgatcgagccgcccgtgtactcataaccttcttccatattatatgcggtcgtcgtcgtcgtcgcggctgctgctcgcggcggcggcagcaacgtcgggcgcctgcctggcggtggcgctgcttctcgcggttggcgtgtgcacggccagctgcggcggcggcgccgccgccgccggactcgcagcgcgtcatggacggcaacagccgcgtccgccgtcgtcctcgccgtcgccggtgcttggcgcggactcctccctgcaggtgaacaccgcagcaccctcgcaggaggagaagggacttgccgccggcgaccagctgctgctcggcgctgctgctgcggcggcggcgggacaagactacggcttcgtggatccgccaccggacacgcgccgccgcggaggcacctcgccgataccgcacagctagctgatcactccatctcccttctctactctatactgcacctgcatgcacagcccgtgtcagtatacgtgcggtgtccctcatgctgtatactgtgtagtgtactttgtgcgcactaaccaataatccaagaatttcatataa

SEQ ID NO: 141484 - DNA, 154 bp, Zea Mays
aataacatcttgggatatttatccagaaagacaacagggaatacatattacagtacatctgtgagttcctcaaataattctagggtccacctgatgaccgattttcatcctggtgaactacccacccgtctagccgtatgcaattcgattgccg

SEQ ID NO: 141485 - DNA, 2830 bp, Zea Mays
gccaaggcacccgcgccgcggtcgctactcgctgctcgccatacccggctccgtccgttccaagttctcggcgtttgatcggctgggtaacccgccgcctcctcagcctgcgccctgcagccaccgccgccgcgccgcacgcccgcgcctcacaaaacttcccgtgcctccccgccggtgccgcaacccctctcgcggccacgagcacgggcattatctccgcgccacgatcccatcggaaccagacacgcccggccgcgagccgcaccctgcccaccaagctccgatggactcggcggcgtcggcggctctgaagccctcggcgctggacctgctagcggcactgctgacggggcgggaccccgaaggcggggcgcactgggcgtccgcgctcgccgagaatcgacacctcttcctgctgctcaccacctctctcgccgtgctagtcggctgcggcgttgccctgctcgtccgccgctcctccgcgcctcgggcggccgcggccgcggcacaggcgccgccgcgcccgctcgccgtgaagcccaaggacgagccggaccccgacgacggcaggcagagggtcattgtcttcttcggcacgcagaccggcaccgctgagggctttgccaaggcgctcgccgaagaggccaaggcgaggtacgacaaggctgtcttcaaggtggtcgatctggaagattacgccgctgaggatgaggaatacgaggagaagcttaagaaggagagcatcgcattgttcttcctggcaacttatggcgatggagagccaactgacaatgcagcgaggttttataaatggttctcagagggtaatgagagaggcgagtggttgaataatcttcggtttggggtgtttggcctcggaaatagacagtatgagcactttaacaaggttggaaaggtggttgatcaactcctcgcagaacaaggtgccaaacgtatcgttcctgttggtcttggagatgatgatcaatgcattgaggatgactttaacgcatggaaggaacttctatggccagaattggataaattgctccgccaggaagatgattcttcaactgcaccaactccttacacagctgctatcccagaatatagagttgtgtttgtcaaaccagaggatgacatgtacattaacaagtcttttgctctcagtaatggccatactgtttatgacattcaacatccttgcagagcaaatgtggctgttcggcgagagcttcatacaccagcttctgaccgatcctgcattcatttagagtttgatattgctggaactggcctaaaatatgaaactggagatcatgttggtgtctatgctgaaaattgcatcgaaactgttgaagaggcagaaaaactgctaggttattcaccagatactttattctctatttatgctgaccaagaggatggtaccccgctctgtgggggttctttgccacctcctttcccgtccccttgcacagtgaggactgcgcttacgagatatgcagatcttttgaattcgcctaagaagagtgctttactggcgctggctgctcatgcatctgattctaaagaggctgagcggcttagacatctcgcgtctcctgctggaaagaaggagtattcacaatggatagtcacaagccaaagaagtctcttggaagttatgtcagagttcccatcagcaaagcctccacttggtgttttctttgcagctatttgtcctcgcctgcagccaagatactactcaatatcttcctcaccgagaatagcaccaacaaggattcatgtgacatgtgcactagtatatgggccaacccctaccggaagaattcacaaaggagtctgttctacttggatgaagcattcgactcccttggaagatagcaaagactgcagctgggctccaatttttgttaggcaatcaaacttcaaactgcctgctgatcctactgtgcccattataatgattggccctgggactggtctggcacctttcaggggcttcttacaggaacgactagctttaaaacaggcagaggtggaactgggccatgctgtcctcttctttgggtgcagaaatcggaagatggacttcatatacgaggatgagctcaataattttgttgatgccggtgccctctctgagttgatcgtagccttttctcgtgagggtcctacaaaagagtatgttcagcacaaaatggcgcaaaaggctgccgagctttggagcatcatttctcagggcggctacatttatgtttgcggtgacgcaaaaggcatggctagagatgtccatcgcacgctacataccatcgtccaggagcaggggtctatggacaacaactccaaggcagaaagctacgtgaagagcctgcagatggaagggagatacttgagagatgtttggtgacgtatgccaaagaaacgtggaccctgtccgtcgtagttgccggcgaatacaaacctaaatcaacgtcgtggaggaaaattagatgcaccggctggggtatgattagtaggaatttttacatgatctgttcgatgggaaacatatatactagtgatatggttctatttttttaaaaaaataaagaagaaaagaaacagaggtttccccgctttatatagttatatttatttaaaagtgacatagccagtcacctagtgatggtagagtatcaggcgccagcaggcagcagcggtgcaggtgcttatgtatgttcgttctggaaatcatcgttgtgatttctggcgctaaggctatagtgaataaaacagccattggctcatcacttgcacttgctttgctggacacttttgtagc

SEQ ID NO: 141486 - DNA, 1048 bp, Zea Mays
cccttggcacccccacagggacggccctgcttccgggcagcgtactggccatccagttccggcacggcggcaccctctttatataccccgcccaagccactgcattctcgcccagtcgccctcttgggccttggcttggcttctaccctaccctgcaaacacacgctctctcctccctcgtggcctcgtcacttcttctcgcactcgtgaaacaacaacaaaaaaaggttcgattttttcccccttcgatcgatggagaacgcgccgacgtcacacgctcatggcgtcagcctcgacctgcgcctggacccatctccgctccatcgctccgccgcggtgcccgtgcccgcgccgcccttcgctgccgaccaccgcccgggggaggccttcgcctgcaactactgccaccgcaagttctgcagctcgcaggcgctgggcggacaccagaacgcgcacaagctcgagcgcaccctcgccaagcgcagccgggacatcctcgccgcgcctccaccgtcgtccccgccaccaccggccccggccgtagccttccatgctgccgcgccggaaagcaacagaaggagcgggctcgtgccgaccgcgtactacggcgccacgaggctcgcgagggaggaggacgccatggcgcagcaggcggcgccaccgggcttcgcgatgggctggggtgcagacactgcggccgccgctgatggtggctgcggccgcctcggcctcggccacggccatggccagagcggggaggagatcgacttgtcgctcaagctctgagcagatgctttgcatgcttagcttgttgattagttggtgcatgcagcatatatctggcgcgcgtacgtccgtccaattcatctcattctcaggccgatccggcgcaagtcgtgttagaatttgctagctagcgggtagccttctcttggatcagcagctggtgctttgagctctgactagaatacgtatgtgtatatatagctggcctctatatataattcatgcaataactaatcttgaatctatatatagcgaagcgcct

SEQ ID NO: 141487 - DNA, 104 bp, Zea Mays
cgattgtatatatcactgctccatcccactgagtttcgtgattcagattagccaaattagctgtttggtttactcactcttccattccatcaggcaaaaaaaaa

SEQ ID NO: 141488 - DNA, 1404 bp, Zea Mays
attcggacctcgttccgcctctgcggctctgcccctctctctcacctccccgcgggcggccgcccccaccgcagcccgaaccgcatctcccccaccactggcatccccctaccgcttacaaatacgcgacacatcccacctcgacggtctctttctcgcatcgctgcgccgctccatccgctcggctcccacccgtccgtcgtcgcctcgccgtcgagccaccgccctccttgtcaacctcgctgacgacgggcccgtgtgattctgctgcggtgcagtgttgctgctcgggccgggcgggaggagaaaagatgggggtgtacctcagcacgcccaagacggacaagctctcagctgatggagagaacagccgcgtccggttcggcctctcctccatgcaggggtggcggaccaccatggaggacgcgcatgctgccttgccagaccttgatgaatgcacatccttttttggtgtttatgatggccatggtggaaaagctgtatcaaaattttgtgcgaggcatttgcataaacaagtgcttataaatgatgcaaattcatctggtgatttgccaacctctctccataaagctttcttaagaatggatgagatgatgaaagggcagaggggttggagagaactaactgagctgggagataagggaaacaaaatctcaggtatgatagacgacataatatggcctcccaagggtggtgattcagataagataagggaagattgggataccgaggagggtccaaattcgaactttcctggaccaacatctggaagcacagcttgtgtggctgtcataagaaatgacaaattaattgttgcaaatgctggggattctcggtgtgttatctcacggaagggtcaggcttacaatttgtcaacagatcacaaaccagatcttgaggaagagagggagaggattttgggtgctggtggatttgttgttgccggacgggtcaatgcaagtctgaacttatctagggcaataggtgacatggaactgaagcaaaatgacctcctgccagtggagaggcagatcgtgacagctgaacctgaattgaaaacagtccagctctcggaggatgatgaattcattgttttagcttgtgatggaatttgggcagagggagtaactcacaaaccaggctttgcagtttctgatatgtaactaagtaaagcagaacacctgcaaattgtcatacaaatactgtatcaaatgagtaatcagcttgcgtatctaatctgtatttgtgatgccacacatattttggatttgagctaattccttagaagtagcacactagggtttgcagttgttgatatctaaactgtttatagatatatgtatgttgtatccatgttgtatacaattaatgaatttctaattg

SEQ ID NO: 141489 - DNA, 1689 bp, Zea Mays
attcggacctcgttccgcctctgcggctctgcccctctctctcacctccccgcgggcggccgcccccaccgcagcccgaaccgcatctcccccaccactggcatccccctaccgcttacaaatacgcgacacatcccacctcgacggtctctttctcgcatcgctgcgccgctccatccgctcggctcccacccgtccgtcgtcgcctcgccgtcgagccaccgccctccttgtcaacctcgctgacgacgggcccgtgtgattctgctgcggtgcagtgttgctgctcgggccgggcgggaggagaaaagatgggggtgtacctcagcacgcccaagacggacaagctctcagctgatggagagaacagccgcgtccggttcggcctctcctccatgcaggggtggcggaccaccatggaggacgcgcatgctgccttgccagaccttgatgaatgcacatccttttttggtgtttatgatggccatggtggaaaagctgtatcaaaattttgtgcgaggcatttgcataaacaagtgcttataaatgatgcaaattcatctggtgatttgccaacctctctccataaagctttcttaagaatggatgagatgatgaaagggcagaggggttggagagaactaactgagctgggagataagggaaacaaaatctcaggtatgatagacgacataatatggcctcccaagggtggtgattcagataagataagggaagattgggataccgaggagggtccaaattcgaactttcctggaccaacatctggaagcacagcttgtgtggctgtcataagaaatgacaaattaattgttgcaaatgctggggattctcggtgtgttatctcacggaagggtcaggcttacaatttgtcaacagatcacaaaccagatcttgaggaagagagggagaggattttgggtgctggtggatttgttgttgccggacgggtcaatgcaagtctgaacttatctagggcaataggtgacatggaactgaagcaaaatgacctcctgccagtggagaggcagatcgtgacagctgaacctgaattgaaaacagtccagctctcggaggatgatgaattcattgttttagcttgtgatggaatttggaacaatttcgatgatgtttatcattcaatcaatcatagaaaatcctgaatacacaattatgaactggccaaggggattgcatgtcaagtcaagaagtagttgattttgtacataaacagctaaagaccgaggataagatatctagtgtgtgtgagaagttgctcaaccgctgtgtggcacctacatctggtggcgaaggatgtgataacatgacggttattgtggttcaattcaagaaaccagctttagctgttgctacttctagcgctgagcagtctgctaccactgcagaagggatgcggcccaacgaggtcgatggcccagattaccccccgaagtaggcgttgagtggcacaccgtgctgtggagctctaaccggtggataatagacaaaaaaggatagtgaggtggtgtatataagaaaagggattctattcgacaatctcttatagggtttgttgcttccttctttctagtgttcagagtcgtcgcaacctgtaatacatggcatgttggtgcttaaattggtttttttgtgaaatgcattgatgag

SEQ ID NO: 141490 - DNA, 1668 bp, Zea Mays
attcggacctcgttccgcctctgcggctctgcccctctctctcacctccccgcgggcggccgcccccaccgcagcccgaaccgcatctcccccaccactggcatccccctaccgcttacaaatacgcgacacatcccacctcgacggtctctttctcgcatcgctgcgccgctccatccgctcggctcccacccgtccgtcgtcgcctcgccgtcgagccaccgccctccttgtcaacctctgttgctgctcgggccgggcgggaggagaaaagatgggggtgtacctcagcacgcccaagacggacaagctctcagctgatggagagaacagccgcgtccggttcggcctctcctccatgcaggggtggcggaccaccatggaggacgcgcatgctgccttgccagaccttgatgaatgcacatccttttttggtgtttatgatggccatggtggaaaagctgtatcaaaattttgtgcgaggcatttgcataaacaagtgcttataaatgatgcaaattcatctggtgatttgccaacctctctccataaagctttcttaagaatggatgagatgatgaaagggcagaggggttggagagaactaactgagctgggagataagggaaacaaaatctcaggtatgatagacgacataatatggcctcccaagggtggtgattcagataagataagggaagattgggataccgaggagggtccaaattcgaactttcctggaccaacatctggaagcacagcttgtgtggctgtcataagaaatgacaaattaattgttgcaaatgctggggattctcggtgtgttatctcacggaagggtcaggcttacaatttgtcaacagatcacaaaccagatcttgaggaagagagggagaggattttgggtgctggtggatttgttgttgccggacgggtcaatgcaagtctgaacttatctagggcaataggtgacatggaactgaagcaaaatgacctcctgccagtggagaggcagatcgtgacagctgaacctgaattgaaaacagtccagctctcggaggatgatgaattcattgttttagcttgtgatggaatttgggattgcatgtcaagtcaagaagtagttgattttgtacataaacagctaaagaccgaggataagatatctagtgtgtgtgagaagttgctcaaccgctgtgtggcacctacatctggtggcgaaggatgtgataacatgacggttattgtggttcaattcaagaaaccagctttagctgttgctacttctagcgctgagcagtctgctaccactgcagaagggatgcggcccaaaatttgagttgcctttgtgaacagcgaggtcgatggcccagattaccccccgaagtaggcgttgagtggcacaccgtgctgtggagctctaaccggtggataatagacaaaaaaggatagtgaggtggtgtatataagaaaagggattctattcgacaatctcttatagggtttgttgcttccttctttctagtgttcagagtcgtcgcaacctgtaatacatggcatgttggtgcttaaattggtttttttgtgaaatgcattgatgagttgtcggaagggtagtttagcttctcaagcagatttgcttgcagaaaagtgaaagatccgaatgag

SEQ ID NO: 141491 - DNA, 1644 bp, Zea Mays
attcggacctcgttccgcctctgcggctctgcccctctctctcacctccccgcgggcggccgcccccaccgcagcccgaaccgcatctcccccaccactggcatccccctaccgcttacaaatacgcgacacatcccacctcgacggtctctttctcgcatcgctgcgccgctccatccgctcggctcccacccgtccgtcgtcgcctcgccgtcgagccaccgccctccttgtcaacctctgttgctgctcgggccgggcgggaggagaaaagatgggggtgtacctcagcacgcccaagacggacaagctctcagctgatggagagaacagccgcgtccggttcggcctctcctccatgcaggggtggcggaccaccatggaggacgcgcatgctgccttgccagaccttgatgaatgcacatccttttttggtgtttatgatggccatggtggaaaagctgtatcaaaattttgtgcgaggcatttgcataaacaagtgcttataaatgatgcaaattcatctggtgatttgccaacctctctccataaagctttcttaagaatggatgagatgatgaaagggcagaggggttggagagaactaactgagctgggagataagggaaacaaaatctcaggtatgatagacgacataatatggcctcccaagggtggtgattcagataagataagggaagattgggataccgaggagggtccaaattcgaactttcctggaccaacatctggaagcacagcttgtgtggctgtcataagaaatgacaaattaattgttgcaaatgctggggattctcggtgtgttatctcacggaagggtcaggcttacaatttgtcaacagatcacaaaccagatcttgaggaagagagggagaggattttgggtgctggtggatttgttgttgccggacgggtcaatgcaagtctgaacttatctagggcaataggtgacatggaactgaagcaaaatgacctcctgccagtggagaggcagatcgtgacagctgaacctgaattgaaaacagtccagctctcggaggatgatgaattcattgttttagcttgtgatggaatttgggattgcatgtcaagtcaagaagtagttgattttgtacataaacagctaaagaccgaggataagatatctagtgtgtgtgagaagttgctcaaccgctgtgtggcacctacatctggtggcgaaggatgtgataacatgacggttattgtggttcaattcaagaaaccagctttagctgttgctacttctagcgctgagcagtctgctaccactgcagaagggatgcggcccaacgaggtcgatggcccagattaccccccgaagtaggcgttgagtggcacaccgtgctgtggagctctaaccggtggataatagacaaaaaaggatagtgaggtggtgtatataagaaaagggattctattcgacaatctcttatagggtttgttgcttccttctttctagtgttcagagtcgtcgcaacctgtaatacatggcatgttggtgcttaaattggtttttttgtgaaatgcattgatgagttgtcggaagggtagtttagcttctcaagcagatttgcttgcagaaaagtgaaagatccgaatgag

SEQ ID NO: 141492 - DNA, 1681 bp, Zea Mays
attcggacctcgttccgcctctgcggctctgcccctctctctcacctccccgcgggcggccgcccccaccgcagcccgaaccgcatctcccccaccactggcatccccctaccgcttacaaatacgcgacacatcccacctcgacggtctctttctcgcatcgctgcgccgctccatccgctcggctcccacccgtccgtcgtcgcctcgccgtcgagccaccgccctccttgtcaacctcgctgacgacgggcccgtgtgattctgctgcggtgcagtgttgctgctcgggccgggcgggaggagaaaagatgggggtgtacctcagcacgcccaagacggacaagctctcagctgatggagagaacagccgcgtccggttcggcctctcctccatgcaggggtggcggaccaccatggaggacgcgcatgctgccttgccagaccttgatgaatgcacatccttttttggtgtttatgatggccatggtggaaaagctgtatcaaaattttgtgcgaggcatttgcataaacaagtgcttataaatgatgcaaattcatctggtgatttgccaacctctctccataaagctttcttaagaatggatgagatgatgaaagggcagaggggttggagagaactaactgagctgggagataagggaaacaaaatctcaggtatgatagacgacataatatggcctcccaagggtggtgattcagataagataagggaagattgggataccgaggagggtccaaattcgaactttcctggaccaacatctggaagcacagcttgtgtggctgtcataagaaatgacaaattaattgttgcaaatgctggggattctcggtgtgttatctcacggaagggtcaggcttacaatttgtcaacagatcacaaaccagatcttgaggaagagagggagaggattttgggtgctggtggatttgttgttgccggacgggtcaatgcaagtctgaacttatctagggcaataggtgacatggaactgaagcaaaatgacctcctgccagtggagaggcagatcgtgacagctgaacctgaattgaaaacagtccagctctcggaggatgatgaattcattgttttagcttgtgatggaatttgggattgcatgtcaagtcaagaagtagttgattttgtacataaacagctaaagaccgaggataagatatctagtgtgtgtgagaagttgctcaaccgctgtgtggcacctacatctggtggcgaaggatgtgataacatgacggttattgtggttcaattcaagaaaccagctttagctgttgctacttctagcgctgagcagtctgctaccactgcagaagggatgcggcccaacgaggtcgatggcccagattaccccccgaagtaggcgttgagtggcacaccgtgctgtggagctctaaccggtggataatagacaaaaaaggatagtgaggtggtgtatataagaaaagggattctattcgacaatctcttatagggtttgttgcttccttctttctagtgttcagagtcgtcgcaacctgtaatacatggcatgttggtgcttaaattggtttttttgtgaaatgcattgatgagttgtcggaagggtagtttagcttctcaagcagatttgcttgcagaaaagtgaaagatccgaatgag

SEQ ID NO: 141493 - DNA, 3069 bp, Zea Mays
ccgccgcccgcggccatggcggccgatcccctactctcgctcctcgcgggcgcgttgctagtcgcggcgctcgccccggcggcggcggcaccgtcgtgcccgcacaccaatctgacggccaacttctccgccgacttcaccatgctgcagcaccagctccgcgggacggtgcgcctggccgccgaaggcaagtgcgcgctcgagctcacccgcttcgacctcctcgccgcctccccctccgcgcgcttctgggcctccgacggccccaccatgtccgacctcgccgccggtcgcgcgttctcgccgctcccgctcaacaaaaccttccagaacgcctccctcgagctccccttcgctcgaccgctcccgcgcctcctcgcgctctacgaccccgacaccttctcggacttcgggcacgtcttcctccccaacggcacagatcccggcctcgatgccgccgccgagccggcgcccaccatgttcgacaactgcatccctctctcggaggcggagacctaccgcctccgctggacgctcaatgcctccgccggcaccgtcgagatcggccttgaggctgccgtgggctccgagtactacatggcattcgggtgggcggaccccaaggccaactcacccgcaatgatccacgccgatgtggttgtcgccggcttcacagaggaaggtactccatttgccgaggactactacataagtgactacactgagtgcaagcttgggaaggaggactctccagtgtctggggtttgcccagataaggtctatgagggcgggagcaacgattcaatcctggtgtatgggcaccgccaggatggagtgtcctttgtcaggtatgcgaggaagcttgatgctgaggatgccaagtatgatgtgccagtgggtgccacggaggagatggtggtgctttgggccattggtaggttgcggccaccagacacaatgcgcccacactacctcccacagaaccatggggggccaagggacacgacctttgggtttgcccggttgaatttgtcggagacggtggacaattgccttggaccgttggatgcggataataaggaggatcaggagaggatcattgcagatcgcaagacaccacttgtggtgacatctgctccagccgtgcgctacccgaacccaccaaaccctgacaaggtgctttacatcaacaagaaggaggcgccgctgcttaaggtcgagagaggtgttccagttaagttctcggtgcaggctgggcatgacatggcactctatatcacttcagatcccattggtggtaatgctacactgaggaataaaacagaggtcatatatgctggcgggcctgatgcccatggtgtactagctaccccaaaagagcttgtttggctgcctgatcggaacacgcctgacctagtctattatcagtcactgtatgaacagaagatgggatggaaggttcaagtggttgatggaggccttagcgacatgtacaataacagtgttgttttggatgatcaacaggttacgttgttttggactctctccgtggattataaatctatatctatagcagctcgaggtgagaagaaaagtggatatcttgctattgggtttgggagtgggatggtgaatagcttcacctatgttgcttgggtgggcaatgatggggttgggcgagtaaaaacttattggattgatggaaagagtgcaacaggcattcacccaacatctgagaacatcacttttgttcggtgtaagtcagaaaatggcattattacatttgaatttactcgccctcttaacccttcttgtaccggaaaagtagaatgcaagaacatcatcgatccaactacaccacttaaggttgtctgggccatgggtgcaagctggtcgggagatgatctgacagacagtaacatgcattcagtcacaagcagtcggcctatacgtgttttgttgttgagaggttcagctgaggcagaacaggatttgcgtcctgtcctggctgttcatgggtttatgatgtttgttgcctggggaatcttgcttcctggtggaataatggctgcccggtatttgaagagcttaaaaggagatgggtggttccaaatacatgtctatctgcagtattcaggaattgctataatgtttcttggcgtccttttcgctgcggctgagctccgtggcttctttgtcagctcagtgcatgttaagtttggtgtgctggccctgttattggcagttctgcagccactaaatgccaaatttcgtcccagtaagccagctaatggtgaggttccatctcacaatcgaatcatgtgggagtacctgcatgttatcacagggaggtcggcagttattgtaggaatcgtggcgcttttcacaggaatgaagcatttaggccataggtatgacagtgagaatgtagaggagctcacttgggccttaatgctgtgggtgctttcagttatcgttgttgtgctgtgcttggaatataaggaagtcaaaagaaggatcggtgacagaagtgccagagggcactgggtattaggcaacaccgaggaggaggattcagttgatcttttgcatcctgatggtgcagccaggaattcagaatctagcgctactggtgtaatggaggtgcagcttgaacctctcactagatgatgtagatcaatctgtcagatacaaatacacctgaatacctgatccatatcttatatggatgataggtcagccggcatggattttctggttcagaggaaattgatctggaatccccatgtttgttttaagcagaatggttccagactagacaagatgttcagattctgttcttaatttcatgcatcacacctttacattgtacagtgtacatttttttacaatagacatgtataatttgtgacactgccctagccattctttttgctattgatatttatagagggaaagaattaattgaggtggtcattggaattcacagcagcaatttgtgtttggtatttttttttcaagagagaatgacatgatttctgtatcatatccattgataagtcttatttg

SEQ ID NO: 141494 - DNA, 854 bp, Zea Mays
acaagcctgaccgcacatgacatatactcacaccagaatacgccaccactgattggacacgtctttccccgggcggctgttccttccttcagcattcttcggatggtcctcctttcccctggctgtcccttccatcttctccgaggtcacccggggcgatctggtcctaggcttcgtctgctccgcctggcacggcgaactcgcggtccgccacgtgcgctggattgttacagacctattgctactacagctatctagaagaagagagaaagatgcgaggtagaagaaagagagacgggaaactgggggctgtggagagggaagcgctgaccaagttcttgacggacagggaggtggaagacgagctcgccggattcttgcactactacgtggcaaacaagcaaggagaagatggaactgctccggtggttgaagagtgaagatgaaaccatttcagtagaataagaagccacacagcaggtaatatgggtgattccaatacaaatgagttctaagttaaaggccatattgttgggtgggtcgatgatgatgagctagcagtgacgcctaagaaaaatgaaaagccaagtgcaagtacctttgttggttaagtttatacctacagttgcagctcctattctgtaaaattgaagcttgcttttgggttttaacctatctagtgtctgtagtttgatttctgaaagaaaaacggaatacatgtggtccaacaagactgtcaaatgaatagagcaatttgccgatggtctacctgtgtaatttcagtaggttacttctgttaacttttttttggaccgggatactgctgttaaattgatgtagccaacttgtgccaa

SEQ ID NO: 141495 - DNA, 628 bp, Zea Mays
ctttggtctgaatactgacatggcggtagcgccgggcagcagtggtgttgatcgtggcgggcgcgatttcgagaaactgggggctgtggagagggaagcgctgaccaagttcttgacggacagggaggtggaagacgagctcgccggattcttgcactactacgtggcaaacaagcaaggagaagatggaactgctccggtggttgaagagtgaagatgaaaccatttcagtagaataagaagccacacagcaggtaatatgggtgattccaatacaaatgagttctaagttaaaggccatattgttgggtgggtcgatgatgatgagctagcagtgacgcctaagaaaaatgaaaagccaagtgcaagtacctttgttggttaagtttatacctacagttgcagctcctattctgtaaaattgaagcttgcttttgggttttaacctatctagtgtctgtagtttgatttctgaaagaaaaacggaatacatgtggtccaacaagactgtcaaatgaatagagcaatttgccgatggtctacctgtgtaatttcagtaggttacttctgttaacttttttttggaccgggatactgctgttaaattgatgtagccaacttgtgccaa

SEQ ID NO: 141496 - DNA, 1926 bp, Zea Mays
ctctcccaccaaaccaccgttctaaacgctcccctagtcccctgctcagcttctccagagatcgccaaagaagcagcatcggcagtaagctctgcggcgatggggtacacgtacactccgacatactactcgggcctgcaggacaccatcgcgtcgctctgcaagtccatcctgccctccttccgcgtgggccggcggctcaccgccgaccaggccgccgcgcggcgccacgccgagcagctcaagtggcagcaggagtccttccaccgcatcctccacctcgccgcgctccaccgcgagggcatcgctccggcctccgacgttgccgccttccgcggaaccatgctcgcggcgctcgtcgcgccgccgcagcacctcgagcagcccgctgtgctccgggacaagctcctcttcctccaggagctcctctacgccaagtgcgtctccgcggcggagtacaacgcgtccaaggcgcccctcgtgcagcggctcgccgcgttcggcgtcatcgtcgactgccccgacgcggaggtctcggccgaggagtggtcggagatcgacctccgtgacccgcctcctcccgccactgcggcggcctccgacaagccgaagcacaaggccttcgtcacgccatggaagagcagatccaagaaggaccaggacgtgaacagcagcgcatcaaggccgccgctggcccctgtggaccataacaacgccaccaacgcgccagtcttcatgaccgagagctcgccgtcggaaacggttccctccgggaaggccgagaaagggaagaggaggcatctggcagggatgttccacagcggcggcagtggcaccgagaacaaggagcctgcgggggaggaaggggtcgtcgagaaagagacggtgagaggtaagaagaagagctcgtgggggttcgatggcatcaagaagtggacgaaagccggtgcctgtaacagtggcgaggcggcagccaccggtgagcagccgcagcatgttcctccgcgctcatcttacagcgagtgccagctggaggcgagccccatggctgcttctggaccggatgccaagagggccaagacgaggctgcactcggacacggacaatgactctgcttccgagctgctgcgtgacaaggttctggtggagaacacaaagaaagagctctcaaggattcaggctgagctatcatctacaaatcggaacttgaacttctcgaatcagcagatggaggccatctcaacaaagcttccggtggacaagtctgacctcaagtcctacttcccaaaggcatggtgtgatcagcacggggatggcgtgatcaccgcggctaaggaagggttcaagcagcacgtcgaagagatggagaagcagagggacatcactggcagtgagggctgggctacctttgaggacatcgaccttgatgacaacttcaacccgagggccttctctcgccaccagccggactctgcggtgaaaggcaagaaagtcaatgaaagcctcaccagcagtttcacaaacccattctacagcgagaagaacccgttcttgaacacaaactacaactgaatgatgttgaactcttttgcgttgggatgtatcagtccgtttatatttttgttactggtataatgttgttattgtacttagggttcaattgttacattggatcagggttgttgtttatgacgtaagaagttgtatggttggagattacttgatcattcttgatatctactaatattgaaatcatttaggtgtctagttgagtttcgataagagtccaaacattgagattggcctagggcccggctctgcctacagcgtccgtgtaaacttaacgccataggaacagacgccgactccgataatatagtcccaccaataacgtaaacatgaaattttgtataaaaaaactaaaaa

SEQ ID NO: 141497 - DNA, 3476 bp, Zea Mays
atggggtacacgtacactccgacatactactcgggcctgcaggacaccatcgcgtcgctctgcaagtccatcctgccctccttccgcgtgggccggcggctcaccgccgaccaggccgccgcgcggcgccacgccgagcagctcaagtggcagcaggagtccttccaccgcatcctccacctcgccgcgctccaccgcgagggcatcgctccggcctccgacgttgccgccttccgcggaaccatgctcgcggcgctcgtcgcgccgccgcagcacctcgagcagcccgctgtgctccgggacaagctcctcttcctccaggagctcctctacgccaagtgcgtctccgcggcggagtacaacgcgtccaaggcgcccctcgtgcagcggctcgccgcgttcggcgtcatcgtcgactgccccgacgcggaggtctcggccgaggagtggtcggagatcgacctccgtgacccgcctcctcccgccactgcggcggcctccgacaagccgaagcacaaggccttcgtcacgccatggaagagcagatccaagaaggaccaggacgtgaacagcagcgcatcaaggccgccgctggcccctgtggaccataacaacgccaccaacgcgccagtcttcatgaccgagagctcgccgtcggaaacggttccctccgggaaggccgagaaagggaagaggaggcatctggcagggatgttccacagcggcggcagtggcaccgagaacaaggagcctgcgggggaggaaggggtcgtcgagaaagagacggtgagaggtaagaagaagagctcgtgggggttcgatggcatcaagaagtggacgaaagccggtgcctgtaacagtggcgaggcggcagccaccggtgagcagccgcagcatgttcctccgcgctcatcttacagcgagtgccagctggaggcgagccccatggctgcttctggaccggatgccaagagggccaagacgaggctgcactcggacacggacaatgactctgcttccgagctgctgcgtgacaaggttctggtggagaacacaaagaaagagctctcaaggattcaggctgagctatcatctacaaatcggaacttgaacttctcgaatcagcagatggaggccatctcaacaaagcttccggtggacaagtctgacctcaagtcctacttcccaaaggcatggtgtgatcagcacggggatggcgtgatcaccgcggctaaggaagggttcaagcagcacgtcgaagagatggagaagcagagggacatcactggcagtgagggctgggctacctttgaggacatcgaccttgatgacaacttcaacccgagggccttctctcgccaccagccggactctgcgtttgctgatgtgctagagacaaatttatcttctatgcaatccgcgtcaacacgaggcaggcagcggtcatgcgacgtcactaagcaggtcccggtagctgacacgtgggccccggttccgtggcgctgtggcccacggcgacgccttgctcgcagttcgctccacgacatggcggcctcggtgctgcaggccgagcgccacctgctcctgctcggcagcggccgcaaccgtcccctcctccgcatgctcccgccacgcgtgctcttcccgcaccggcgccgcagctggccccgggccgtgagggtgtcacccggcgacggcgagggcgcgggagggttcgcgagcgccgtggagaagcgctcgataccggggatagttgaggaggaagggtatggagcgaggggagaggagttggaaggggacgtggccggggctttggagcagaggtggcctccgtgggatgggttggccgagcggtacaagctcatcggcgccacctccctcgccttcgtcatctgcaacatggacaaggttaacttgagtgtcgcaattattccaatgtcacatcaatatggttggaactcatcaactgctggcttagttcagtcctcattcttttggggttatgcattgagtcaactaccaggaggatggctggcaaaattgtttggcggaaggaaagtgcttgaggtcggtgttgtgacatggtctttggccactgctataattcctgttgtagcaggttttatgccagggcttgtactatcgaggattctggtaggtattggagaaggtgtttcaccatcagctgctacagatttaattgctaggtccattccttggcaagaacgatcaagagcagttgctgttgtttttggtgggttgagctttggcagtgtcttaggactcctgtttgcccctcccatcattcagaactttggctgggagtctgtcttttacatatttggccttcttgggattgtttggtgcttaggatttgaatctcttatagtgcaacggttcggtgacaaaaaaagcctattaaatcttggacaaagttctactggatctgatggtcttatctcatatgctatgtcttcggaatcatcacactcgtcattggaagatctgcaaaattcactaaaggatgtgccttggggggcatttttcaaaagcaaggcggtctgggcaatgatatatgcacacttttgtggaagttgggggcattatacttgtttgtcttggctaccaacattctttagcgaggagctgaacctgaacttgacagaagcagcatgggtgtcagtccttcctcctttgggttcaatgatcattacatctattgcagcaccttttgcagacaacttgatatcaaatggagttgacaccacgaaggtgcgaaaaatttgccaaacaattgcctttgtgtcacctgcgactttcatgatgctttcctctgtggatcttggactgcctccctgggaaattgttgcttttcttacaagtggtgtagcactctccagcttcgcattgtcagggctttattgcacacatcaagacatctctagtgaatatgcaagcattctcctgggaatcacaaacactgtaggcgcggtgccaggaattgtaggcgttgcactcacaggctttcttcttgattcaactcattcttggagtatatcactctttgcgccttctatcttcttttacttaactggtactgttgtatggttggcatttgcaagcagtaagccccaggatttttccaagtcaggacctgagtctgagccgtgaatcgtgatgtatggtactcctctgcacataaggatcgtttcacaaggaaaattcgttttgagtttagacaaaagaatggagttctagggcagagaatagatgttatgttcctcttcagtcagtagcagacaagaggaagccactgataaggggacaatgcttgcgtgtatatagtataatgatgataggctttttttctggttagttttcacattttgatatggttttgatttttgaatgtgtgcagtcaggtccgcggtccgccagtttgtagtatcctgttggtttcgggtgtcttggttgtt

SEQ ID NO: 141498 - DNA, 136 bp, Zea Mays
gagagctataggtgtacattcggtccgcccggcccggctcggcccaagcccgaaaaggtccgtattgtttgaatttcgggccagtccgtcccgtttgaatttcgggccggcccgtaattgcttaaacgtgccgggc

SEQ ID NO: 141499 - DNA, 157 bp, Zea Mays
tctgtttgaatgcttcaaacctttgtggtggaacctttgtatgtttgaacctttgttgtggaagaacaagtgtgctggaattgtgtatgacttgtgatgagaatgttgtgtatgatggcttttctgtgtattatgattctgtgagctatcatgagag

SEQ ID NO: 141500 - DNA, 380 bp, Zea Mays
atggatggacgactgaagctccctgctacctctaaatccctgtcctcagtagccgattgcttaaattgagtttgccatcacctccccctcgccacgtcgatccgttcgaaccctttcccgagcgcagccatgagcggcgatgcccgcgccattgcagcagtaggctgccaccgcgggctcgcgtggccaggccacctggggctgccgccggccgagccaactccttggctgtgcgcgccctccactagggacggctcggctggccccgccgcgctcggccgacaccggcgagccccgaccaggaaaggccgatccccttccctgtacgttccaaggaagaagacgacggaccaatctgcaaattccataacagcaggggg

SEQ ID NO: 141501 - DNA, 928 bp, Zea Mays
cctagcccgtcgaggaggatcggcactgcacgggctccgtaagcacttcccgagaaaaggaagacagagaaggaaactgcagtgaagtcgccggcgccgccgcgacaggaggaaggagcagcagcggcaggggaggcccggcgatctcttctgctgcgtgcggcgagggagtaaaaggagccgcgacaggatgcactcctttgggcaccgcgccaacgcggtggcaacgttcgcggtcaccatactggccgcgatttgcttcgccgcctccttctccgacaacttcaacaccccaacacccactgcctccgttaagatcttgaatctaaactggttccagaaggaggccaacggcaacgacgaggttagcatgacgctgaacatttcggccgacctttcgtctcttttcacgtggaacacaaaacaggtgtttgtttttgtggcagcagagtatgagactccacagaatgctttgaatcaagtttccctttgggatggcattatacctgcaaaggagcatgccaagtttttgatccataccacaaacaagtacagatttattgaccagggaagcaatctaaagggcaaggaattcaacttgacaatgcactggcacattatgccaaagactggcaaaatgtttgcagataagatagtaatgacaggctatcgtctccctgagctatacagatagtcagatagatcatggacaggactaagtggcctgcaagaagtgttagtggcagtggcataattgatcctgagcgttttgttctaatctaagtggagcatgtaaccttataagcttgtacttaagctgaaccaggcaaaacaaagttgtaatttgagaggatatgtatggttcaattttgatttgcctatcaaatgttgattctgaacttgaaaggtatgccttgcaattcgtgga

SEQ ID NO: 141502 - DNA, 1967 bp, Zea Mays
ctcgtccgcgcccttctttgggctcggcgacacgcagatgcagccacagcagggatccagctcctctctgcagcaaaactccacagctgctcctggcgccgcggcggtgccgccgccaaagaagaagaggaaccagccaggcaacccaaatcctgacgcggaggtgatcgcgctgtctccgcggacgctgctggcgacgaaccgcttcgtgtgcgaggtgtgcaacaaggggttccagcgggagcagaacctgcagctgcaccggcgcggccacaacctgccgtggaagctgaagcagaagaaccccagggaggcccgccgccgggtgtacctgtgcccggagccgacgtgcgtgcaccacgacccgtcccgggcgctgggcgacctcacggggatcaagaagcactactgccgcaagcacggcgagaagaagtggaagtgcgacaagtgcagcaagcgctacgccgtgcagtccgactggaaggcgcactccaagacctgcggcacccgcgagtaccgatgcgactgcggcaccctcttctccaggagggacagcttcatcacccaccgcgccttctgcgacgcgctggctcgtgagagcgcgcagatgccgcccctgggcgccggcctctacgtcggtcccggcagcatgagcctggggctctcccagatccatggctttgcagatcaagcccagtcctcttcagcagcagcagccccgcagtttgaccacatcatgccatcgtcttcgggctccagctccatgttccgttctcaggcgtcggcctcctcgccatcttacttcctcggcggcagcgcccctcctgccgccgcccaggatttctccgaggacggctcccaaggcagccagggccctctgctccacggcaaggcgcacttccacggcctgatgatgcagctccccgagcagcagcaccagccgggcagcagcaacgccgccgtcggcgccaacggtagcaacatcctgaaccttgggttcttctcagccggcaacagcggtggcacgtccggcagcctgcaggacgcgcgcattgccatccaagaccagttcaacctcagcggcagcggcagtggaagcgcagagcacggcaacaacgtgatggtggcgtccatcggaagccacctcggcagaggcttcccttccctgtacagctcgtctccgtcggccgggatggcccagaactcggcgacggcgctcctgatgaaggcggcccagatgggctcgacgacgtcgagcaccacccacaacaaccacaacggccctactacgactagcacgctgctccgtgctacgggcttcagcggcgccaccggcagcgggcagctggggactactggcggcagggccgccgcgggagaagaaggggcggcgtcccacgaggcacacttccatgagctcatcatgaactctctggccggcggcggcttctccggcaccgcagggttcggcggcggcgtggacgacggcaagctgagcaccagagacttcctcggcgtcggcaggggcgccgcgacgatggcgccgcccgggctccacatgggcgccctggacccggcccagcagatgaaatgaggtatgacagtacgatcgagtatgatgggtcggtcagggaatgatatgatgaagagcagcaacgtacgataagcacatgacaagagatgcgagaagggaagtcaataataaaacagacgatcatgcacgtgaataagggtactagctttcgcgcgcatgcatgcatgggaaggtaagctagctagtgacgagggatcagaaggatggagtagtagtaaaagaaactgttttgttttaagttaatttccgtgttcatatgcatatgctggctgcatgcaacttgttggtttttcgccatttcccgtacgatttcgtggtgttaattcaagtggtttactactctatatatatatgagtatttaaatttggctgg

SEQ ID NO: 141503 - DNA, 438 bp, Zea Mays
gggacgacactttcaatcgacattattggccggtcggagcgcgcgtcatggctttggctttggcttggcggcttgccgtccgttccgaatctccgtcctccggccggcgccggatcgtcgtcccactcccacccaccaaggccatgttcgttttgtgtcaatccctatggttttgggattaaacgaacatggcccaaaagggatttttaattttcatatatgtactgtactgccttgcctcgtcctcgtgcacgcacggatatgaacttcgtgacgaggtccaagtccaattgatttcccttcttcacaagacccacaaatatgcaagaccgtagtacctacattacaaggcataggcgagtcgaagggtttgtttgtattaaaaaaaatcctcacacacaaaaaaatatcatgtggttaccggcatggcgggcggca

SEQ ID NO: 141504 - DNA, 3381 bp, Zea Mays
ccccctctcatccgagcccttcttcctccgccttcccttcacccccatatcgccatacacttctccactcctcccctgatcaccacccccccccccccccccccccctcgatccaatccggttttttcttcgattcggcgcgtggcaacctggtcagtccaatccgtccgtgaagaatttatccgtattttcgtttgcgtcgcatcgtttctgcgaaggatttcctgttcgttttgggggagaaaggcgtcgtccttgatgtctactatcgcgaccccgccgccgccgattgcgcaagagaaggccgccagccggaataagcgcaagtaccgtgccgagccaccttccgccgagttgggcccatacgggctggagtacccgctgacggcggactgcatgggattcgagtttatgtcgcctgagaaggctgccatggcagcagcggtagccgctgccgagggtgtcagccttgacctcctccagaactcgtgcgaaaagtgcaaagatctccaccctactgcggaggagttactggactgccaacgatatgtgaattggagcgacccaaacgagacgcagctggaggagatccttctcaagagtctgggcaccacctttgacaatgctgtgagtctgatcaccacaatgggctactctgaggcggttgcacgggctgctgttgtgcgggcagctgcgcaatacaactggagggagagccttgcagggtttggagaggcagcagttgaggttctcaagacggaaggggacatgttgccgagggagggtgcctctgttgaagacatgaggaggattgagcaggctgtgcttggtagtatggttatgtgggtaaatgaggctcagccactctgcaccacaggcgatgtaatgttttgcttgcttatgtctgacatgaacgtggcaaatgccagtgccatggactacaatacttcttccctcccatctgttgctgctcaagttattgcccaaccagacgcggggaactatgttactggttcaggttcaaatttatcagtttctattaccaacccacagactggcgttacattccgtggaaaacttaccccaatgccaccgggctcttatggtgctgtaaaagctgattcgtcaatggcaccagcaagcctcaatgtgtcaagtaccaaaccctcggtgccgggcaagactcagtgtgtgataccaaatattgagccaaaagaacaacctgttcctatacatgatcattcagaggaccaaccatttgttgctgctgcgacacaatctgtgaaaaatgacaagccatccccaagcaagagggggggctctaagagggactccttgcatcgacagaagttgacaagctttgataaaagttcccgagcattgggttccaaaggttctcttaggtctggcaagcatagctattcggccagtgcggtattggagaggaagtgccggtcattttcagattctactactagcaacttgaagggtgcatcaagagttgctaaagggtttgctgcaagcatatctggatcagaagtatcagctgacctttcctttactggtaccctttccccttctccatcatttgatgccaagatagttagtaactcaaacccagcacctactgctagcacagatctttcattgtcattgccctcctcaagtgatagtttaacaccatcttcgaatcatgattccattaccgagggagtggactctagtagcaaaattaatttttcgtatgatgaagaacagaaggtctggatcccacaagataaaaaggataaaattgtcttgattcttgttcagaggcagaaagaactgcaagcacatatgcatgactggacagactgggcccagcagaaagtgatgcaggtcgcacaccgacttgcaaaggagaaggatgaacttcagtcactcaggaaagagaaggaagaggctgaccgcctgcaagaggagaggcaccatttggaagagagtactcggaaaaagcttctggagatggagtctgcaatttctagggcaaatgctcagctggagaaagcagaagcttctgctcgcagacgtgaggttgagaatgcacaactcacgttacagatggaagctgcaaagcgacatgcagcagagtcagcaacaaatatttcagagcttttaaagaaagacgagaacagccgtaaaaggtctcagcgttgggaatctgatagagccctattacaagaggaacttgcagcacaaaagagcaggttatttcgggttcaagaacaactccagcatgctaaagagctaaaggatcaagtgcaggcaaggtggaaacaagaggaggctgcaaagactgaggcaattgcccttgtaacctcagtgaggaaagagagagggcaaattgagacctccatgaggtcagaagagaatttgctgcatctcaaagcagcgaatgacgcacaaagatacaagagtgagatccgtgtccttgagcagcgtattgcgcagctgaaggtgtcattggactcttcaagggttgctgcccccaagtggggagccgacaataaatcctatgcattgcatctttctgaagggagaaagaacaacaatgcccaagttttgtccaacacagcagtaccccaaggtctcgattttgacgatatacagcgcgaccgggagtgcgtcatgtgcttgagcgaggagatgtccgtggtgttcctcccctgcgcccaccaggtcgtctgtgccaaatgcagcgacctccatgagaagcaaggtatgaaggaatgcccttcgtgccgggcccccatccagcgcagggtgcgcgcccgccccgccggttgctagatttcacatataccatttggattttacttttcttctttttttcaccttgattgctcagcttaagttgatggaagattggagggaataatcaggtggtgtgagtggttgaaactgtgacaataatacatcgttaaacaccaaacaagccccagcagacagtgggtactggtttggtttgttatatggctataccggccgcttctgaatgctttggttttgctgcactctggttccaagtcccgtactgttttgtaaaaatgtcgatctgtgactgtaatgctcggtaggaaatctgttgatcgatgttgttatgtcctgttgcattcatctgtagctattgaagtcttaaatgaagtcagcttccatcgtctccttgggccactctcaataggagtttcattagatatttcatgacattaattagtatgtcacatagtatttcttttgatgatatgactataggtgacaatgtgttctaaatctctactaatccgtaagacaatagtgtagactaggcacaaccatgcccccgtctccatctcgaccgtccga

SEQ ID NO: 141505 - DNA, 981 bp, Zea Mays
ggaacgtgttgggcggccgacctcatgcctcaccccttccccgtcggcccccgactccccgagtcgccattgcctgccctcgttcggctcgatccccgcactacagcgcccgccaccaaccccgcccgcgcctccgctactaaagccgaggcctcacccaccacctgaccaccatgctcctccccctcctcagatcccacccgctcctccaccacgccgcgcgcctgtcctccccacgcacccgcctgctcctccgccgcgacgcaatcccgctcgcacgctccccgcctatccgcatggcggcctcgtccggctccggcgccagctcccctgcctcggcgccgccagctgccgtggtgcacaagtcaaagatcaaattttgccctgcttgtggaagtccaacgaaactggccatacctgatggcgatgagaagatgagggctgtttgttcttcttgtggaagagttcactatgaaaaccccaaaatggtaaatgctgaacaaataaaagaaaaaggaaaggatccatatacatttgtatttgtgctttaaattacgacactgaatgcctgttcgcacagtggccgtggattttttagttctacctacagtattttgtaggaggcaaatcacagctgcagctttaatctgcggtgaacaccccttcaattccatgattatagagcccgcattttttcattcatgtatgaagtgcttttgatgaacagatgtgtccccattttcttttttgtttaatctattggtgaaacaagggactatagctggcaatatttttttgttatatatgtgtaacacatgttggcttctattttctgccatttacaatatatatcatctggataggttgttggttgccttgttgagcatgataataaggttctcctttgcagaagaaagattgaaccagcttatggtctttggtaagttccctttgatgtttttctttcgattttttgttctg

SEQ ID NO: 141506 - DNA, 1578 bp, Zea Mays
ggaacgtgttgggcggccgacctcatgcctcaccccttccccgtcggcccccgactccccgagtcgccattgcctgccctcgttcggctcgatccccgcactacagcgcccgccaccaaccccgcccgcgcctccgctactaaagccgaggcctcacccaccacctgaccaccatgctcctccccctcctcagatcccacccgctcctccaccacgccgcgcgcctgtcctccccacgcacccgcctgctcctccgccgcgacgcaatcccgctcgcacgctccccgcctatccgcatggcggcctcgtccggctccggcgccagctcccctgcctcggcgccgccagctgccgtggtgcacaagtcaaagatcaaattttgccctgcttgtggaagtccaacgaaactggccatacctgatggcgatgagaagatgagggctgtttgttcttcttgtggaagagttcactatgaaaaccccaaaatggttgttggttgccttgttgagcatgataataaggttctcctttgcagaagaaagattgaaccagcttatggtctttggacacttcctgctggttatttagaggtgggggagtctactgctgaaggagcctctagagaaacattagaagaagcatgtgcagatgtagagatagtctcgccttttgctcagttggatattccactgattggccaatagagttacattattttccgagcaagattgaagacccccaacttttcacctgggccagagtcgctggaatgtgcactttttgctctggatgatataccattcgattctctagcattttcttcaatcattgtcaccttaaggatgtatactgaagatgtgaggtctggaagcatcaaatttcactattgcacgataaacaaaaggtaaatcatcccaccctttttgtagtaactgatcatcatcgtcattcataactctgatgacttctacaacttaggaagcttacgaatctttctctagttttctatgtgttctgttgatatctcagtgcaacttttctacagcactcacctatacgacaatcttgcggcatcttgaagttaacaaatcctgctcgagtttccaatgtggtctataacttgttttgtgcaacttggtttacaggttaggagccagcccttcagatcttcggagtttcgatattgataaccatatagccgtgtgaggttgaaaggttctaaaccttttgcgattgaggagaatggttttggcatacaacaggcgcgcgcgcacacaccattggagccttgtttggcgcctccctgcacattggaacagatttaaagtaggtgctggaactgtaaatgattcggtatcaaaaaggctggtttagccattttaggagattatgcgtttcgatttcatgggagttgggaggacagaattgtatcatagtgcagtaactcttggttgtaggattgagttatcctgcatgccatggttgtggcgcttcgtcagcgaccgaatgctgtaatgtggttacgattctctgagctccttttcaaccattaattccagttgtaaagcctgtattgct

SEQ ID NO: 141507 - DNA, 1465 bp, Zea Mays
ggaacgtgttgggcggccgacctcatgcctcaccccttccccgtcggcccccgactccccgagtcgccattgcctgccctcgttcggctcgatccccgcactacagcgcccgccaccaaccccgcccgcgcctccgctactaaagccgaggcctcacccaccacctgaccaccatgctcctccccctcctcagatcccacccgctcctccaccacgccgcgcgcctgtcctccccacgcacccgcctgctcctccgccgcgacgcaatcccgctcgcacgctccccgcctatccgcatggcggcctcgtccggctccggcgccagctcccctgcctcggcgccgccagctgccgtggagtagatgcgtgcttgctgaatcgatcagggcgttgactcaatccagtgggtagtgatcgtgccaattgccaattgggattggcttcccatgcagccaaaaacggctgctgtgctctctagtaaaatcgtgcacaagtcaaagatcaaattttgccctgcttgtggaagtccaacgaaactggccatacctgatggcgatgagaagatgagggctgtttgttcttcttgtggaagagttcactatgaaaaccccaaaatggttgttggttgccttgttgagcatgataataaggttctcctttgcagaagaaagattgaaccagcttatggtctttggacacttcctgctggttatttagaggtgggggagtctactgctgaaggagcctctagagaaacattagaagaagcatgtgcagatgtagagatagtctcgccttttgctcagttggatattccactgattggccaaagttacattattttccgagcaagattgaagacccccaacttttcacctgggccagagtcgctggaatgtgcactttttgctctggatgatataccattcgattctctagcattttcttcaatcattgtcaccttaaggatgtatactgaagatgtgaggtctggaagcatcaaatttcactattgcacgataaacaaaaggttaggagccagcccttcagatcttcggagtttcgatattgataaccatatagccgtgtgaggttgaaaggttctaaaccttttgcgattgaggagaatggttttggcatacaacaggcgcgcgcgcacacaccattggagccttgtttggcgcctccctgcacattggaacagatttaaagtaggtgctggaactgtaaatgattcggtatcaaaaaggctggtttagccattttaggagattatgcgtttcgatttcatgggagttgggaggacagaattgtatcatagtgcagtaactcttggttgtaggattgagttatcctgcatgccatggttgtggcgcttcgtcagcgaccgaatgctgtaatgtggttacgattctctgagctccttttcaaccattaattccagttgtaaagcctgtattgcttc

SEQ ID NO: 141508 - DNA, 1470 bp, Zea Mays
ggaacgtgttgggcggccgacctcatgcctcaccccttccccgtcggcccccgactccccgagtcgccattgcctgccctcgttcggctcgatccccgcactacagcgcccgccaccaaccccgcccgcgcctccgctactaaagccgaggcctcacccaccacctgaccaccatgctcctccccctcctcagatcccacccgctcctccaccacgccgcgcgcctgtcctccccacgcacccgcctgctcctccgccgcgacgcaatcccgctcgcacgctccccgcctatccgcatggcggcctcgtccggctccggcgccagctcccctgcctcggcgccgccagctgccgtggtgcacaagtcaaagatcaaattttgccctgcttgtggaagtccaacgaaactggccatacctgatggcgatgagaagatgagggctgtttgttcttcttgtggaagagttcactatgaaaaccccaaaatggttgttggttgccttgttgagcatgataataaggttctcctttgcagaagaaagattgaaccagcttatggtctttggacacttcctgctggttatttagaggtgggggagtctactgctgaaggagcctctagagaaacattagaagaagcatgtgcagatgtagagatagtctcgccttttgctcagttggatattccactgattggccaaagttacattattttccgagcaagattgaagacccccaacttttcacctgggccagagtcgctggaatgtgcactttttgctctggatgatataccattcgattctctagcattttcttcaatcattgtcaccttaaggatggtatttcctcctccataattgtctcctgcctgcttcacatttgctcttgccatttatacgctttacactaaatgctttaaacatgtctactatttgccacagtatactgaagatgtgaggtctggaagcatcaaatttcactattgcacgataaacaaaaggttaggagccagcccttcagatcttcggagtttcgatattgataaccatatagccgtgtgaggttgaaaggttctaaaccttttgcgattgaggagaatggttttggcatacaacaggcgcgcgcgcacacaccattggagccttgtttggcgcctccctgcacattggaacagatttaaagtaggtgctggaactgtaaatgattcggtatcaaaaaggctggtttagccattttaggagattatgcgtttcgatttcatgggagttgggaggacagaattgtatcatagtgcagtaactcttggttgtaggattgagttatcctgcatgccatggttgtggcgcttcgtcagcgaccgaatgctgtaatgtggttacgattctctgagctccttttcaaccattaattccagttgtaaagcctgtattgcttcatcttttatcttttaaaagtcacgttatcttc

SEQ ID NO: 141509 - DNA, 1784 bp, Zea Mays
ggaacgtgttgggcggccgacctcatgcctcaccccttccccgtcggcccccgactccccgagtcgccattgcctgccctcgttcggctcgatccccgcactacagcgcccgccaccaaccccgcccgcgcctccgctactaaagccgaggcctcacccaccacctgaccaccatgctcctccccctcctcagatcccacccgctcctccaccacgccgcgcgcctgtcctccccacgcacccgcctgctcctccgccgcgacgcaatcccgctcgcacgctccccgcctatccgcatggcggcctcgtccggctccggcgccagctcccctgcctcggcgccgccagctgccgtggtgcacaagtcaaagatcaaattttgccctgcttgtggaagtccaacgaaactggccatacctgatggcgatgagaagatgagggctgtttgttcttcttgtggaagagttcactatgaaaaccccaaaatggttgttggttgccttgttgagcatgataataaggttctcctttgcagaagaaagattgaaccagcttatggtctttggacacttcctgctggttatttagaggtgggggagtctactgctgaaggagcctctagagaaacattagaagaagcatgtgcagatgtagagatagtctcgccttttgctcagttggatattccactgattggccaagtgagtgaaaaattggcatagtcacaaagttgtaggttatttcgtccgctactaagttgattatctttgtattacaatgagatgcagtagagttacattattttccgagcaagattgaagacccccaacttttcacctgggccagagtcgctggaatgtgcactttttgctctggatgatataccattcgattctctagcattttcttcaatcattgtcaccttaaggatgtatactgaagatgtgaggtctggaagcatcaaatttcactattgcacgataaacaaaaggttaggagccagcccttcagatcttcggagtttcgatattgataaccatatagccgtgtgaggttgaaaggttctaaaccttttgcgattgaggagaatggttttggcatacaacaggcgcgcgcgcacacaccattggagccttgtttggcgcctccctgcacattggaacagatttaaagtaggtgctggaactgtaaatgattcggtatcaaaaaggctggtttagccattttaggagattatgcgtttcgatttcatgggagttgggaggacagaattgtatcatagtgcagtaactcttggttgtaggattgagttatcctgcatgccatggttgtggcgcttcgtcagcgaccgaatgctgtaatgtggttacgattctctgagctccttttcaaccattaattccagttgtaaagcctgtattgcttcatcttttatcttttaaaagtcacgttatcttcagatcgaactgagtgctcaatacatgtgcagccatgctcgttcgtgattatttgcaccctagaaacagcaaaaggtatcaagtttgttcatcaaattcagaaagaaaaagaactttaactatcaatatctctaaaacaattgctggaatgaaaactcgggtattataagattaggtctgaatgtctgattatggatatagatgtaaaccttgttgccaatggtattataaagtttagtcgtggtaaagaaaacactccgtttatccaaaaaaaaaaaagcaattaatgtgtgttcttcgttaaaaaacaatatataattaaaaata

SEQ ID NO: 141510 - DNA, 1697 bp, Zea Mays
ggaacgtgttgggcggccgacctcatgcctcaccccttccccgtcggcccccgactccccgagtcgccattgcctgccctcgttcggctcgatccccgcactacagcgcccgccaccaaccccgcccgcgcctccgctactaaagccgaggcctcacccaccacctgaccaccatgctcctccccctcctcagatcccacccgctcctccaccacgccgcgcgcctgtcctccccacgcacccgcctgctcctccgccgcgacgcaatcccgctcgcacgctccccgcctatccgcatggcggcctcgtccggctccggcgccagctcccctgcctcggcgccgccagctgccgtggtgcacaagtcaaagatcaaattttgccctgcttgtggaagtccaacgaaactggccatacctgatggcgatgagaagatgagggctgtttgttcttcttgtggaagagttcactatgaaaaccccaaaatggttgttggttgccttgttgagcatgataataaggttctcctttgcagaagaaagattgaaccagcttatggtctttggacacttcctgctggttatttagaggtgggggagtctactgctgaaggagcctctagagaaacattagaagaagcatgtgcagatgtagagatagtctcgccttttgctcagttggatattccactgattggccaatagagttacattattttccgagcaagattgaagacccccaacttttcacctgggccagagtcgctggaatgtgcactttttgctctggatgatataccattcgattctctagcattttcttcaatcattgtcaccttaaggatgtatactgaagatgtgaggtctggaagcatcaaatttcactattgcacgataaacaaaaggttaggagccagcccttcagatcttcggagtttcgatattgataaccatatagccgtgtgaggttgaaaggttctaaaccttttgcgattgaggagaatggttttggcatacaacaggcgcgcgcgcacacaccattggagccttgtttggcgcctccctgcacattggaacagatttaaagtaggtgctggaactgtaaatgattcggtatcaaaaaggctggtttagccattttaggagattatgcgtttcgatttcatgggagttgggaggacagaattgtatcatagtgcagtaactcttggttgtaggattgagttatcctgcatgccatggttgtggcgcttcgtcagcgaccgaatgctgtaatgtggttacgattctctgagctccttttcaaccattaattccagttgtaaagcctgtattgcttcatcttttatcttttaaaagtcacgttatcttcagatcgaactgagtgctcaatacatgtgcagccatgctcgttcgtgattatttgcaccctagaaacagcaaaaggtatcaagtttgttcatcaaattcagaaagaaaaagaactttaactatcaatatctctaaaacaattgctggaatgaaaactcgggtattataagattaggtctgaatgtctgattatggatatagatgtaaaccttgttgccaatggtattataaagtttagtcgtggtaaagaaaacactccgtttatccaaaaaaaaaaaagcaattaatgtgtgttcttcgttaaaaaacaatatataattaaaaata

SEQ ID NO: 141511 - DNA, 498 bp, Zea Mays
atatgagctctctccaccttcatcatggggacctttctcaaacttcttcggtgtacacttgggagacttgagtgattaaaaaactttcgactaccttcaacatgctcaagctcgccgaggaagccagcaggcggcaacatcctgttcgactacctcatcccgccgacggggatggacaagtgcagcacgaatggacaagtgtagcgcgaacaacgtgggcagtggcaacgtacacaaggcgggcatggtgatgaacaggttgcccatcagtgtgtacgcattggagacgtttgggtttacgacggcaacgtccacagacggttgatgagcaagatgctcgggcgcattggggattcaccattgatcaggttcggcacatacacatgcggcgcatgcgccgtgtcgtgcacgctcaagtgggacgtgaccactgtcatggagtacaagggcctacctctgcagcagaccgtcgactactatgttagggacacgatgtag

SEQ ID NO: 141512 - DNA, 2487 bp, Zea Mays
atggagcggcaccgccaaagatcgcggcgccaacaagaagacggtctcgacgggcacgatgaggacggggcgctgtcagcgttcgtctgcccgatcaccatgcaggtgatgcgggacccggtggtgatcgacacggggcatgccttcgagcgggaggccatcgcccggtggttcgccgagtgccgcgacctcggcaggggcccgtgctgcccgatcacgatgcgggaggtgcgcagcgcggacctgaggccggtcctggcgctgagggacgccatcgaggagtgggcggacaggcaacagagggacgagctccgcagggcctgccggtggctcaccaaggacgccacggagaaagaggcggtgcgggcgctaggatgcgtcgcgcgagggtggagccgcggagggcaggcgagcaggcgtacggtgcgcgcggaggggatcataccgatggtcgggggcatgctgagaagcggcagcgccatggtgcgcctcaaagcgctggaagctatccaagaatttgccagagaaactgatcaagacagggaagctgtgtcgcaaggggacaccattcgcacgatcatcaagttcatagattgtgaggactgtcaagagagggaactggcagtctctgcgttgtgcgacctttccaagtctgagctagtatgtggaaaggtgagtgaactgaatggagccgtgcttatactgtgcaaggtgtgtggaagcaaagctgacaacccaacaatagctgagaaggctgagaagacacttgagaatttggacaggtgtgagaaaaatgccgtgcagatggctgaaaatggcaggctggaacctctacttaacctgcttattgaaggttctccagaaacgcagctgctgatggcatcctctctagaaaagattgtcttgtctaacgacttgaagatcttggttgcgcgaagagtgggttccttgtttggtggcatcgttgagaagggaagcttggaagcaaaagaggttgctttcaaggtgctagagcacgtatccgccaacgcagacagcgccaaggttcttatagaggaaaacgtcctcctccctctcttccgagttctctctatcaaccgcaccagcctccttccaccgaggctgcaagaggctgcggctgcggttctagccaatctggttgcgtccggtgtcgacttcgggacagtgccccttgacggagaccgtactctggtgtccgaagacatagttcacagcctgcttctcctgatcagcaacacctcgcctccaatccagtgcaagctccttgaatttttcggcaccctgagcagttccacggggacagtgctatcgatcgtctcggctataaaatcttccggcgctatcaccaacctggtgcagtttgtcgagagcgatcaccaggaaagccgcaccgcatccataaagctgatacacaaaatctcgttccacatggagtacgagatcgcccaagtcttccgtgcaagtccgacgctgcttggctgcctagtcaaagttgcattcgtaaacgatggaaacgccgcagcagatgagcaagatgctgcgcttcagatcctggcgaacctccccaaaagggacaagcacctcaccagagagctgatggagcaaggggctttcaaggtagccgccagcaaggttctgagcatctaccggagagatgctggaactggaagcgacatctacgacaacgcagtgctcgagggccttgcaaaggtcttggcaaggataacgtatgccttgcgggacgagccccggtgtgtttcccttgctcgagagtacaacctcgctgccctgttcgccagcttgcttcggctgaacgggcttgacgaggtacaggtggtctctgcgaaggcattgatgaatctctcgttggaatctaagtatctgaccagtacgccgaagtttgatgctgaacagaggtctaagctcgcactgtttgggaggaaaccgacaaacattcagctctgtcgtgttcattctggagtctgttcgatcagggacaacttctgcatcctagaagggagagctgtggaacgactgatccattgcttgaaccattctaacaagaaggtcgtcgaggctgctctggctgctatttgcaccctgcttgaagatggagtggaggctgcagagggcgtcttggtgctccataggtctaatggagttgcacctatattcgacatcttgaaggagaacccgacaggcagtcttcagcacagggtgacgtgggctgtggagaggattctaagggcagaggatatcgcccaagccgcttcaactgatcgcagtctgggatcggcacttgttcatgctttccaacatggagattccagaacgcgacgtatcgcagaggcagcgttgaagcatgtccagaagctacccgttttttcactcatcattgataagcgcccctcgatacgaggttcatccatgggaagcatggagcgctttatcaagtttgatcgctag

SEQ ID NO: 141513 - DNA, 2694 bp, Zea Mays
ccgaccccagacccagagccaggccgggccaccaccacctgctgacgccggcgatcgatcgggagaaaaactgcttataaggggccggggttccgctgcaggtaaaggcatcgatccgcagcagtgcccaaagaggaagagagcaagcaaggtgtctttggcaacgctcatcagatcacacacccccgcgcgtgctagctagcgagctgctgtgtaggatcctctcgccagccggtgcaccgccggccgggcgccctcctcctcggcgtctgtcatcatccgccggccggcgcgcggcggtggtatcatcagtacgtacttctgctgcttcgtttaagtagtagctcatcgcttcaccgccgccgccggagagagagggagagagagacagatcggtatcatcatcatggcgccggtggggctcccgccgggcttccggttccacccgacggacgaggagctggtgaactactacctgaagcgcaagatccacgggctgaagatcgagctggacatcatccctgaggtcgacctctacaagtgcgagccatgggagctcgcagacaagtcgttcctgccgagccgtgaccctgagtggtacttcttcgggccacgggaccgcaagtaccccaacgggttccgcaccaaccgcgcgacgcgggcggggtactggaagtccacgggcaaggaccgccgcgtgctgcaccacggcggccgctccatcggcatgaagaagacgctcgtctactaccgcggccgcgcgccgcagggggtccgcaccgactgggtcatgcacgagtaccgcctcgacgacaaggacgccgaggacacgctgcccatccaggacacctatgcattatgccgggtcttcaagaagaacgccatctgcaccgaggtggacggcctgcaagcgcagtgcagcatggcgctgctggagggcgcctgccagcagctgctcaccagcggcagccaggagtaccagacctcgtcgccggatgtgcccgtcgcgtccacatccggtggagccgacgacgacgcggaaaaggatgagtcctggatgcagttcatatccgacgacgcgtggtgctccagcacggcggacggcgccgaggagagcacctcccgtgtggccctggccagctgaaacccttttatctgttgttcaaaaatgatgcgactgagaaatcctcctaataactatttttcctcctttttctctgatcgagatggtgatgatgatgccggctagccatcaataaccaccgtgatcatgtctacaaagtgtaagatcatagcacaataagcatgcatctttggggttttcagcttccatcctattgctgggggttgaaggatcgttgccgcctcaagattgttctcagaatccttccttgagttgagttcataaggagggttatatatactcctatattatatatatatagtatataaaacaaccagctcccccttattttcttcttctttgggttttccatcgcatgtattgtactttttgagtggtgtctttttttctcttatgtgaagcatactggttgtagctatgcaattgcatagtttttgtcttgtgcctatatgtcagatgaaatataatgcgcattatgaatggaaattgaagacaattattatgaatattatacctgtcctcttaacttgtatcgatctccaaaatctaactattctgctcatcttactaattgcatccgagttctgccaataaaatgggaaaacaaaaaaagaattcaacagttcactggtgtacatgttatcataagatgagaatatttgcatatattgacatatataaatattatgttactgaaaagtttggagattatttgtcaaaaacaatgcctcattttgcaacacatcaaatatctacttacacatgtaagaaaccggttttcactttaagcatatataaccagcagaaaggctgtatatcttgttcagacatcagtgtttttttttcttaaaattatactacctccattctcgaatatttgtcgcccgctagttcatttttaaactatacgacgataaataaaaaagaacggagtaagtatcatatatacagaacatgagtgaagtctggagaacatatataaaggtctctatagatccgctaatatggaaaagcctaacagcaggcgttagatcacatgctgtcagtatcgatgctacgctgagctaaaaacacttgggttcacaaaggatgaaaggattgaagaaatactattccataagtaatgtcagtggttaaacacatgatgttgcagcagccctttctggaatgtcaatcagaaccccttccaggtcaataactatgaccagtttggctatatagaaatgctttgcacctcctaccttgacattcttgggattcatttttcaacatgtcacagcaaattacctccgagaagtgacatgatagcagacttaagataatcaatatgctgaagaattctgtagattttagcaaagtagtactgttgtattctatcatgtttctaggtatcaagcaaaactaaagttcagaagtctacattacaagcatcttcatggtgacacttcgtcacaagaatgtagcctctgtaatgttcagagcgcctccttgatgtcaacacaccacgtcaccacctttgaactgttccgccatttcaaccggcatatcaa

SEQ ID NO: 141514 - DNA, 738 bp, Zea Mays
atggcgccggtggggctcccgccgggcttccggttccacccgacggacgaggagctggtgaactactacctgaagcgcaagatccacgggctgaagatcgagctggacatcatccctgaggtcgacctctacaagtgcgagccatgggagctcgcagacaagtcgttcctgccgagccgtgaccctgagtggtacttcttcgggccacgggaccgcaagtaccccaacgggttccgcaccaaccgcgcgacgcgggcggggtactggaagtccacgggcaaggaccgccgcgtgctgcaccacggcggccgctccatcggcatgaagaagacgctcgtctactaccgcggccgcgcgccgcagggggtccgcaccgactgggtcatgcacgagtaccgcctcgacgacaaggacgccgaggacacgctgcccatccaggacacctatgcattatgccgggtcttcaagaagaacgccatctgcaccgaggtggacggcctgcaagcgcagtgcagcatggcgctgctggagggcgcctgccagcagctgctcaccagcggcagccaggagtaccagacctcgtcgccggatgtgcccgtcgcgtccacatccggtggagccgacgacgacgcggaaaaggatgagtcctggatgcagttcatatccgacgacgcgtggtgctccagcacggcggacggcgccgaggagagcacctcccgtgtggccctggccagctga

SEQ ID NO: 141515 - DNA, 771 bp, Zea Mays
tcctgagatttcatcactccgaactgaatttttgagatatgtttgttttggaagagaaatcattcctgcctggtagagactccgagtggtacttctttgggccaagggataggaagtatccaaatggatgccgcacaaaccgcgcaacccaggcaggatactggaagtcaacaggcaaagatcggcaaatcagctaccagaacagatcaatcggcatgaagaagacactggtctactacaagggtcgagctcctcaggggctgaggaccagctgggtgatgcatgagtaccgcatcgaggaaagcgaatgcgagaacaccatggggattcaggactcatatgcactgtgtcgtgtcttcaagaaaaatgtggcactcggagagcttcagaagcaaaagcaaggcgagtgcagctcatcacaatctaaagaaaaacaagaacagtttacaagtatcagggatgctggacagtcatctggttcaaatgagcacggtaaagacaacacatggatgcagttcatagctgatgatctatggtgcaaccaaacaaagtgatgggagtacgaaactgatgacacagttgtttaacttcatctaactagaaacttctcagttgcacattgactctgtatatgtttgataacatcacttctcaggttggaatctggacaggatgaccactaaatttgggctctgactcttcatgtagagttatagtttcctcttttggtactgtactagaaaaacgtcctactttggtacttcaaggctc

SEQ ID NO: 141516 - DNA, 681 bp, Zea Mays
gcatttccccccaattctctcccgcccaaagccccaaaccaccacccaaaatcctctctgccgcccgccgatggccaccgccgccgccatggccgatgacgacgacttcgcctcgccgccgctcgccccgcgtgcgcgggaggaaggaggaggcagaggcgtgtaccaggtgggcggcgtgccggtggagttcccctacaagccctacgggacgcagctggcgttcatgggacgggtcatcgcgacgctcgaccgtgcccggcggcaggggcgctcccacgcgctcctcgagtcgcccacaggcaccggaaagtcgctctccctcctctgctccgcgctcgcctggcagcggcactacccgctccgttcccctcccgcccccgatccattgctccacggcggaggattcgtcccagatgatacgcagccgcagccgacgccagtcgtcccggagaaggctgtcaagaagaagaacgccccgataatctattacgcgacgaggacgcacgcgcagataagccaggttgtccgggagtaccgcaagacgtcgtaccgagtgcgcatggccatcttggcctcaaggaagcactactgtgtcaataaatttgcttgcgcgagcgacaacattgatgagaaatgcaagtcactgctagacaagactgttcaaggttgcccagaatt

SEQ ID NO: 141517 - DNA, 391 bp, Zea Mays
gttggaattccttttccaaatataaacgatgttcaagtaaagctgaaaaggagatataatgattcatacaaatcatcaaaacatctgttaagtgggagtgaatggtactgtcatcaggcatttcgtgctttaaaccaagctgcaggtcgttgcattcgtcataaatctgattacggaggcataattctgattgatgagcgatatcaggatgacagaaatgttctctacatttccaaatggcttaggaatgcaatcaagaagtatgatagcttccaggagacaatggctaagttgcaaaagttctttcagaatgctcaggtattgctctttttgcacatttgattttctaaatgtggatgggcttatctaaaatgtgtgatgccacttcagg

SEQ ID NO: 141518 - DNA, 157 bp, Zea Mays
cagcagttacaatcatattttttaacaaaatttctcagagttattcagtacttacaatcacatcagagcaactcagcagttgcatccacactacaccagcagttgcaattacaacacaccatcagttgcaatcattttgtttacatttttttaacag

SEQ ID NO: 141519 - DNA, 301 bp, Zea Mays
ccatcatagtgttctgagatttaaaacaaacgtctattgtgatctgagatttaaaacaggcatcatagatgcttggggtaagtacagactgcaggctaaacatcccaatccaacaacggtcgagtgccgatgaagcgaagaaactacaaactaaactgcctcactccagggacgggacgacacttgcaaggaaactactcagagaagacggcactaatctactgcatctagaaagtccttcgagaaagcccggttaggccgacaacgacgaagatttttttccctgactgcaaacacttgg

SEQ ID NO: 141520 - DNA, 381 bp, Zea Mays
tccttccaagaaacaaggttgttggcttcatgcgtcttgtagctcctccatatcttcatggtaggtaggagcgtgtcagtcgggtggtcaaagctctgccacaccatgatgccagtcggtgaccgtaggatgaggttgcctgagttcgaaagcaccgccacggatccagtagcgttcgccgtcctcggcgacggcgatgagcttccagttccagcggccgtggtgttggtcttccagagaacacggccgttgacatcggacaagacaaggttagaatcgttggtaagaacaagtgaaggggcggaggaggagatggccggtgccgcccggtttgcaacccacaccgcggtgagccgggggacgttgttgtaccatatgcca

SEQ ID NO: 141521 - DNA, 1488 bp, Zea Mays
ggtataagactactttcattttcattgatatctgctgtttatccaagcacatttatgcttgccttcttaagataaagagctagagagaaaaaggagtatagaagaaaaacaaattaatggatatcaacaattaaccagcaggaaacaaaaaccaccactattgcacaaacatggttcatcttagtgtacaacgccaactcatcatctcgacttgcctatgcaatgcaacgtgaaacaaaagacacacatgcatctcgcagcatcaatcaatccacgtacgtacaccctctccgatccgaaagacaatgaagttgcatagcatagccgttgagcttagttgccggggacgaagttggtggcgtaggcccatgcgttgttgttgactgggtcagcgatgtggtcagcgaggttctcgagcgggcccttgccggtgacgatggcctggacgaagaagccgaacatggaaaacatggcgaggcggccgttcttgagctccttcaccttgagctcggcgaaggcctcggggtcgtcggccaggccgagggggtcgaagctgccgccagggtacagcgggtcgacgacctcgccgagcggcccgccggcaatgcggtagccctcgacggcacccatgagcacgacctggcaggcccagatggcgaggatgctctgcgcgtggatcaggctggggttgccgaggtagtccagcccgccctcgctgaagatctgggagccggccttgaaccagacggcctcgccgaacttgacgccgttgcgggagagcagctcggggaagacgcagccgagcgcgccgagcatggcccagcgggagtggatcacctccagctcgcggttcttggcgaatgtctcggggtcggcggacagcccggcggtgtcccagccgtagtcgccggggaactcgccggtgaggtagctcgggggctcgccggagaaggggccgaggtacttgacgcggtcggggccgtaccaggggctgccggacgccgccaccttgggcttgcccacggtcttgcgcatggtgatgcggccctcgccgaaggaacccaccttgatgggggtgccggccatcgccgtggaggagatcgccatggtggaggcagccattgctgaagctgagcgtgaaagtgttggaccggttgctatagatgccgctggtggagtgtaccgtggggggcgcacctggctaaatagcgtcgccggcgatcgggtccttatctcgtggaatcttaagacgagttgccattggctcgccggaggtgaggtgggcggatggggtggctgatgtggccgcgcgctggccaccaggtctccgccagtcgccagatattctcaccgcgccgggcttttgtttttgccgtgcccggtgcccctcgcggtgaattttgcggcgtcgctaggtgttgggctcgctggcgtcctattggccggttgatctgatactggcagatatttcggttggtgtgagtgtga

SEQ ID NO: 141522 - DNA, 959 bp, Zea Mays
aacgaggactccaaacgggctgcgtgcacggacatctcacccttgtcgcggcgtcgtgcacccgagtaggccggttgtgtcgatctgtggagaggagacacgtcacgttacgatccccaacttaacgccgatcggaggccggagagaccggctcagcctcgctccgccgccgccggcgaccatgtccctggcggctatcttcgtcttcctcatcgtgtccgcgctgcagctgctctaccgctacctcgacctcgccagaaagagcggaggacttagtgatgagcagatcaaagtgcggcttgaaatcaagcaacttctcaaggaggctgatcagttgtcaacgccgtccacatttgcacaagctgctaaactcaagcgcctggctgctgccaaggagaaggaactggcaaaaatgcaggaacatgaccttaaagggaagcaatccttatacgacaaatacacaaaatttttgttggttactaaggtcataatttatgctgtgctcgttctgtgcttttggagtactcctgtaactgcagttccacaacatcttctacagcccttcggaaaaatgttttcctggagaggtgttgatactgccaccggcaatgttgtggttggaatactcccgtggctgtttttgacctctcgggtcagcaagatgctgtgccagaaactgggcttcgtgcttgtgcgtccgtagcgcctttccatgagaaagtcagcaagttgctgcacctaaacaagactgctaactttgttcttcttctatatctttttataatcaactgtttcacttattgtccactatatactctgtccgttcttttttaattgtcgtgttttagtttaaaaattagcgggcgataaatattcgagaacggacttgtagtcatataaatttgctgtgctatgtgctcaagcggatacgtgtataagttactagtagccgtgaatga

SEQ ID NO: 141523 - DNA, 245 bp, Zea Mays
gaccatcacgtccgtcagtccatgcccgtgcagccgtgctcccatgcccctgctccagccaattagagcttcgggacaatctcctttgggcatgtgcgtcagcaatggcgggttaacagtgaaagtaccagcagaacaccaggttctcggtctctccgagaaaacaatggcacgaagctcgaggcactacggttttctctctctcttcgcccttgcgtgaagaagaccacatggagatggaggag

SEQ ID NO: 141524 - DNA, 2288 bp, Zea Mays
ggccacctcccccctgctcgctcacgacccccaacacgcgagtacgcgacgacgcccctcacaaaaacaggggccaaaaaggataaaaaaaagtggggaaaagaacgccgggaatgggcaagcagcagcaggcgccaccggcgcggcggtccccggcgatgtcggcgcctccgccgccgaagcgccggaagaagaagggccgcccgtccctgctcgacctccagaagcggagcctccgcctcgagcagcagcagctaccccaggggcgccgctccaaccgcaggagcgccggctccgcggacgaggacgacgatgggcccgcctccggctccggccgccgcgagaagaagctgcgcctcgtcatgggcctccacgacggatcagccaagggagaaaagatgaggaaagcgacggatgggcgtgaagagccgtcagattccgggcccacaacacctttaccgaacaaaaagttgttgctcttcatcctcgacaggctacagaagaaggatacgtatggtgtattttcagagcctgttgatcctgaagagctacctgactatcatgacattataaagcatccaatggatttttcgacaataagaaagaagctcgataaggaggcctatttcaacttggagcaatttgaggatgatgtgttcctgataacctccaacgcgatgtgttacaattcaccagatacaatatactatcgacaggcacgaggtattcaagagattgctaaaaaggattttgagaatcttaggcaagatagtgatgccagtgaaccagaaccggaaccagaacgagaacccaagccggagcccgaaccagaagaaccaaagccacagcctcgccggggcaggcctccaaacaagaataatgccaaacagaaagttgggaagccaccagcagaacgtgccactgcagacttttctggtgcaacacttgctactgcggcaaatattggacggcatgcacaggcagatgttgatctgtcacgaagagtaatggataaagcgatgattgcggatgtgttgagagcttcttttgccaacctaaggaatgagcacaactggtctggttatgggggtacatggtctgcaaaaacggggaagaggccgattctgatggaagatagtcgccggagcacatattatgagactcaaccatccagttcaatatatgagctgccggtatcgtcctcctacaatgggaccgagaagctgctagtaccagttggggttcagttaccgcagtcctattcccacagcctggcacgttttgctgcacaacttggccctgttggctgggaaattgcgtcaagacgacttgaacggagccttgctcctggaacaaagtttggtcgtggctgggtaggagatggtgaaacgccgccgaacccatttcagacacctgtactcgctgcattttcagaaacaatggcaccaccgagcagtatagcagcatcaggtgagcagccatctatgaacgcgccccccgccacagaggcctgtgctggcagcataagccatcgggtgggatctcagccatgtgcttctatcagcacagtgcagacgataaattccgaagcattagcaagccagcaatgcggatccgtaccacaggtttctataaaccgaggcgaacgtgctgttgagatgaagggcagcactaataatcttcacgggcacccggccatgccgcaaactatgaatggtttcaatgccgttccaggacgggtgctgttcccacctgcggctcaactggtggtgagtcagatgcagacacatacggctgattgagtaacaagtagccattggatcaacattgtcaacatggcaattgaacattgcccgcttccattcatcagtcgcggtcaccaagcgacgacggccttaagccgcaccctgccagtggcttggcgcccaccacattgggggtgtctggtcgctgttgaatcgtcgcgcctcaacctggcgctgcaactgtgaatctgttgtgtaattgcgtaagtaggaattaggatgataacgtgcatagatgtgttgggcggatggtgtaacagcggtgagttgcagtttggagatttagcgattctgaatgtgtagtagaaaaaccacaggggaaacgaaacaacatctgtatagactattcaggatcaggaggtttttttagcgtttcggcgactagcaacaggtgcgatcgagcatgaaatcgtgcgaaccagattgtctgttgccggtattgtttctatatacatcaatctgacggtgttctgggttgcaggt

SEQ ID NO: 141525 - DNA, 1826 bp, Zea Mays
ggccacctcccccctgctcgctcacgacccccaacacgcgagtacgcgacgacgcccctcacaaaaacaggggccaaaaaggataaaaaaaagtggggaaaagaacgccgggaatgggcaagcagcagcaggcgccaccggcgcggcggtccccggcgatgtcggcgcctccgccgccgaagcgccggaagaagaagggccgcccgtccctgctcgacctccagaagcggagcctccgcctcgagcagcagcagctaccccaggggcgccgctccaaccgcaggagcgccggctccgcggacgaggacgacgatgggcccgcctccggctccggccgccgcgagaagaagctgcgcctcgtcatgggcctccacgacggatcagccaagggagaaaagatgaggaaagcgacggatgggcgtgaagagccgtcagattccgggcccacaacacctttaccgaacaaaaagttgttgctcttcatcctcgacaggctacagaagaaggatacgtatggtgtattttcagagcctgttgatcctgaagagctacctgactatcatgacattataaagcatccaatggatttttcgacaataagaaagaagctcgataaggaggcctatttcaacttggagcaatttgaggatgatgtgttcctgataacctccaacgcgatgtgttacaattcaccagatacaatatactatcgacaggcacgaggtattcaagagattgctaaaaaggattttgagaatcttaggcaagatagtgatgccagtgaaccagaaccggaaccagaacgagaacccaagccggagcccgaaccagaagaaccaaagccacagcctcgccggggcaggcctccaaacaagaataatgccaaacagaaagttgggaagccaccagcagaacgtgccactgcagacttttctggtgcaacacttgctactgcggcaaatattggacggcatgcacaggcagatgttgatctgtcacgaagagtaatggataaagcgatgattgcggatgtgttgagagcttcttttgccaacctaaggaatgagcacaactggtctggtgagcggaagtttgaaagacttgaagcttactcaggttatgggggtacatggtctgcaaaaacggggaagaggccgattctgatggaagatagtcgccggagcacatattatgagactcaaccatccagttcaatatatgagctgccggtatcgtcctcctacaatgggaccgagaagctgctagtaccagttggggttcagttaccgcagtcctattcccacagcctggcacgttttgctgcacaacttggccctgttggctgggaaattgcgtcaagacgacttgaacggagccttgctcctggaacaaagtttggtcgtggctgggtaggagatggtgaaacgccgccgaacccatttcagacacctgtactcgctgcattttcagaaacaatggcaccaccgagcagtatagcagcatcaggtgagcagccatctatgaacgcgccccccgccacagaggcctgtgctggcagcataagccatcgggtgggatctcagccatgtgcttctatcagcacagtgcagacgataaattccgaagcattagcaagccagcaatgcggatccgtaccacaggtttctataaaccgaggcgaacgtgctgttgagatgaagggcagcactaataatcttcacgggcacccggccatgccgcaaactatgaatggtttcaatgccgttccaggacgggtgctgttcccacctgcggctcaactggtggtaccacagtccacagtgtag

SEQ ID NO: 141526 - DNA, 734 bp, Zea Mays
atggttcaccgctcccctatttgacagctcgcgagtcgagtcagccggccgacgacagggagcctcgcctccggcgccgcggcggcgatcacccaattccacccccactgccttctcctatctccccacactaccgctctgtttcctccaccatccgcttgcgtccacgcgctctctcgttaagccatcgcttgcgtcaacggccgcgccctctagtcgttcgacgaaacgccaccgagccactgacgcgtccgctgcacgcgtagtcgcgcttccatcttgctccgccgccccgcagctcctagccggagggaggccaccgatccatgtctgtcgccaagcgctacgtgctgcgcctcttcatctcgctcaagtacgtgacggcgaacgtggtggaccggcagagcggtcgcatcgtgacgaccgcctcgaccgcggagcggcccctgcgagacgggctggagtgcggccgcgcctgcaacgcaaaggcggcggcagccgtcggcgaggtgctcgccatgcgcctcaaggtggacggcctcgcgcgggagcccatatacgccaacgcggagaaagaggtcgcgaagaaagggttcaagaaccagaccaaggtctgggccatcctcaatgcgttgcgcagtcacggggtcaacctccacatcgacgacgatggcgaccacaggccgcacgtctgaaacaaccataagttcaggagtttgctcctccaactaaca

SEQ ID NO: 141527 - DNA, 920 bp, Zea Mays
aacagagcagagctttaaaacctgagaaatttcagaatttgagtcacccgacaaaagcaaagagagaacggagagaccgaacacaaaagaccacgaagcggaagcgcagccgcagaccgccgccggcgcacgacatgtctcgacggcggcgtggaggctccgattcggacggcgaggacgatagcttcctctaccgctaccccctcccatccgtcgccgcctcagagggtggaggcggcaaaccacggggcggaggcgggggctcgggcggcctcgcgccgtccaaatccaccgtctacgtgtccaacctggacttcgcgctcaccaactccgacctccacctcctcttctcccgattcggccgcgtcgcgcgcgtcactgtcctcaaggaccgtgaatcccgccgcagccgcggcgtcgccttcgtcctcttcgtcagccgggaggacgccgcggccgcggccgccgagatgcacggcaaggtgctcaacgggcgcacgctctctgcctccatcgcggccgataacggccgcgccgcggagttcatccgacgccgcgtgtatcgggacaagtcgcggtgctacgagtgcggcgaggagggtcacctctcgtacgagtgcccccgaaaccagctcgggccccgcgagaggcccgcaccgtctaagaagtcgcgccgcggcggcggcggcggcggcggcgggcgtggtcgcggtcgcgggggccaggctgattggcattcggatgatgatgaggatgctgctgccgccgtggcgttcgaggatgacaagtgggcgtcggtggtggatacaagggaagtggaggagaaggcggctgggaagggagaaggaatgggaaaggcggcgaggagggagaagaggaaatgctacttcagtgacgagagtgacgaggacgacgactaa

SEQ ID NO: 141528 - DNA, 414 bp, Zea Mays
gatcttagtgaactggatagccctttctcggagaaggtggtgagggatgcgattgctgatctgccttctgacaaggctcctgggcctgatgggtttacagggaggttttacaagacctgctggagcattattaaggaggatttgctggctgccctgaattttctgcaccaaggaaatgctcataaacttggattgttgaattcagcctatcttattcttctccctaagaggtccgatgctatgactgcaagcgattataggcccattagtctcatccacagttttgctaagttggtcaccaagttgctggccaacaggttgggtcctcatcttcatgagttggtggcagccaatcagagcgcttttgtgagagggagatcaattcatgataattttatgctggttcatcagtct

SEQ ID NO: 141529 - DNA, 1812 bp, Zea Mays
aaaaggctgtataaaagccacctgcctccctctcacagctcctccctcccaagaactcggaagtcggaagcagggcaagggatggatagcaagtcggtgggaatcgtcggcgcaggcgtgagcggcctagcagcctgcaagcacgccctcgacaaggggttcaggccggtggtgttcgaggccgacggaagcgttggcggagtgtgggcacacaccctggagtccacgaggctccaggcgccgacgacggcgttccggttctcggacctggcgtggccgccggagagcgcgagggaggcgtacccaggccaccgcagggtcatggagtacataaggtcgtacgcgcgtgcgttcgacctcctcaagcacatcaggttcaacagccaggtgctgggcgtcgagtacctcggtgcgaccgaggaagaggtcatgggctgggatcagtggtccggcgatgggacggcgttcggagccgtgaagggtggcggatggcgcctcaccgtccaggacttgaaagtcggtagcactgaggtttttgtggtggattttctcatcctgtgtattggaaggcacagtggaaccccaaacatcccagagttcccagcgaatgggcctgagctgttcaaggggaagatactgcactcgctggactactcctacatggacgacggcgacgctgctgagttcgtgagggggaagcgcgtgacggtgatcggctccggtaaatcggcgttcgacatcgccgcggaggtcgccaaggtgaacggtgccgcgcagccatgcaccatcgtgtacagaacaaggcactggctggtccacaagtccagcgtgtggggagtcgacctcagctacttctacctgaaccgcatctcgcagctcctggttcacaaacctggtgaaggattcttgcgctgcatgctggccgccgcactctctcccttgagatgggcgatctctaaagcgatcgaaacgtactacaagtggagcgttcctctgcggaagcacgggatggtcccggactacagcttctccttcgccatgtcctcgtgcctgatcgcgatgctgccggaaggtttctacgacagggtcgacgaaggcagcatcgttctcaggaaatccaaggcggtcggcttctctagcgacggagtcgtcctgcgagacagaaacgaaagcgtgagaagcgatatcgtgatcctggcgacggggttcagaggagaccagaagcttagggacatcttcactgcgaactggtgcagggagatagtggcagggtcaccggatacagcagctcctctgtacagagaatgcatccatccccggattcctcagctggctatagtgggttactccgagagcctcaccaacatatacgcctcggagaggatgagcaactgggtagctcaatttctggccggcggcttccagttgccaagcgtgagatgcatggaggagagcgtggcggagtgggcagagtacaagaaccgatacaacgggaggtatttccgcaggtcctgcgtaagcaccgctaacatctggcttaatgatctgctgtgccgagatatggggtgcaaccctagaaggaagaaagggttcctggccgaatggttccagccatatggacctgcggactatgcaggtctttgctgaagatggttgcattgcatgcctgtcagtgcatactcctaggaagagatgacagagttgctacctccatgggtgtaatactgcaatgtgaaacgtacaagcaaaatatgtctgatgtttgaactgtaaggtgtgaacctatgagacctgtctaaacaattttgcaac

SEQ ID NO: 141530 - DNA, 279 bp, Zea Mays
accgagtcagcccaccaacacaatcaactgaactaattgaaactagccaggcccagcccaacatggatgcaaattggcaaaaccctagctagcagccagccgtccaccgcccacgcccacgcagtcacgcactcgctgtcgctgtagagacgcacagccgccgccgccttgcgtcactccgccgcgtctgcgcggcccgcggctgcagctgaccgcctctagcctccgctcgtccggtcgtccctcaccctctccggctctccctcggcggacggtggc

SEQ ID NO: 141531 - DNA, 1990 bp, Zea Mays
cgggccccaccaccacaccggcacacctcactcctcagtgccgtctcctccctcggattcccacttgcggacatctggggcccacaggagcgctcaacgcaggccgcgcacggcgcaccacccagtctctctctgccacctagggtcgttgcctcgtcgaggagcatctctgcagtgcagcggcagctgtgtccaactaccaagtcaaggtgaccgttgggctgggcggcacgagacgcggagacgagacgcaacaaaacccttgtcagtcgcccgagccccaaggctcgcacccacgccagcggcaccgcacccccacccacctcggcggcgagtccgagccccaggaacgaagggcgatggcggcgatgatgatggccacgtccgagtcaaagtcccccgcccgcgcgctgaggcggctggctggcgccgcggtcgccgccgtgctgctccgccgcaccttcagcgcctccaagtgcaagacggaggcgcggatggcgacggcgcggatgaagctgctgcggaaccggagggaggcgcaggtgcgccagatgcgccgcgacattgccgcgctcctccgcgacaaacaggaggataccgcacgcatcagggttgaacatgtaattagggaacagaactttatggcagccaacgagatcattgagctcttctgcgagctgattgttacacgccttcctatcatcgcaaaacagaaggaatgtccagcagacttgaaagaaggtatctgcagtttgatatttgcagctccaaggtgctctgagctccctgaacttggtcgcatacgtgacatttttgaaaagaagtatggcaaagattttgtttctgctgcagttgacttgcgcccagatgctgctgttaacaaccttctgattgagaagctgtcgattaagaagccttccgggcaaattaagctgaaagttctaaaggatatagcaaaagagcatcagattgattgggataccgctgagagtgagcaggagcttctgaaacctcctgaagagttgattaaagggccaagtacatttcttgaagcttccaacatgcctgttaagaatattctgacaccatataccgtgcagccagatccagttaacttcagctataggtgttcggatgacgaatatgatgacaggggcactatgcaattcaaagatgcagcttcagctgctcgagcagctgcagagtctgctgagagagcaacatctgctgcaaaggctgcagctgattttgtcaataataacaataacaaccatccatttgatgaagatgaagattgcaaagcttcaactcatgaattcactcatacactcaagagacagtcaatgagcaactcgagtagatcctccttgaaagaagatgcaaatgcctttgatgaacaaaaacctcatgaagggaaaacatacagtgcaagaaggttcagtggaaagaaccatgtagaatatgacaaagacggctaccctgcagatttggacttgaagacacggagaaggaactgccgtgctgctcggaaggtgcactcagagataaagtttgatgattctgagggactgtgttcagaatccgaaggtgaaaatgatgtggagattcagtctgtggaaaggccattgcctcctaagagtgagctgttttcagaaaaccgtcactcagaagacgaagagcatgatcaagatttccctgaattgccgaagacaaaccttcattctcgtgttcatccaaatatgcctcttgactatgaaactctcactgcacgctttgaggctctcaaatctggcaagcttccgtagtgcaacaaaaagaacagcatcactggatgttacaattccttcttgctgtttttgtataatatgacatgttatagtagggtatagtgtctaatgattttgattttggctgagcctacggatttgtcgtttcaaactattgctgcatttgaactgttcgggtatataaaggttggttgaaatgataa

SEQ ID NO: 141532 - DNA, 904 bp, Zea Mays
tgccacttcccagcaccgaaagcacagcaccggcaccggcacgccaccagacactcggccccatcagagtctcatccaaatcgtactcgcactcgcagacgcgtcatgcaacatcgcactcgccgtcctcatggccttgtcgcttgcccaacaatacgatccccattggactgagctatatatccatgtcgaagtggtctcggaacaccatcaccaatctcaactcagcgagctctccaccagttttacagccaagaaagaaccaaccatgatcagcaccaagaggatcgctcagctggccaagaagtggcagaggatggaagcgctcgggaggaagcgccgcctcgcctgggggacggcggcggcggcaaagaaagccgacaggtgctgcgcctccgtggcgagcaagggccactgcgcggtgtacacgactgacggggcacggttcgaggtgccattggcgtgcctcgggacggaagtcttcgccgagctcctgcacatgtccagagaggagttcggcttcgcgggcggccacggcaggatcttgctgccctgcgacgccatggtcatggagtacgccctgtgcttgctgcggaggggcgcctctgcggacctggagaaggcgttcctcagcaccatggcgatgtcgtgccactctgcagaccacgcggcggcgccatatgtggcggcttgctgttagtttgcagctgtataagtagtggcagagagttcatcactgtatatagtaggacaaagagaggtgttgttcagatcctgcgacccattaaggaaggtagcgattagcaagttagcgccagtgctcttgtttgagcagtgagcatattacagcttaatttcacgcccaaaaaattaatttcctgagcataattttcaggttattgcc

SEQ ID NO: 141533 - DNA, 311 bp, Zea Mays
ccgaaactgaaaatttataacatgttcgataatataaaatcaatatatcttggacctggagcctcggacaataaaacaagcaaatataagaatatactgagaaaaaagaacattgtacatcacttagtattacacatatattggttgcaaaacaaagggggtcgtattctgaattacattgcgatatggcagttcaacacattcactatagttgtttggtgatatggtgtccctcgtaccaaaagcatacctgtagccaaatctcatcatgagaaatcatcatcttctcctggaatggttggcagacccta

SEQ ID NO: 141534 - DNA, 2654 bp, Zea Mays
aaggtccaacccaaacaactgacgcaacgcggcaacgccaatgaacgaaacaagaagagcgctcccccgccgcccaaacctggcgcatcccatgggaccacccgccgtgccctgcgcgcattcgccagccggcccaggcgcccagccgcttaaccttcctgcccgccgggccctgctcgcagccgacgttggcattaggcacgcctgcgaccgaccggcatggcgcgatccatcgattgcgccaccgacagctcggtcaagaacgtggcgctggacacactgttcctcatcgtcctccaggcggccgtcgtcatcgcgctcggcaagttcatacacctcggcctccgccgccacaacctgcccagcgccacctcccagatcatcgcggggatcgtcgtggggagcctgggtctgcacgacgtgatcgtgcacgtcgacgtggagaacgcggaggacacctacggccgctacgtgtcggaggcgagaatcttctacatgttctacgtcggcctggaggcggacgtcgccgcgctgtggaacgacatgcgccgggccaccatcttcacgtacgcgagcgtcgccacctgcctgctcctcgcggccttcgtctctggcggcatgtatggcagcatgatgcacaccccggtgaggtcgcccgagctgctggccgcggtgctcatgctgtccatcgccgacagcgcatcggttgacgtcacgcggatggccagcgagatggggctcgcggccacgcccagcggccggctcgtcgtcgccacggcgatcgcgaccaacatcatctgcatcgtcggcgagggggtgttctcctgcatgaagctggcctccagcaggaccccggactacagcgccccgcagcggctggggctgggcatcctcgcgctaatcaaggtgggcatctcggtgttgctcctccggccgttggtggcgttcatcaaccggcgcaacgcggggcggcaccgcgtcggcaactgggagctggtgctgctgctcgtcgccgtatcgtggatcggcaacttcccgcagcacgtggggtttgacgggatgccggtgagcctcctgctggggctggcgttccccagggagggccccgtggcgaggagcatcatcgacacgctcgcgtacccgctccacgccctcgcgctgcccttctatttcggcgccatggggatgcggcttaacttcagcgccatgtcgggcgccatcctggtgccggcgatcctcctgacgctgctcggtttgatcggcaagtgcgccggcaccatcgccgccgccaggttcctcaagatgccgaccgccgacgccctgcgcttgggcgtcctgctcaacatcaaaggccacgtcaacatgatcgacatgagcttcgccagttccgaagggatctgggcggaacaggcgctgatggcgatggtcgtcggcagcatgatcagcaccatcatcgctgggccggtgttcgccgtggtgtttcgcaaggaaaaggaggcgtacgagggcagccaccaggcgctggaacacatggccacggaccaggagctgcgcatgatcgcctgcgtgcacggcgcgcgcggcacgccgggcatgctcagcctgctcgagcttctggcgagcaagccacgcgcgcagcccaccatccacgtccttcacttcttcgacgtcgcgggcaagcacgacggccccaggctctaccaccagagcgtccaggacagcgagcataagcacatgagccgccgcaaggacgccacgacgcaggtgaactgggccgtcgacgtgttcaccttcgccaccggcctagtcatccgccagatcgacgccggtgaccgcggcagcgccgtgaacgccaaggccatccgctgctggacggaggacgtccgcgcgggcatcctggtgattccctaccacaaagagcagcactacgacggcaccatggtctgccggcgggaagaacgtcgccagctcaacctcgaggtgctcgagcgcgcgccgtgcactacggctattctcgccgatcgcccgttccggagaagcggcaccagcttccagctgccgaccaagatatcgacgagcacggaggccgccgggagccagggcgacgagaaggtgacgacccacgtcgccgccgtcttcctcggcggtccggacgaccgagaggctgtcgccctcgcctgccgcctcgccaagaacgagtccgtcagcctgacggtcgtccgcttcgtgctccgggaaagcacggacgaccgcgtcgcgacgacgagcgccgacatagatggggaggtgtccatggtcgtcgacgatcctgacgaggagtgcgtgtcggagttccagcgcgagtacgtggcgaaggagcgcgcggcgtacgcggagaaggcggtaacggggcccatggacgtggtggaggcactgcgcgggatggccggcgcgtatgcgctggtggtggcggggcgcggtgggcggcagccggcggagctggtggtagggctggaaggatgggcggagtgcgcggagataggcccggtcggggagatcctggcctcggacgagtcgctggagatgggctccgtgcttgtcgtacaccagaagatcgtgcccccgttccacctggacttgccgccgccagctccggcgaactgacaccgtgacac

SEQ ID NO: 141535 - DNA, 849 bp, Zea Mays
gcagcgcagtcggaggcagtgaggtgagctcgccctcctgctcctgctcctgctcccgcagctgcgctgtgctgccatcgctttcccctcctcccagtcccacccccagattcgcatgcgcgcttccctctccaccgccacaggcacagcgtcagcgcctagcttagccagctcgccgccgcaatggcgaccgcgtcggaggacgaggccgcctcggaccgctgcagcggcagctacagccccagcgccgatgtcagcgagtccgagacctccagcgactgctccgcgcccaccacccgccgcttcgcctcctcttcctccgcctccgcctccgcctccgccaccgtctcccgccgcctcgcgtcctcctcctcgtcgctgcccaccccggcatcggccgccgccttctacctctccaagccaccctcctccgacctctccggtaagcgggcctcctcctccgccttttgcttggatctcactccaaaaccctcctcttgttctttcccctcacagcaagttcctatccttgcccgtgcgcttctgtggcgccagagatcgacatgatgaaggagcgcttcgccaaactcctgctcggcgaggacatgtccggcagcggcaagggcgtctgcaccgcgctcgccatctccaacgccatcaccaacctctccggtacgctcgagccgccgtgctactccacccgcattgcccggatttctgatggtttccctgtccagccaccgtgttcggcgagctgtggaggctggagccgctcgcgaaggcgaggaaggcgatgtggacgcgggagatggagtggttgctctccgtctccgactccatcgtcgagct

SEQ ID NO: 141536 - DNA, 2296 bp, Zea Mays
gcagcgcagtcggaggcagtgaggtgagctcgccctcctgctcctgctcctgctcccgcagctgcgctgtgctgccatcgctttcccctcctcccagtcccacccccagattcgcatgcgcgcttccctctccaccgccacaggcacagcgtcagcgcctagcttagccagctcgccgccgcaatggcgaccgcgtcggaggacgaggccgcctcggaccgctgcagcggcagctacagccccagcgccgatgtcagcgagtccgagacctccagcgactgctccgcgcccaccacccgccgcttcgcctcctcttcctccgcctccgcctccgcctccgccaccgtctcccgccgcctcgcgtcctcctcctcgtcgctgcccaccccggcatcggccgccgccttctacctctccaagccaccctcctccgacctctccgagatcgacatgatgaaggagcgcttcgccaaactcctgctcggcgaggacatgtccggcagcggcaagggcgtctgcaccgcgctcgccatctccaacgccatcaccaacctctccgccaccgtgttcggcgagctgtggaggctggagccgctcgcgaaggcgaggaaggcgatgtggacgcgggagatggagtggttgctctccgtctccgactccatcgtcgagctcaccccctccatccaggagctccccgaaggcggcggccagttcgaggtcatggtcccgcgcccgcgcaccgacctctacatgaacctccccgcgctcaagaaactcgacgccatgctcctcgccatgattgacgggttcaaggggacggagttctggtacgtggacaggggggttatggtcgaagacagcggggggccattcccgtcctcctcctcgtcatcgtcttgtggccggccgtcggtgcggcaggaggagaagtggtggttgccctgcccacgagtgccacccaaggggctgtccgaggattcgaggaggaagctgcagcaaagcagggattgtgcaaaccagatactgaaagcagccatggcgattaacagcgatgtgctcgcagagatggaaatccccgaaatgtacctggagacactgcccaagagtggtaaatcttgcttgggtgagataatttaccgatacataacagctgagcagttctcaccagaatgtctactggattgcttggatctatcatcggaacaccacacactcgaagtggcaaacagaatagaagctgccatccatgtttggaaactgaaaggccaaaaaaattcgacacctcaagccagatcaaagaaatcttggggtggaaaagtgaagggtcttgtcggagataaggaaaagagccacactttgtctgaaagagctaatggtctattgcagagcctaagattgagatatcctggtctgccacaaacctcccttgacatgaacaagatccagtataacaaggatgttgggcagtccatacttgaaagttactcaagggttctggagagcttggcatttaacataattgcaagaattgatgatgtgatatatgttgatgatgctacaaagaaatctgctgctgccgagtctgtttcgatcttcaatcgtggcaccggtgtgccaattcagaagaggatctctctaagcccattctctattcagaatacgccatatgcctctccattcgcaacacccactttctgctcctccaccccagttacatgcagccctggaagagtacagcccccgttaaacaaaaccaatctaggaaggccagaaatcaaggtcgagaagcttttttctggtgatctagagaaggtctggacatatgctggaaacctgagcgctaggaaagacgctggcgatgctcccgagagagactgatgggcgatggaggaaggtagacttgttatggaaacattatcgctatttagcagcgtactcgttcgtgtttatactgcgaggctgggttcatcagcaagtgactgaattcctcctgctgctgctgctgctgctgctttttgtcgctgaaggtgttggtctgctgcctgttagtttttgtatatgcatgttaatgaatttgatctggccctctttaatgctcactactattgtactgagagttgctgaccacatctgagcagacccagtttcctccggttcatctgccagtgagctctgcacagcagtcgactgcagaaaggcgatccagatgagatctagatgagaactagatgtgtcaaatgataaaacggtacgacatttgtatattgcgggtaatcaatccaattgacaaatcgtc

SEQ ID NO: 141537 - DNA, 2933 bp, Zea Mays
tgagctcgccctcctgctcctgctcctgctcccgcagctgcgctgtgctgccatcgctttcccctcctcccagtcccacccccagattcgcatgcgcgcttccctctccaccgccacaggcacagcgtcagcgcctagcttagccagctcgccgccgcaatggcgaccgcgtcggaggacgaggccgcctcggaccgctgcagcggcagctacagccccagcgccgatgtcagcgagtccgagacctccagcgactgctccgcgcccaccacccgccgcttcgcctcctcttcctccgcctccgcctccgcctccgccaccgtctcccgccgcctcgcgtcctcctcctcgtcgctgcccaccccggcatcggccgccgccttctacctctccaagccaccctcctccgacctctccggtaagcgggcctcctcctccgccttttgcttggatctcactccaaaaccctcctcttgttctttcccctcacagcaagttcctatccttgcccgtgcgcttctgtggcgccagagatcgacatgatgaaggagcgcttcgccaaactcctgctcggcgaggacatgtccggcagcggcaagggcgtctgcaccgcgctcgccatctccaacgccatcaccaacctctccgccaccgtgttcggcgagctgtggaggctggagccgctcgcgaaggcgaggaaggcgatgtggacgcgggagatggagtggttgctctccgtctccgactccatcgtcgagctcaccccctccatccaggagctccccgaaggcggcggccagttcgaggtcatggtcccgcgcccgcgcaccgacctctacatgaacctccccgcgctcaagaaactcgacgccatgctcctcgccatgattgacgggttcaaggggacggagttctggtacgtggacaggggggttatggtcgaagacagcggggggccattcccgtcctcctcctcgtcatcgtcttgtggccggccgtcggtgcggcaggaggagaagtggtggttgccctgcccacgagtgccacccaaggggctgtccgaggattcgaggaggaagctgcagcaaagcagggattgtgcaaaccagatactgaaagcagccatggcgattaacagcgatgtgctcgcagagatggaaatccccgaaatgtacctggagacactgcccaagagtggtaaatcttgcttgggtgagataatttaccgatacataacagctgagcagttctcaccagaatgtctactggattgcttggatctatcatcggaacaccacacactcgaagtggcaaacagaatagaagctgccatccatgtttggaaactgaaaggccaaaaaaattcgacacctcaagccagatcaaagaaatcttggggtggaaaagtgaagggtcttgtcggagataaggaaaagagccacactttgtctgaaagagctaatggtctattgcagagcctaagattgagatatcctggtctgccacaaacctcccttgacatgaacaagatccagtataacaaggatgttgggcagtccatacttgaaagttactcaagggttctggagagcttggcatttaacataattgcaagaattgatgatgtgatatatgttgatgatgctacaaagaaatctgctgctgccgagtctgtttcgatcttcaatcgtggcaccggtgtgccaattcagaagaggatctctctaagcccattctctattcagaatacgccatatgcctctccattcgcaacacccactttctgctcctccaccccagttacatgcagccctggaagagtacagcccccgttaaacaaaaccaatctaggaaggccagaaatcaaggtcgagaagcttttttctggtgatctagagaaggtctggacatatgctggaaacctgagcgctaggaaagacgctggcgatgctcccgagagagactgatgggcgatggaggaaggtagacttgttatggaaacattatcgctatttagcagcgtactcgttcgtgtttatactgcgaggctgggttcatcagcaagtgactgaattcctcctgctgctgctgctgctgctgctttttgtcgctgaaggtgttggtctgctgcctgttagtttttgtatatgcatgttaatgaatttgatctggccctctttaatgctcactactattgtactgagagttgctgaccacatctgagcagacccagtttcctccggttcatctgccagtgagctctgcacagcagtcgactgcagaaaggcgatccagatgagatctagatgagaactagatgtgtcaaatgataaaacggtacgacatttgtatattgcgggtaatcaatccaattgacaaatcgtcagatcttttctctctttgctctgtactgtactatgactactatcgagggcttgaatgaacctctagagataattgttaacggctcaaattggctgtagctgttttaaacgcactagctaaattgttagttcgatctatcatctatgaggccattcccaataaaagttgcattgcacgtttctaaaagtgacacatcagcttatctataaaaccgtatatcctgagtttcatctggatgaaatcctctctcctataaaactctctccgcctctcttatcgtaaatactgtgttatgtcatcaaatattgtgatgtgtcatctcatttgatgataatttaatgagaataaaactataatgaaactccaactaggaatgacctaacttacaattagtttattaaccgggatagaggaactaaaatttggcaaaaagatggtattacttttatcttgagatgtaggagatctaactccatcgctcctctatagaaggctacgctggtctgaaccactgttcgagaattttggcaaaaaaggaaaaaaaaaga

SEQ ID NO: 141538 - DNA, 689 bp, Zea Mays
aagttggattacagttattggatatggatatccatccattgtcaggtctagttaaaccattttacacactccgctctactcccggaagagacgatggcggaggcgacgccgacgatggtgttcgtctacggcaccctaaagcgcgggttccctaaccactcgctcctcgtggcctccgccacccccttcgtgggagccgcatccacggccgggccagcctccctcatcatcggcccctactcggtacccttcctcctccccactcccgcctccgcctcctccggtcgtgtcgtctcgggcgagctctacgccccatcccccgccgcgctcgccgagctcgacgccctcgaggcaagcgcctcgcctcctcatcaaactcgttgttccctgtccaccggtttggttttcccccatctcatgccttcaatttgtcgcagggcacccacatcggcgtctacgagcggcgcccgatcaccgtcgtggtcgacgggtcgggcgaggtggtgcaggcggaggcgtacttcgcgcacccgagctacgcggaggcgctctggcggcgctgcggcggtgaggaggccgagattggagagtacaccgtggaccatgccggcgagtacgtcccgaagagtgagcgccttgccgacgctgctgggcttattgacgccatccataggttcgtcgccactgcc

SEQ ID NO: 141539 - DNA, 838 bp, Zea Mays
aagttggattacagttattggatatggatatccatccattgtcaggtctagttaaaccattttacacactccgctctactcccggaagagacgatggcggaggcgacgccgacgatggtgttcgtctacggcaccctaaagcgcgggttccctaaccactcgctcctcgtggcctccgccacccccttcgtgggagccgcatccacggccgggccagcctccctcatcatcggcccctactcggtacccttcctcctccccactcccgcctccgcctcctccggtcgtgtcgtctcgggcgagctctacgccccatcccccgccgcgctcgccgagctcgacgccctcgagggcacccacatcggcgtctacgagcggcgcccgatcaccgtcgtggtcgacgggtcgggcgaggtggtgcaggcggaggcgtacttcgcgcacccgagctacgcggaggcgctctggcggcgctgcggcggtgaggaggccgagattggagagtacaccgtggaccatgccggcgagtacgtcccgaagagtgagcgccttgccgacgctgctgggcttattgacgccatccataggttcgtcgccactgccacggacaaccgacgtcgtgctcacggattactaccatagttcagtgaatatgtcacgtgtttcctcttttcctgggctagtgcttcggttgcagctgagtctgtcacgaactgtaattcatcctgcaaatttgcagacactgcttttaggctatgcaggtcgtcgtattatgtattcagcatgattgaatccgagttttacgaatgagaaatgttataccacactttgtttggac

SEQ ID NO: 141540 - DNA, 706 bp, Zea Mays
atatccatccattgtcaggtctagttaaaccattttacacactccgctctactcccggaagagacgatggcggaggcgacgccgacgatggtgttcgtctacggcaccctaaagcgcgggttccctaaccactcgctcctcgtggcctccgccacccccttcgtgggagccgcatccacggccgggccagcctccctcatcatcggcccctactcgggcacccacatcggcgtctacgagcggcgcccgatcaccgtcgtggtcgacgggtcgggcgaggtggtgcaggcggaggcgtacttcgcgcacccgagctacgcggaggcgctctggcggcgctgcggcggtgaggaggccgagattggagagtacaccgtggaccatgccggcgagtacgtcccgaagagtgagcgccttgccgacgctgctgggcttattgacgccatccataggttcgtcgccactgccacggacaaccgacgtcgtgctcacggattactaccatagttcagtgaatatgtcacgtgtttcctcttttcctgggctagtgcttcggttgcagctgagtctgtcacgaactgtaattcatcctgcaaatttgcagacactgcttttaggctatgcaggtcgtcgtattatgtattcagcatgattgaatccgagttttacgaatgagaaatgttataccacactttgtttggacaca

SEQ ID NO: 141541 - DNA, 2710 bp, Zea Mays
ccagcctctcatctcatttctgtgtctttgggctgcgatcggatgatggacttaggcacacgtgactggtggactagacaggaaaatcccaagttacgacgacttccccgagacgacggcgtaacaaggggggaaaaaaggaaaggggatcgccatggcagcgtcgccgcagcagcaaggccagggcggccctggcagcggcgggtggactcccgagcagttctggtcgctgctggacaaggcggaccgccggttcgcccgggtgcgagacctgccctccttcggccgccaggagcccgacgagttcgccaaggccttccgcgcctacacccagctctggcggatgcagcaggagcaccgtcaccgtcttctcgacgcgggcctccgccgctggcaggtcggcgagatcgccgcccgcatcgcccacctctactacgcccagtaccagcgcaccgccgacaccgcgcttctctccgaggcgttcgtcttctaccacgccgtcctcgaccgcgcctacttccaggacgccgaccaccacctcgcccccgccaaacacctccgcttcctcgccaggttcctcctcgtcgcactcctgctcggcaggcgttcgcacaccgtcccgcgtctcgcctcggacatacgcacgctcttagatgactccaaaaagtccttccaggatgccgaatacaaggagtggaagcatgtcgtgcaagagatcgcgaggttcctgcgagctgactcaccatttatgaacatgaggccgctcaggtacagctatgcattcgatccgcccccggacacgcttcgtactgtgccaactactgtcaagaagcgaggtctcgtcttaagtgacaccatactttgcagctactatcctaacgaggtcaaatttacagacctctccatagatgtattcagaatggttcagtgcctcgaatgggaaccatgtggttcatttgcgctaaacgatggttacagcgcccatgatgaaagtggacaaaatcaacccaatctattgaaagatttaagagatgctgcactgcccccgaatccacttaagacaattctctatcgcccttcggtaacacatttcctaacggtcctttccacaaaatgcgaggagcttccttcaaatggtatcatgttaatatatctttcagctacaggggagatgggaacttctggattttgtcctgatactggtgaaaatgttttgagcaactttaataagtttgacatatccagtcttagtcatactagttcaaaggaaaacaaagaaccttgtctatggttaggctgccgtgaaactgaaggttcaaattgcatataccctggtgatctaatcccatttacaagaagacctctatttttggtgattgacagtagcaccagctatgcattcaagtctattcatggtactgaaaggggggagacttctgccatgctactttcaccaagttcccgatcttccgctgcgggattcagtggcgattctactcggcacagtggtagccaatttactatgttcctcacatctccattgcaagctttctgccttctgcttggcaacaatgggacagatattgacagggatgcatataacaaagctgaggagttattattattgtccctaaatgaatgggctgcgactttagttgcatcatcttcacttcattctatttgggttgaagttttaggcgacccgctcctaagaaggttacttctcaggttcatcttctgccgagcaactcattccctgttcaaaccaacaaaccataagacagagttccttccgacctgcatgcctcctttgcctgagtctgttgatgcagagagcatgctctcccaaagctgtgtgctgcgagtcgcatcattctttggcgctgccagtcagttctcatttgctgaggttaccacatggcctgatgttgactctgaggaggctgttgtcaccagttcatctggcagtgccaacaaaggtgtgcctgagacagccagagattcagacatttcaaactcatcatcatctttttgatgcgaccatggcgctaccttcgtccgcttgtgttatttacttatctgcatatgcggatccatttgtaattactggtgctcctttatgcttgatttacacatcatgcagaactgccttgcctttttgtttcctggttacttactgaattaatagtcactagaacatttttttatcccttagtttggaggtgtggaggagctgtgtgagaaagtgtggttgaagagtgttgtttcgttactgtccatggctcggtagaatgtattccctcggtcatttcggtttttctatgtatgttttctatacaccttggtatacattagattagatacataataaaagttatatatgtaaaaaagacaaaatggcatctaatttagaacggaaggaatattatgcaatatttttgttagattaccgtgtttattcttaatataatgggccttggtttagcccatgttatagatatagtcctttagtccagcatggtccaagcacaaaaaggtccgacacatttaaattaaatttcgggctgataatggtccataattgttataggctatgtcggcctagtccatgggtttagttctcgacccacgacatattatgtgttagaccttttttttttgcaacccgaaattataaatagcctaaaattcacattagatctcgaaatcc

SEQ ID NO: 141542 - DNA, 1004 bp, Zea Mays
atggctcagcagcctggctgcgctctcgggctgcagctcccatgtttgcgttgtctaacttgctcaggagcctggctgtccgagtgcaagtttagcctctcggcctggctccacagaaacgagatcaagctctgggatgccagagaaagatgccaatacttacccgctcatgacgagggctcctccatgactgtcaggccacctcctgagacaccatctctaaaagtttactccagaagaagtttaagatgtcatcagcagcaagatacttcacatgatgacctttctttgggtgttgatgcaactgttgaagatgagcttggccatgcagcgcggggtactccaagtgagcatgatcttaaccatgcactgccaccgaacaacttaagggaaggtgaagtcgttgtagcagtggctcatgctccgctagtgcccaactctctaaggcaagaacatctggaggctgaggaggaccccagcctgacttctgaaatggcttcataggcaagaattgaatctcaaaaggagttcttcaggcgcgcggctacgccagcaggggccagaggcatggctgcgctggcgtgggtggccaactccgtggtaagggcaggcacgtcggcgccggtgtgggcgccagcgtcctgcagggcggcgtggaggtgatccatggccgccgagggcgcgcgcgatggagaagggccgccagcgtgggcgcaacgggagggatgtccagcggcgcgggcgcgacaggatgggggcacgcggttccaacgggtggaggagacggatttggcggcgctagcgcgaagggaggggttccaacggcacgggcggctccgacgggtggaggagacggcgcaggggcgcggcccggtgggagcagagggaggcggccggcgcagtcaggagttggccggtggcggctgtgaagggagggagaagaggaaggtggcggcggctgttggggaagggaggagagagaaaaagaaactgactctatacca

SEQ ID NO: 141543 - DNA, 90 bp, Zea Mays
atgcctacaggctacgaccccgcgcagcagcagcagcagcaggtgctcctaactgtagccatgcgcggacagttgagcacagacagttga

SEQ ID NO: 141544 - DNA, 312 bp, Zea Mays
atgtctgggcgcggcaagggcggcaaggggctgggcaagggcggcgccaagcggcaccgcaaggtgctccgcgacaacatccaagggatcacgaagccggcgatccggaggcttgcgaggaggggcggcgtgaagcgcatctccgggctcatctacgaggagacccgcggcgtgctcaagatcttcctcgagaacgtcatccgcgacgccgtcacctacactgagcacgcccgtcgaaaaaccgtcaccgccatggacgtcgtctacgccctcaagcgccagggccgcaccctctacgggttcggcggctaa

SEQ ID NO: 141545 - DNA, 533 bp, Zea Mays
ctgtcaaacttgagcagattctccactaagtccagctcgatcgaggccttgattatggcgctggcgaggtcctggtcgtccttggcgtcgaagaagcagcccctctccttggcgtcgtccacgatctgccgccatatcgtcttgccgctggccagcgtcttcgcgttacccaggatccacaggcaatgtctgcaaaacataccaaacaaaaacatcatcgtcgagagcactattgcagacacacaaacaaaaacaaaaagctcacttggcccgcgtcagcgcgacattggtgcggttggtgtcggcgagaaagccgatcttgccggcggtgttactccgcacggtggagaagatgatcacgtcctcctccgcgccctggaacccgtccacggtccgcaccttcaccgagaacgacccgttgtgcatcgagtacacctgcttgccgagcttctcctcgatggcgcggacctggcccttgtagggcgacaccactcccacgcggatcgccttcctcgtgtcaaccgactctgcgc

SEQ ID NO: 141546 - DNA, 625 bp, Zea Mays
cccgcggtacgtgccctccttctcgcgctcctaaacaatcgcccggcctcctccccttccattctaggctccgcgtctcgctgtccccactccgtctcctccggctccgtctcatcccgatgccgctccttctcatcgtcgtcgtcccagtcccggagtcgctcccctcctctggctaagcgcagccttgatgtgtcggcaactggagtatttggtacgagactgcttgatccagataattttattacacttcaggcgtggcttgtgtgttcagactactactgttgaatacagttacaattggtccttgtggccctcaacagtttggatgctgtcattcagcattgaacagagccagagtctggtaacagtttttaatcatgttcttgataggatggatacatctgttaaatgtgtgaccctgcattcagaattcagatcgacacctttgattggttccaattccctgctgctggcttattatttaactttcctttttgcagtttctataatagcagagacatgcgctaaccagcatttgctaacccaatcaatttgttggcatcattttattgatcgaatccatcccgcctcatgcttttgcttcgccctgttaacatgtttt

SEQ ID NO: 141547 - DNA, 1283 bp, Zea Mays
cgccacccccacccctcttcttctctttcccttcgcattaatggccgctctctccctatcccctttcgtctcgctctcggagtaggacactcgcccgcttccggcttaaccttcaagattctccctcctcctcctacttcttcccgcttgggcgggcgcggcaccttccggttctgggcctcctatatatatacgcgcgcgaccgtcccccttccatactccctagcatgctcggctcgcaccccggattgatcgagctcgcccgtcgccgcgatggattcggtgccttccccctcctcttctacccgggccaccgctgctcccggtccctgctgccgctttgacgcgctgcggagggcgtgcgccaggcacgccgccgccgccgcgcgggccgccgggtgggcgctcggcgcgctgctcacctgcgtcttcgccgtcgtgggctcactcgtcggaatcttcattggtgccttcatggggatgtctacagaaagcggcatgttccgcggggctggtgtcggagcagtctcgggagcagtcttctccattgaggctgttgagtcctgcatcgagatttggaggtccagccattcgggaaaatacagcattctctatgtgctggacatcatctctagcctcttcagcggaagaattgtgtgggagaaagtcagtccagcgctaccagcgtgcagtgcaaagccagatgagtctaatgagcacaccgttcatcgacaacaatgacctttttgaaactggcagtacaggaggcatgtcaagggctctgattgataggatcccaaagatgaggttcagtgctgcaagcaattgtgacaaggaaactgatagcagctgctgctcagtctgcctgcaggattttggagcacagcaatttgtgagggccctgcctcagtgccaacacatattccatgtgcggtgcatcgacaattggctccttcggcacgcatcctgcccactatgccgggccggcgttcatattgaccatatacatatgtaaataaactcgcagggtggcacctggtgtattttcatagtgaatacccgtgctcctgttggatatcacaagtatagctggatgtatacataggttttctcctttttttttgttacttctccggtcttatgtggggctatgctttcagctgcacgtttttgtcgaagtaatacctggattggctggatatgtacatcttgagaacggattgactaacaagctccctgaattatggtcctgtgtgcttcaaaaactgctttcaaaaagaaaa

SEQ ID NO: 141548 - DNA, 675 bp, Zea Mays
aaagtgatatgggtcgctgcgtcaacaagggagggggtcctctcgcaggtaacgcggcagagagctcacctggcgtcgtgggtgttggcgaggcggtaataccccgcgtggtggccgaggtcctccaccgacgtggcggcgcctccgttcgcgaaggacgcgatgcggatgggcctctcgacgagggtccccgcgggggcgagggcgccctctacgccggcggtggagaggggaggggacgcgtcggcggggtggaggttgagcgcgtggatcaggtcgacggccgcggagcgggggaaccggcgcggagacgaggaggggaggcggaggatgctcccatatccattctcccacgagccgccggcggcagcgacggaggcaacggccaggaggaggaacgggaggagtagctggtcggcgggccgcatgattggtccggcctccggcgacatatggcgatgtgggggagtgaatcagaagcggggacggagacttccttcaagagagcggtagcgcgagaagagccagccgccgcgttactagatttttcttgttgtgctgggtccacatgtcagatagtggtttgagaactaaaccaaatagcttaggttgccaaagaatggcaaccagttggatccgaatcggaaatctatctaaaactatttgcaatcgcat

SEQ ID NO: 141549 - DNA, 1165 bp, Zea Mays
aaacgttccgacctaaccacattccttccatcatttcatccttcccggtgcggctgcggccagatgcgtccaaattcctcatattttctctcctcccctggtcccttctcgttctcgcccgcgtaattcctctctggcgtctaccaaaagcggagcaaccgaggcaagaaaaaggggtgggcgaggaaaagcgattaggcttctcttccagttcctgattcagtctgagaaacaatggatatctgaagcatgaaaagtcaacccacctcactcttttaaacagttcggttaacacacttaatggctgcggtgtttgcatgacattctctttgagcttatatgggagcagtggctgtattggtaatttaagcagatctcagtcacttccagattctaaaccgaagcgatctttgagaaagaaatatcaggattcatcgactggaaacagaagacgatggcaatcgggtctagaagcaatggagaagaatgttagcatatctgtttctcttgaggggaatatctcttctattcccaattcaatagccaacgactctaaaacgtcaatggaaaacagggtagatacatcatttatcaaccatgcggctgaagcatgggctgagatgagaagacaatgggttggacgccaggcagaagttctgagaaagaccccccgagagccagtgataagttggtccacaacatacgatgatctcttgtcgacaagtgagcgttttccacaacgaatcccattatctgagatggttgattttttggttgacatatggcacgaagaagggctctatgattagctgacctctgcctttctttacgccttgcttttagaatgtggtcaacttcctccccacaaaatatgtgaccttcagaagaaatgaaaaaactacatactctatgaattagtcgcaacatttgaaattgaaaaaaaaaactctcatgtgaaaaggtacaacagtgggttggtatatttggtgatgagttatcaacggtttcttcatgttgaaggactcgatgacctgtcattcctgaatgaacgattgcttaagaatataagggggaagggcatttttttctcatatcatcattgtgatgttattggctagttcatgtctgaggaccctgaagtttttatcaacgttggtcatcaact

SEQ ID NO: 141550 - DNA, 1160 bp, Zea Mays
aaacgttccgacctaaccacattccttccatcatttcatccttcccggtgcggctgcggccagatgcgtccaaattcctcatattttctctcctcccctggtcccttctcgttctcgcccgcgtaattcctctctggcgtctaccaaaagcggagcaaccgaggcaagaaaaaggggtgggcgaggaaaagcgattaggcttctcttccagttcctgattcagtctgagaaacaatggatatctgaagcatgaaaagtcaacccacctcactcttttaaacagttcggttaacacacttaatggctgcggtgtttgcatgacattctctttgagcttatatgggtggctgtattggtaatttaagcagatctcagtcacttccagattctaaaccgaagcgatctttgagaaagaaatatcaggattcatcgactggaaacagaagacgatggcaatcgggtctagaagcaatggagaagaatgttagcatatctgtttctcttgaggggaatatctcttctattcccaattcaatagccaacgactctaaaacgtcaatggaaaacagggtagatacatcatttatcaaccatgcggctgaagcatgggctgagatgagaagacaatgggttggacgccaggcagaagttctgagaaagaccccccgagagccagtgataagttggtccacaacatacgatgatctcttgtcgacaagtgagcgttttccacaacgaatcccattatctgagatggttgattttttggttgacatatggcacgaagaagggctctatgattagctgacctctgcctttctttacgccttgcttttagaatgtggtcaacttcctccccacaaaatatgtgaccttcagaagaaatgaaaaaactacatactctatgaattagtcgcaacatttgaaattgaaaaaaaaaactctcatgtgaaaaggtacaacagtgggttggtatatttggtgatgagttatcaacggtttcttcatgttgaaggactcgatgacctgtcattcctgaatgaacgattgcttaagaatataagggggaagggcatttttttctcatatcatcattgtgatgttattggctagttcatgtctgaggaccctgaagtttttatcaacgttggtcatcaact

SEQ ID NO: 141551 - DNA, 1323 bp, Zea Mays
attctgaatttctcaccgtctaactgtaggtgcagctgtgatctcccaacgccatttcacggttcttcgtcaaccgtcatcgctttctccccctcccccgtctcttctccctcgagggaataagcccgccgcgtgaagcttcttcttgcatccgagtgcggaatcacctccaatctgcccctcgggccgccggcgccgatggagaaggtgaagaacatgctcaagccgcggccgacgccgcagcagcagctgcgcgagtggcagcgccgcctccgcaacgagtgccgcgtcctcgaccgtcagatccgagatgtgcagagggaggagaagaacgtggagaaagccatcagggaggctgccaagcgcaatgacatgggatctgcaaaggaacttgtaagatcaagacgtgctgttaatcgtctttatgagaacaaggctcaactaaattcagtatcaatgcaccttggagaaattgtcgcaactgcaagaacagtgggtcatctgtccaaaagcactgaagtgatgaaaattgttaacaatctaatgaaagctccagagttggctaccacgatgcaagaatttagcaaagaaatgaccaaggcaggtgtgatggaagagatggtgaacgaggcagttgattcagctttggactctgaggacatggaggaggaaatcgaagaggaggttgacaaggttcttgcttcagtagctggggagactgcctcccagctaccagatgctgccagaacacagaagatacatgaggcttcaacaagcagggttccagaagaacgacaagctgttgcagagggtgctgatgacgacgaggaagacctagaagagatcagggcacggcttgctaaagtgaggtcgtaaatcatatacatatctgagttttctaacctggggagcccatggctcacaaaatatggtgccaaaacccgtgtattgtgaactgagtcgatagcaatgcaattttttttttaattggccctcgagtcgaccatatatgaagtggcagtctattgttgtacaacgctacgagagtggcatggaatatcggaatatggatagcgaaatgcctctgatttcataaagcgatgtaaaatttattagcaggaaaacaaaacggctggataacagcgtctgccgttgaacaaatgcgtgtcccatctctagcccttcgttagcaatgttacgtgtaagaaaactgtgcacacgctggagctaaggctccgtgagccgtgatgttgctggtttcaacgtccagctgaactcgtttgctattgacttgttttgcctgcttataaaagacggatgaat

SEQ ID NO: 141552 - DNA, 1610 bp, Zea Mays
attctgaatttctcaccgtctaactgtaggtgcagctgtgatctcccaacgccatttcacggttcttcgtcaaccgtcatcgctttctccccctcccccgtctcttctccctcgagggaataagcccgccgcgtgaagcttcttcttgcatccgagtgcggaatcacctccaatctgcccctcgggccgccggcgccgatggagaaggtgaagaacatgctcaagccgcggccgacgccgcagcagcagctgcgcgagtggcagcgccgcctccgcaacgagtgccgcgtcctcgaccgtcagatccgaggtcctacccccgaacgcgcccgcatctccttcccttctcgtcccccacatctccttcccctggtctccaagggaactggcgatcgggctcgtgtggacgggtactaggtgtgattcaaggattggtggtcgggtgttgcttgttgctctggtttgcctcagaaatggccaaggcggtgatgcgattagccgagcgattctcccgaccctgggggctgtgcgccaaacccttaacccttacctgtaagtatttttgggtatgaattgtttttgcagatgtgcagagggaggagaagaacgtggagaaagccatcagggaggctgccaagcgcaatgacatgggatctgcaaaggctcttgctaaggaacttgtaagatcaagacgtgctgttaatcgtctttatgagaacaaggctcaactaaattcagtatcaatgcaccttggagaaattgtcgcaactgcaagaacagtgggtcatctgtccaaaagcactgaagtgatgaaaattgttaacaatctaatgaaagctccagagttggctaccacgatgcaagaatttagcaaagaaatgaccaaggcaggtgtgatggaagagatggtgaacgaggcagttgattcagctttggactctgaggacatggaggaggaaatcgaagaggaggttgacaaggttcttgcttcagtagctggggagactgcctcccagctaccagatgctgccagaacacagaagatacatgaggcttcaacaagcagggttccagaagaacgacaagctgttgcagagggtgctgatgacgacgaggaagacctagaagagatcagggcacggcttgctaaagtgaggtcgtaaatcatatacatatctgagttttctaacctggggagcccatggctcacaaaatatggtgccaaaacccgtgtattgtgaactgagtcgatagcaatgcaattttttttttaattggccctcgagtcgaccatatatgaagtggcagtctattgttgtacaacgctacgagagtggcatggaatatcggaatatggatagcgaaatgcctctgatttcataaagcgatgtaaaatttattagcaggaaaacaaaacggctggataacagcgtctgccgttgaacaaatgcgtgtcccatctctagcccttcgttagcaatgttacgtgtaagaaaactgtgcacacgctggagctaaggctccgtgagccgtgatgttgctggtttcaacgtccagctgaactcgtttgctattgacttgttttgcctgcttataaaagacggatgaat

SEQ ID NO: 141553 - DNA, 1347 bp, Zea Mays
attctgaatttctcaccgtctaactgtaggtgcagctgtgatctcccaacgccatttcacggttcttcgtcaaccgtcatcgctttctccccctcccccgtctcttctccctcgagggaataagcccgccgcgtgaagcttcttcttgcatccgagtgcggaatcacctccaatctgcccctcgggccgccggcgccgatggagaaggtgaagaacatgctcaagccgcggccgacgccgcagcagcagctgcgcgagtggcagcgccgcctccgcaacgagtgccgcgtcctcgaccgtcagatccgagatgtgcagagggaggagaagaacgtggagaaagccatcagggaggctgccaagcgcaatgacatgggatctgcaaaggctcttgctaaggaacttgtaagatcaagacgtgctgttaatcgtctttatgagaacaaggctcaactaaattcagtatcaatgcaccttggagaaattgtcgcaactgcaagaacagtgggtcatctgtccaaaagcactgaagtgatgaaaattgttaacaatctaatgaaagctccagagttggctaccacgatgcaagaatttagcaaagaaatgaccaaggcaggtgtgatggaagagatggtgaacgaggcagttgattcagctttggactctgaggacatggaggaggaaatcgaagaggaggttgacaaggttcttgcttcagtagctggggagactgcctcccagctaccagatgctgccagaacacagaagatacatgaggcttcaacaagcagggttccagaagaacgacaagctgttgcagagggtgctgatgacgacgaggaagacctagaagagatcagggcacggcttgctaaagtgaggtcgtaaatcatatacatatctgagttttctaacctggggagcccatggctcacaaaatatggtgccaaaacccgtgtattgtgaactgagtcgatagcaatgcaattttttttttaattggccctcgagtcgaccatatatgaagtggcagtctattgttgtacaacgctacgagagtggcatggaatatcggaatatggatagcgaaatgcctctgatttcataaagcgatgtaaaatttattagcaggaaaacaaaacggctggataacagcgtctgccgttgaacaaatgcgtgtcccatctctagcccttcgttagcaatgttacgtgtaagaaaactgtgcacacgctggagctaaggctccgtgagccgtgatgttgctggtttcaacgtccagctgaactcgtttgctattgacttgttttgcctgcttataaaagacggatgaatacagtgtctttg

SEQ ID NO: 141554 - DNA, 1241 bp, Zea Mays
ctgaatttctcaccgtctaactgtaggtgcagctgtgatctcccaacgccatttcacggttcttcgtcaaccgtcatcgctttctccccctcccccgtctcttctccctcgagggaataagcccgccgcgtgaagcttcttcttgcatccgagtgcggaatcacctccaatctgcccctcgggccgccggcgccgatggagaagatgtgcagagggaggagaagaacgtggagaaagccatcagggaggctgccaagcgcaatgacatgggatctgcaaaggctcttgctaaggaacttgtaagatcaagacgtgctgttaatcgtctttatgagaacaaggctcaactaaattcagtatcaatgcaccttggagaaattgtcgcaactgcaagaacagtgggtcatctgtccaaaagcactgaagtgatgaaaattgttaacaatctaatgaaagctccagagttggctaccacgatgcaagaatttagcaaagaaatgaccaaggcaggtgtgatggaagagatggtgaacgaggcagttgattcagctttggactctgaggacatggaggaggaaatcgaagaggaggttgacaaggttcttgcttcagtagctggggagactgcctcccagctaccagatgctgccagaacacagaagatacatgaggcttcaacaagcagggttccagaagaacgacaagctgttgcagagggtgctgatgacgacgaggaagacctagaagagatcagggcacggcttgctaaagtgaggtcgtaaatcatatacatatctgagttttctaacctggggagcccatggctcacaaaatatggtgccaaaacccgtgtattgtgaactgagtcgatagcaatgcaattttttttttaattggccctcgagtcgaccatatatgaagtggcagtctattgttgtacaacgctacgagagtggcatggaatatcggaatatggatagcgaaatgcctctgatttcataaagcgatgtaaaatttattagcaggaaaacaaaacggctggataacagcgtctgccgttgaacaaatgcgtgtcccatctctagcccttcgttagcaatgttacgtgtaagaaaactgtgcacacgctggagctaaggctccgtgagccgtgatgttgctggtttcaacgtccagctgaactcgtttgctattgacttgttttgcctgcttataaaagacggatgaatacagtgtctttg

SEQ ID NO: 141555 - DNA, 1458 bp, Zea Mays
caggagcttcatccaacagcccaagtgtccctgctacccccactggatcagcaagctagctacccaggccagtgccagagccacagcggaagctagctagctagcaagcaatggctgcggcggctcctcctgctcgtcctagcagcagctgctgccgctgcatctcgcggcgcgccgccgtcgtcgtgccggcactgctgctgctggcggcgatggccgcctcctccggcgacgcgcagccttccccggggtactacccgagctccaggttcaggccggtgccgttcaaccgagcgtacaccaacaagtggggcccgcagcaccagacgctctccggcgaccattccgccctcaccatctggctcgacaagacctgcgggagtggtttcaagtcgaagcacgcgtacaggaacggctacttctccactcgcatcaagctccccgccggatacaccgccggcaccaacaccgccttctatctctccaacaacgaggcgcaccctggtttccacgacgagatcgacatggagttcctgggcaccatcccgggggagccctacacgctgcagacgaacgtgtacgtgcgcggcagcggcgacgggcgcatcgtggggcgggagatgcggttccacctctggttcgaccccacggcggcctaccacacctacgccatcctgtggaaccccgacgccatcaccttcttcgtggacgacgtgcccgtccgccgctacgagcgccgcaccgagctcaccttcccggaccgccccatgtgggtctacggctccatctgggacgcctccgactgggccaccgacgacggccgccaccgcgccgactaccgctaccagcccttcgtcgcgcgcctcgaccgcttcgtcgtcgccggctgctccgccagcgccccgcccgcgtgcaggcccgtgccggcgtcccccgcgggggccgggctcacgccgcggcagtacgcggccatgcgctgggcgcagcagggccacatggtctactactactgcaacgacttccgcagggaccactcgctcacgcccgagtgctagcgagcgcgcctgtctgctgtgtgctgtgctgtgtcgtcgtccttgttgctttgtgctttgtttcgttgttgatgaaaaggtcgctaggcgtggctgccctactaccgcccgcgcccgccgccgctctctctgctcgcggtgagcgaggcgcccgcgcgagccggtggttgaggcgttggtcgttggcgtatcgccagcaaactcgtgtcgtcgctcgtctacgtacgcgcgcgtacccattgcatttcttccggttgttgctttccatttggtctcgcatgcatcacacgaggcgccccaaagggggcaagcttccatgattcatacggatacactatgtataccatatatacatattatatatatatttaatacatgtttcctgtcggtgaggatatacatg

SEQ ID NO: 141556 - DNA, 786 bp, Zea Mays
cgcggagctcgacgctcaggttgttgcgacccacgagtggctgggcgtggtcgctgacgaccgggggtctcttcggcagaggcgacgactccgatgagcagcgcttcgaggagcccatcatcgccgacaactggggggccgatgcggggcgagatctcgtgctcacggcgcgcgtgctcgccgctgatgcgtgcgcagctgggatcgtcgacggtgccacgccctttgcctctaccaagcgctcgtcacctccactaaccccaacgaggtgctcgacaaccacggcatcggcgaggtcattgccaccgacactgcatatagctcagacagctccgtccatggcagtggcggcgttgagctgtctcacctcacgcccaacgacaccaacttcgataggcccatcccctgttcgaccttggggctcaccgtcgaaatcgccagggtgcactatggctggcacctcgccacggagtggcagccggtgcggtcgctggtgctcgccgcaggcgacgcgcgctcacagtccacgtcgcgtcgcagtgccagcaggcgtcctccacgcgcggcacgccgggcatggccaccatggcgaagatcgccgagaacctcacagaggccgacctcaaggggaagcgcgtcttcgtgcgcgtagacttcaacgctccactcgacgaggaccagaacagcaccaacgacgtcctccccacctccgaattcgacatcgagcaaccgtccatgcacacccccgtgaacgccatcctccacgctgcagatgctcggtccgcg

SEQ ID NO: 141557 - DNA, 2815 bp, Zea Mays
ttgttgaagcatacgacactgccatttgtttgcacattactgattacaacgtgcacccacagctagcagcgcatcacgttgagtcgttgaccagcgagctggactaatcactcgtagtatgatagtatcagtcaccctagtgccatgtccgaaccagaggacccgtccgtctccaccaatcgcactccgcttcgttcccctgcttgctcgctccccactcctcagctcgtctcatcgatcgccatgccgcgtccccccctccatgtcctcctcctcctcctcctgtctctgcgcgcggcgccgtgcccgtgctccgcggccaccaccgacacgctgtcccccggcaatgggctcgccggcaccgccgccacggccaggctcgtctccaacaacagcaagttcgcgctcggcttcttcaagacggacagcaagtcccctaacacctacctcggcatatggttcaacaaggtccccaagctgaccccgctctggagcgccaacggcgagagccccgtcgtcgacccggccacgccggagctcgccatctccggcgacggcaacctggtcatccgggaccaggccaccgggtccgtcgtctggtccacccgcgccaacatcaccagcaacaacaccaccaccgtcgccgtgcttctcagcagcggcaacctcgtcctcaggagctcctccaacgcctccgacgtcttctggcagagcttcgactacccgacggacaccctcttcgccggcgccaagatcggctggaacaagcgcaccggcctcaaccgccgcctcgtttccaggaagaacgcgctcgaccaggcccccggcctgtactctctggagatgacggagagcaacggggttggccatctcctgtggaactccaccgtggcctactggtccagcggccaatggaacggcaactacttcggcttggcgccggagatgatcggcgccgtcatgcccaacttcaggttcgtcaacaccgacgaggagatctacttcacctacacgctgcacgacgacgcggcgatcgtgcacagcgcgctggatgtctctggccgaggcctggtggggttttggctggacagcaagcaggactggctcatcaactacaggcagcctgtggctcagtgcgacgtctacgcgacatgtggccctttcacgatctgcgacgacgacgcggacccgacctgcagctgcatgaagggcttctctgtgagatcacccagggactgggagctgggggaccgaagagatgggtgcgcgaggaacacccagttagactgcgcaagtgacacaggtctcacagataggttcttcgccgtgcaaggcgtcaggctgccccaagacgcaaacaaaatgcaggctgctacgagtggagatgagtgctcagggatctgcttgcgtgactgctcctgcactgcatattcctactggaacggagactgctccgtttggcgtgggaaactgtacaacgtgaaacaacagtctgatgcttcttctcgtggagatggggaaacgctctacatccgccttgctgcaaaggaggtggcaatgcagaagagaggaatcagcgttggtgttgccgtcggtgtcgccatcggtgctaccgctgccgcttcgatcctcctagcaggtctgatgattcggaggaggaaagcgaagtggtttcctcgcacactccaagatgctcaggccggcattggaatcatcgcgtttcggtatgccgatttgcagcgagcaactaggaacttctcagaaaggttagggggaggcagttttggttcggtattcaaggggtgctacctaggtgacccggttaccctgctggcagtgaaaaggctcgacggtgcccaccaaggagagaagcagttcagagcagaagtgaattcagttgggatcatccagcacatcaatctagtcagactgatcggattctgttgcgaggatgataagaggctacttgtgtatgaatacatgccgaatcactctctcgacctacatttgttcaaggccaacggtacagttttggattggaatctcaggtaccagatagctattggagttgcaagaggactgacctacttgcacactagctgtcgggactgcatcatacactgtgacatcaagccagagaacatactccttgacgcatcttttgtgcctaagatcgcagattttggaatggcaaaggttttggggagagagtttagccatgcggtgaccacaatgagaggcactattgggtacctcgcgcctgaatggattagtgggacagccgttacatctaaagtcgatgtgtacagctatgggatggttttgtttgaagtcatatcgggaaggaagaattcgagtccagagtactttggggatggcgattactcaagttttttccctatgcaggttgcacgcaagcttcgcagtggacacgttgagagtctggtggatgaaaagctgcagggcgatgtgaacctcaaggaggttgaaagagtatgcaaggctgcgtgttggtgcattcaggaaaacgagtctgctcgaccgaccatggccgaggtggtgcagtttcttgagggcctctctgatctcggtatgccaccactgccaagactgctcaatgcggtcacaggagggtcaccgacatgactgtgacatttatagtcttgcctcgaattaggtttagcaatcccatgagaatattgtcatttgtcatctatatcatatcctagataaccattgtattcgtaactactttgaaaatatttttgacatactagacttatatgcaatcaaggaaagatattgacttcgtacc

SEQ ID NO: 141558 - DNA, 1933 bp, Zea Mays
aggatcgatttcttccgtcccgacgattcgcagattttacattctgattttggacgattttggtagaagctattttcacggaatcggactccaaccgaagtgtttgagtggcagaagccgattcccacggtcggaatctggcaagccgaaacaaacaggctgactgggttggcttccggtttcggcgatggagtgcgcggcgaagggactggccgcggagccgtgcgccggcggcgtcgccgatcggcggtgcggcggctgcggagccgtcgcctactgctcccgcgtccaccagattatacattggagggttcacaaagaagaatgtgaaaggtttgcagaacaaatgaggcacatcaatgcgctgagccagtttccattcacattcttggaacctcctgctctggtacttttctgtacccattgttttttttcatagctaagatcttctgggttgctattacctccctcgaaatgacatggtggaaggtactataaatttcagtgccttgcttcctaaactgcactttgcccacatggactgtctattttttctctacttttttattgtacaagctaattatatacattatgcatcaattatttgatacagataaaggattcatgcatttatgcttaattattatctagttctctcacaagttgttccttttttagaaccatgaattcccaagtgcaaggtgcttatttttgcaatcaatcaaacttcaccaaaaaggactctggaaatctgaatgtatatgtggccgagatgttgctcctttgaagggcttaagcgtagaagctgaatggaacttgcaaagctccctctgcccttgtgcagagcctaaaaatcctgtgtcttcggccctggcaagctgggaagcatattatcagtggagatcccttcccctgcattcacctgttgctgttttacttcattggccacttactctatatcattgtgttcaactctctcggacccaaactccaagatatgatggtcaggacaccctatgcattcactatttagggcctgagaaggagctacttcagcttgcagcgtttggggaactacgtgcattgtttccaagtgtccagattcacattgagcttgtcggaccagaagttccaaagtccagggatggagaggttgtgaacatttccagatatgcatgttgttctgataagagttgctgttgtaaatcttctattggttccaaagacttgagttgcactgcagtgacactcaaactgtggaaaggtttctatcatgagagatgcagtgatatattgaaggattccgttccacaacttatttttgccccaaatgcgggtgtggctgcatatcctagttggatgccaactattgaaatgataaggcagactgggattcctgcaatctttacggacttctgtgaagaagctgcacatctagcatcctgctgcataagctccataactggtcaaccccttaaaattccaatccaggtaaatcctttcaggcagccagttgcagcggaaaacaatgcattatacgtaccatgttattcaaattgctttgtttttgggatgtaaaattgccctgtcaccaggaagtatatttagagattgatttgtcaagaaatggaatgtgaattttcaaagaagacaagggtgccattcctagaacatctgagatgggaggtttttatttctgagagatgatggaattaggatttaatgttggtacacttagaatttgagaagacaagttgcacaaatcaagaggaacactggaagggctaggaatagcatgtgtacaagccgactaggagaaaatgtattttatttgaacctctgaaaatatttagatactgcaattgtaagattttcgcatcaaccgattcttgaaatacactttttcataattgggagatgtatatgttttctt

SEQ ID NO: 141559 - DNA, 1661 bp, Zea Mays
aggatcgatttcttccgtcccgacgattcgcagattttacattctgattttggacgattttggtagaagctattttcacggaatcggactccaaccgaagtgtttgagtggcagaagccgattcccacggtcggaatctggcaagccgaaacaaacaggctgactgggttggcttccggtttcggcgatggagtgcgcggcgaagggactggccgcggagccgtgcgccggcggcgtcgccgatcggcggtgcggcggctgcggagccgtcgcctactgctcccgcgtccaccagattatacattggagggttcacaaagaagaatgtgaaaggtttgcagaacaaatgaggcacatcaatgcgctgagccagtttccattcacattcttggaacctcctgctctgaaccatgaattcccaagtgcaaggtgcttatttttgcaatcaatcaaacttcaccaaaaaggactctggaaatctgaatgtatatgtggccgagatgttgctcctttgaagggcttaagcgtagaagctgaatggaacttgcaaagctccctctgcccttgtgcagagcctaaaaatcctgtgtcttcggccctggcaagctgggaagcatattatcagtggagatcccttcccctgcattcacctgttgctgttttacttcattggccacttactctatatcattgtgttcaactctctcggacccaaactccaagatatgatggtcaggacaccctatgcattcactatttagggcctgagaaggagctacttcagcttgcagcgtttggggaactacgtgcattgtttccaagtgtccagattcacattgagcttgtcggaccagaagttccaaagtccagggatggagaggttgtgaacatttccagatatgcatgttgttctgataagagttgctgttgtaaatcttctattggttccaaagacttgagttgcactgcagtgacactcaaactgtggaaaggtttctatcatgagagatgcagtgatatattgaaggattccgttccacaacttatttttgccccaaatgcgggtgtggctgcatatcctagttggatgccaactattgaaatgataaggcagactgggattcctgcaatctttacggacttctgtgaagaagctgcacatctagcatcctgctgcataagctccataactggtcaaccccttaaaattccaatccaggtaaatcctttcaggcagccagttgcagcggaaaacaatgcattatacgtaccatgttattcaaattgctttgtttttgggatgtaaaattgccctgtcaccaggaagtatatttagagattgatttgtcaagaaatggaatgtgaattttcaaagaagacaagggtgccattcctagaacatctgagatgggaggtttttatttctgagagatgatggaattaggatttaatgttggtacacttagaatttgagaagacaagttgcacaaatcaagaggaacactggaagggctaggaatagcatgtgtacaagccgactaggagaaaatgtattttatttgaacctctgaaaatatttagatactgcaattgtaagattttcgcatcaaccgattcttgaaatacactttttcataattgggagatgtatatgttttctt

SEQ ID NO: 141560 - DNA, 847 bp, Zea Mays
ggaaaatgcagataaacatggaataatctgaatttttcctttcttgttttatgttagccattaccttgttgtactgaatcttgcttgtgtccagggtagtctgtgacaggcctgggaacctctgcttcaagcacaggacttcaacacggtctgcaatctcaagtgcatcatgttctgagctcaaactgaggaagttgaggaggtgctctggagagaactgatcgcctgaagacatataccggtagatggtgtctcctacacccaccctcccactctgtggggtaacataacatctatcagaagcgagcaaatggaggatcttgactcttgacagaataaaactgttcagagagacagactttgcatgggaggatcagattacgtgactgacatacctttggaagtgtctccaagtatgataatggaacttgcatttcagagagaatactgctgttgatttccatggccatcttgtggatctggcttgcctggtctcttttctgctgcagttcacggtgcatgcaatcagacagcccagagtctgggacacatggctcagtttttcgagtgcaggaaggttcatcaggatatctgatcttggtgaggttgccatcacctgttgaaatcagaaaatcgagtctcaatcaggatgccatgaggatgaagcacatcaaactttgagatcgagtgatggtattatgacatttacatcatgtgtgcttccatcaggcatggcctggacagtaggtcccaaacactgttgctgcagttaacaaaagaagagaatcctgcattatatcaaagtgagtttaaaggatgaacacatgatgaatttccacgggtagat

SEQ ID NO: 141561 - DNA, 2004 bp, Zea Mays
cttcccaccgttctcttgacgactcctcgtctcctcgtcgtagtagttgcagccaccggtcttgagagctgccacctatttgccttgacgcggagaaaagtatacctggggggttggggcttgccgccgcaactatccccggcctcggctcgcctgcactgcacctctctccttggtttcttcccgttacccgtctcggcagatgcctctcttcctgcagcttcaacttcagggtgcctgtccacttagtcagtactgcagcggcgatatctgaaggtccgactaatgtgatgtcaatcacatgctgcttgcctgtcgtcgagtgcgtgtactgcctggcgtgtgcgcggtgggtgtggcagcgctgcctccactccggaggctacgacagtgagacctggggtgttgcatcggctgaagagtttgagcctgtgccgcgcttgtgtcggatcatcctctcggtctatgaggatgaccttgagaacccccaatgggcgcctccaggtggttatggcatggagccacgttgggtggtgcagcggagaatatatgaagacactcatggtcatgcaccaacataccttctgtatgttgatcaccagcattcagatgttgtgcttgctgttcgaggaatgaacatggcgaaggagagtgactatgctgtccttctggataacaagcttgggcaaaggaggtttgacggcggctacgtgcacaatggcttgcttaaggccgccgagtgggtttttgatgctgagtgtgatgttctgaaggaccttctggagaggaatcctggctatacactcacatttgctgggcattctcttggctctggtgtggtgtcaatgctagctttgctggcagtgcacaacagggagctgctcggtggcatagacaggaagaggatacgatgttttgcaatggcaccagcccgatgtatgtcactgaatttggctgtccgttatgcagatgtcatcaatgcagttattcttcaggatgattttttgcctcgcacagacattcctttggaagacatcttcaagtcactattctgcttaccatgccttctatgtggaagatgcctaatagacacatgtatacctgaaagtgtgatgttgagagatccaaggcgcctctatgcacctggtaggctttaccacattgttgaaagaaaacctttcagatgtggaagatacccccctattgtgagaacagcagttcctgtggatgggagatttgaacgcattgttctctcttgcaacgcaacatctgatcatgctattatatggatagaaagagaggcgcaaagggcattagatttattgctagagagtgagaaaaccatgcaagcacctgcggttgaaaggatgagcagtgagatcactgttacaagagatcacgacgaagagcagcaggaggctctgcggcgtgcgatcatgctaggggttgctgatgtaaacatgccatcaacatatggtacgttcaacgaaaatcctacttctgaaccagccgaggcctccccattactatcagacagcggaaggcgcagggcagtatgggaggagtggatcgcaaggatcttcgagaaggatgaatcagggcaaatggttccacggagatgatcgtggcgacagctcaaggcatgcttgcttgatgggtcggtttcttgatgctgcttccactctgtttcgagcctattttgaaacttcggaacggtaatgtaagatgagtaggggttagggattagatcatgtatttagggctagtttgacaaccctatttttctatgggatttttaatttcctaagggaaaacgaactaattttctataagaaaatgaaaaacccttggaaaattggggttaccaaaccagcccttagtgagtgagatggtgtatagcatgaataattttccctttggttgacaaaaaatgtgggtgcctattgtacttacacatcagtaatttcattgtataagaatataagatattgtagaatcttgggt

SEQ ID NO: 141562 - DNA, 798 bp, Zea Mays
ctggtagattacctacacctctggaatgcaatatctgatgttgtattgcaacctaactctgaggataagcatatcttttcaatcgcttctaatgggcagtattctgcatgctcggcttataagggtttcttcactggctctgttggttttgagcattacaaaatggtctggaaaacttgggcacctcctaagtgtcggttcttcctttggctggtggctcataataggtgctggactgcagacagacttgaaaaaagaggactaaatcatcctcctagatgccctctttgtgaccaagagcctgaaaccatcaaccatcttttggtttcttgtagcttttccagattatattggtacatcactcttcggaaattcgggctccacattcttgcccctatccaagatgacacaaacttcctgcagtggtggaaacgcattgctgacattgtgtcaggcatgaccaagaagggggtaaattcacttttgattctgggagcctggatgatctggaagttcagaaacagagtggtgtttgacgggtccccccccaatatcactacactattagaggccactgctgaggaaagggagaaatggatggttgcaggagctaagggtctttcctttttagctgctcccagtaccaatgcctgagataagttgtatcttttagttgtgtatggattgtttcctttatgcttgtttctggcctccataaggaggtcctgtattcgggtccttttcgaccctatttcttcttacttaatataatgaggcgcagttctcctgcgtttttcg

SEQ ID NO: 141563 - DNA, 3378 bp, Zea Mays
atgatgatcgcgaccgctgcgctgctggcctcgtccgattcagtggaggcgctcctcgcgggcaaaggcggggtgcccgcacccgcagacgagctgtggcagctgaagcagaagctcgacgaggcgcggggcctggcagcggacgccgaggcgaaggagggccgcgacgccggcgccagggcgtggctgcgtgacctgcggtacgcgctctacgtgctcggagactcggtcgacgacttccgccgcgccgccgctcggcggcaccagcagggccggagatcgatagagaggtatctggttggggttgctagtcacaacttgccatggtttatgacgtttaaggccgggcaactgggcaagtttaaccttccagcgaattatgccacacacttacgccattggtttacactaccatcaaacattgacagaaaccagtacaagactttcaagaccagcatcagtagcctcaataaacaaatggatgatattctacagaaaggttccgaactaggacttcaagcaatcaaccaggaagcccagagtgggagctctgaattttcatggggggtgatgcccgatgatggtactctgggtgacattcacaatgagaaaaataaattgattgacgtattgacagagaggaagagtccaaacaaagtcgtgataattgttggggatagtggaatcggaaaaactacactggcaaggaaaattcatgacgatcatcgcaccagaaatgcattcaccattgttttatgggtgagtgttttcagtgacttggatgatattggattactctctgcgattgtgaaggctgctggcggaaatcccagtggagaagaaaacagggtacaacttgaggccatgttggcagccattctcaaaggaaagagattctttatggtgcttgataacgttcgcagcgatcaaatttatgagaattccctagaggctcacttgcatgtgtgtggtcatggaagccggattttgatcaccactcgtgatgggagtatttcgacacagatgacggatgcttacatctaccgcgttaagaaactgacctttgaggattgttggtccttgctttgccgggcttcttgtctaaatgagagcctacatggcgacattttaaggaatatcggaatagcgattatccaaaaatgtaacaagcttccaatggctgtcaagattataggggctgtcctaagaacaaaagaaccgacctgcaaggcctggcagaaagtgtatgaaagcgaaggatggtccttctccttcggggagcttcgagactatgtccatggcttaactggggccatgtatttgggctaccatgatttgcccttgcatctgaagcagtgctttatttatttgtcactgttccctgaaggctttgtcatcagacagcagtttgccagtcaactgtggatttcggagggtttaattgatgcaagagactactgcagtcttgaaaagactgcagagcgttattacagggagttgttatcaaggagccttctgcagcctgaaattgggaacgacgatatgacaagatgcacagtgcatgatcaaattcgatcctttttgcagttctttgtcgatgataaaatttttactggcgatctgaagacgcccagggaaggactgcgacatgtgtggattagaagcaacctactaagaactactgtgggaaaaatattaggagtgaaaagcttgaagacagttattctatacaaaaacccatcggggaatcgcagcttagacgagctgtttaaggagctcagatatttgcaggtgttggaccttagtggtactgaaattaagtatattccaaggacattagattttctatgtcatcttagactgctaaatctttcactaacacgaattacagagcttccagagtccattgagtacctaacaaatctacaattcttgggtcttcgatactgcaattggctacataaccttccaaatggaataggtaaactgcaatatttgcgatatctggatcttcgaggaaccaaattgcatcaggtcctaccaagtttggtcaacctgaagcagctctccacgctacatggtttcgtagtaaaccgtagacccaagcgtgaggatgatccaactgggtggcctttggaagacctaaaatctctagaagcattgagaagcctgcagattctgaagttggaaagagtctcagatcctttgagggtgcaagaagccatgctggaaacgaagtcacacctcaaggaacttgaactatgttggagcaatgatgatagacagtccgaagtacaagaagaaaatgctggaacacttaagaacgtatctgattccctttctcctccacactgcttggaatctctcaaaatagtgagctattacggaaaagttttccctgattggctacctaatctctcaaacctccagcgccttgttcttactgattgcaaattctgtgagcatcttcccaacctgggccagctaaccgaactcaagttcctgactataacagcctgttccaagttagttacaatcaagcaagagcaaacaggtcaggcgtttccaaggctagagcagctgcaccttcgagacatgcccaatcttgaatcatggataggattttcacctggtgatatgccttcccttgtgaaattccgtctggagaattgtcctaagctgtgtaacctgccatctggcatcaagcactcgaaattcctgacaagcatgcaactacaccatattgatagcctgcgaatcattgaggacttgcctgcgctcaaagaattggttatccaagcctgcaatgaacttcaaaaaatctcaaatattccattgcttgaagttttgatagtccttggttgctcgcggttgaaggatgtcactgaagtccaccttagtcatgcccgcattgtagatagagacataagagaacttccagattgggttgctactaatgcatacatgctgcagacattcactatagttggcagagcagaactgcttcaaagattacttcccaaccatgaagactgggaaatcatccgtcacataagcaaagtttatgcaaacctacctgatgaatctccattcttcacctacacaaaaagctctgctgatttccatgtcgatcaaataatcggtgaacgagggaacccatctgtcctattaccagctgatgttccacaccaatcgctgaacatttcacttgctaattctgttgtgagaacctttcgagttggtgtgcccagagtaccactcagacggatttccacgatgaagagggctaataggacaaacagagagattcggcttgtccagactctcttcattttcttcacaacagtgatcttgctgttgcttgtgtttcttgagtga

SEQ ID NO: 141564 - DNA, 370 bp, Zea Mays
atgctgatgatgcaggggaaagagagatgccaccagccgtccagccagccctcccctttcgtgactgtgaccgccactatggccacgacggatggtaattatcttgtcttattaaccgagactcggatccattttcatcacaaaggagcacagcagcacaggtgtagtatgaatgcgatgttcatttatttctgatgatacggcttgtttgcgccggagacgcaaggttggcatcggaaggagatctggagctgcacaggtgtaacgtccagaaagtggcagctgagcctgttgagttcaatcaagagattaggagggaccattgttcggagccggccccttttggtgaggggaggtaggcagggaaggt

SEQ ID NO: 141565 - DNA, 1188 bp, Zea Mays
atgagcgtgagcaatgcatgtttgccgagtcaaacgttgccccaccaacaagcaagtgcgtcgtgcgtggatcctctccttcctctctcttggttcctgttatctctctcggctgtccactcccccgtgatgtgagcgcgtttctctcccgtcctctcctctcctcccccgcaacaaacacctgcaagctgctctcgatctctctctccgtcgccatctctctcgcgcgcgcattacttgcacgtacgagctcagaaggaaggcagaggcaaaagcagccatggtgatatgatacctcctcctcctcctcccattagctcctccgcatgcatcatgcatgggtacgtgcgcgtgctacattttatttgaaatgaaatggctggttgtctgcaggcgaactcgtcgtccggccttgcggtgaacgacgagtgcaaggtgaagttccgggagctgaagtcgcggcggagcttccggttcatcgtgttcaggatcgacgacacggacatggagatcaaggtggaccgcctcggcggaccgaaccagggctacggcgacttcaccgacagcctccccgccaacgagtgccgctacgcgatctacgacctcgacttcaccaccatcgagaactgccagaagagcaagatcttcttcttctcctggtcccctgacactgcacgcaccaggagcaagatgctgtacgccagctccaaggacaggttcaggagggagctggacggcatccagtgcgagatccaggccaccgaccccagcgagatgagcctcgacatcgtcaggagccggaccaactgaccgtcatcgtccatcaacgaccaagcaacaacacatccacactatatactcaattcacattgcatgcatcgttattattacatcatttatttcagaccccccgcccactgctaaccgtagtccataagagattcatcatccgtggactatgctcgatctcttccgtacgatacaattctcaaatatttctatttatttcctaagtgaattattatatatgtactatttcattccaggttcattttacttgtgaccattcttcagttcttttttctgtaaggatcggtatatcggagcatatgtgcatggctatgccagttgttgggcgtaagaatgtatttttttctgtaatatagaaaaaaactattttaagcaaca

SEQ ID NO: 141566 - DNA, 995 bp, Zea Mays
ggctgtccactcccccgtgatgtgagcgcgtttctctcccgtcctctcctctcctcccccgcaacaaacacctgcaagctgctctcgatctctctctccgtcgccatctctctcgcgcgcgcattacttgcacgtacgagctcagaaggaaggcagaggcaaaagcagccatggcgaactcgtcgtccggccttgcggtgaacgacgagtgcaaggtgaagttccgggagctgaagtcgcggcggagcttccggttcatcgtgttcaggatcgacgacacggacatggagatcaaggtggaccgcctcggcggaccgaaccagggctacggcgacttcaccgacagcctccccgccaacgagtgccgctacgcgatctacgacctcgacttcaccaccatcgagaactgccagaagagcaagatcttcttcttctcctggtcccctgacactgcacgcaccaggagcaagatgctgtacgccagctccaaggacaggttcaggagggagctggacggcatccagtgcgagatccaggccaccgaccccagcgagatgagcctcgacatcgtcaggagccggaccaactgaccgtcatcgtccatcaacgaccaagcaacaacacatccacactatatactcaattcacattgcatgcatcgttattattacatcatttatttcagaccccccgcccactgctaaccgtagtccataagagattcatcatccgtggactatgctcgatctcttccgtacgatacaattctcaaatatttctatttatttcctaagtgaattattatatatgtactatttcattccaggttcattttacttgtgaccattcttcagttcttttttctgtaaggatcggtatatcggagcatatgtgcatggctatgccagttgttgggcgtaagaatgtatttttttctgtaatatagaaaaaaactattttaagcaacaggttattgtcaagttactttgcttgtg

SEQ ID NO: 141567 - DNA, 255 bp, Zea Mays
attttaacatcccaatctgaactggagcaggaaactgtcaattggtgccgtcagatcttaagaaacagccccatggctattcgcgtgctgaaatctgcactcaacgcggcagaggatggccatgcaggccttcaggagcttggcgggaatgccacacatatattctacggcacggaggaggcaaaggaagggaagaacgcgtacatggagaaacgacgcccagatttctccaagttcccacgcaaaccttgagtt

SEQ ID NO: 141568 - DNA, 741 bp, Zea Mays
aacgaaaaccagctctcatattggcataattccaaatttctctcgtccgcaccgccgccactcgccttttcattccgcaccgccgccaacccgccgcctcttctttccatggaagtggacgacggtagccgcgccaccccgccactggacgccgtggccgccgccttcaagtcccaagtcatggagttgcaggacctcgtcctcgcccgcagcatgttcccggccacggcgctgcccgacctcgccaacgtggacgcgttggtgacggcgatggagtcgcaggtggaaaccatcagccgccgccttcaggaggagcttgacgccatccctaaggccaagaagctagtccagcggtccttgaaggaggaagagaagctgcagcatatgcttgcgaacttaccttctggaatgcgcaagaatgattttgctaatcagcacgaacagagctcatcaaggatgctgcctcattttaactcttcttttactgaagctaatgaatgtgaactgaagattaaggatgaaccagttgcagctcctaggaagggaagagcacctgcacctcgttggtatatctcaaccgaggagcttgattcactctcatcgtacatgaggggaagactgactttggaaaaggttaatatcgcaataaatgaagtggcttcatatgcagatgccaatgctcatcttgttacatgccctaagaaaaagttgtcagaagatacatgggaaaaagctttggta

SEQ ID NO: 141569 - DNA, 770 bp, Zea Mays
gtgatggagcccaaaaacagaaccttgtagcaggacctagaagagaaggcccgaagactcgaatctccacacatggtgatcttcctgatgagtgagcacaatctcacccaaggtgtcccaaagcgtaagatattgctgtatacctacaagggagagggttggtttgatgtccctaacccacaacataccctccaaagcttgatccactgtcctgataggctgatagagaccacctttttatccacctttgagagcacttcaggtgcgatagagcacccattcaaccatctctccatccaaaaagggtgtttttgccattgcccacatgggtgatgggtgtacatcgaactggcaactaccttccttacttgtgactaaacagggagatccaatccactccaaggcctattcgggtcagtcttaatcagccaaagccatttagcttgcagcgcccaactcatatatagcaggtttgggataccaagtcctccacggtccagcggtctggtgacttttcataagagttgtagttgtttcttgaacttatgttttcttgtattgctgagaagaagggaagagcacctgcacctcgttggtatatctcaaccgaggagcttgattcactctcatcgtacatgaggggaagactgactttggaaaaggttaatatcgcaataaatgaagtggcttcatatgcagatgccaatgctcatcttgttacatgccctaagaaaaagttgtcagaagatacatgggaaaaagctttggta

SEQ ID NO: 141570 - DNA, 762 bp, Zea Mays
gcccgcttcctcctccccgcgcccgcagcccccgccgctgatggcagtcgccgcgcccgcgcaagggaagttgcttcccaaatcccgcaaacaagatttaatcccgtgattcttcccatccatggcagccgcacccgcaaatcacgcatccatggcagccacgcccgtaaaccgcgcctcccccacgactcccccttccatggcgtcgcccccttccatccatggcagtcacgcttcctctacgtccttccatccatggccgtggctccctccgcgctgcgattcttcccatcctctccctccgcgcggtttgcggctgccaatcctctccctccgcgtcgtgttcttcccatcctctccctccgcgccggatctctccccatgtccaccaacgtcggcgtccatgacggcgcgcccggggcggcggtggacgcggccttcgccaggcgtgcgctccaggccgaggccctcctcgggtacctctccgcgctggccaccagcccacgtgccgggggcgacagggtggaccccgccgtcaccgcggcgcagctcggggcgctcggccggtggaagggctcggcgaggggccttcccgagtacacggtcgtccacgacatcgatggtgtcgtcatcgtcgtcgtcgccctgggagagtcaaagccaagcggaggaggccgcagtcgaccagatttgggaatcctactcctgccaaacgggatgaacggaaggaagcgagatctttctggggttgatttggcttga

SEQ ID NO: 141571 - DNA, 719 bp, Zea Mays
tctctcccgaacgcgcacgagaagaccaggtggaacatatgcaagcaggttctagagcaataaccccatgaatccagatcgggggtttgcatctacatgggcgtgtactccgcaccgctccctccggccccgaccgccgtgcgctcgttgtagccggggtcgacctcaaccacgacgacgatgcggtctcctcgccccacgctcgacctcctcactgacctcgccctgctccacctcaactcgtgatgaggattgtcggcatgttcacaccgcgccgttgcagaacgttggagcctctcagaactctagaagctgcctaccaccacgcaccctaagataggggcatatctgtgcatggtaccatcttcatcatgtagcctgggatgagctggcaccatgaaataattcaagtggttaaatcatgcatctgcagaaatattgtactctcaaatggtgggttgctgcgtcacgggagtttgggtgaaggcctgaaggatgtgatgcaaaacgtctatgcaggtctgggatgtccgcctcattatggatcaaaattcatgatttctaaaggtgtcagatgagtacctatatactccctccatcccagaaaacaaggcgcctcattagactattggaagctggacgacatggatgactctggcaagatgcggtgggagcacgacgacatggatgactccgaccacgagttcgacaggaagcct

SEQ ID NO: 141572 - DNA, 1533 bp, Zea Mays
gtcaatgatggctcttgcttgtccaatatgcaatgtgtgttgactcctgaaacagaaggctatgaccagatagactctgtcactactggagcatctgtactagttgagggagttgttgcaagcagccaaggcggtaagcaaaaagtggagttgaaggtttcaaagatcactgtgattggtaagagtgaccccacatcttttcctatacagaagaaacgggcatcaagagagttccttagaactgtagcccatctccgtcctcggacaaacacttttggtgcagtggcaagagtgagaaatgctctggcatacgcaactcataaattctttcaagacaatggatttgtttgggtttcaagcccaattattactgcctcagattgtgaaggagctggggagcagttttacgtgactactttgctttcgaatagcaccgaaggtggttccctactcaaagatattcctgcgaccaaggatggaagggttgattggtcacaggatttcttctgcaaaccagcatttctgacagtatctggacagctcaatggtgaaacatatgcttcagctctatctgatatttacacatttggtccaacgtttagggctgaaaattcaaacactgcaaggcatctggctgaattttggatgattgaacctgagcttgcctttgcggatctaaatgatgacatggcttgtgcaactgcatatctccagtatgtagtaaagtatattctagagaactgcaaagaggatatggatttcttcaatacatgggttgagaaaggcatcatagatcgattaaatgatgtagtagagaagaactttgttcacttgtcttacactgatgctgtcgagctactacttgggtccaagaagaaatttgagtttccggtaaagtggggtttggatcttcaaagtgagcacgagcgatatatcacagaagttgcctttgatgggcgccctgtaataatcagagattacccaaaggaaatcaaagctttctatatgagagaaaatgatgatgggaagacagttgctgcaatggatttgttggttcctcgggttggtgagcttattgggggaagccagagggaagagcgtcttgattaccttgaagcccgactagacgagcaaaatctgaacaaggagagctactggtggtatctggacctacggcgatatggatcagttccccacgccggtttcggtcttggatttgagcggcttgtacagtttgctactggaatagacaacatcagagacgccatcccatttccccgagttcctggctcagccgagttttaggcttcctttcgaatgtaggaattttatggggatggtatatgaatttcacaggaaatggttcaaaaacacatgaattatcttttaatccaaaggaggccttagcgccccgaaagtgttgtcatttgtttcatcattgtacagagttgagctgagactcgtggttaatcgagccaaccagtgttgtggcatgcttctccaaatatatatccagcaggtgctcctgactca

SEQ ID NO: 141573 - DNA, 1795 bp, Zea Mays
cacgagaattccatcgccgcggtattaaaaagtccctcccacgccgccgccacctaaacctcctcactcctcagactcctctccgcacataccctccctacctcgccgtcgccgtcgcatctgccatgggggcgtacaagtacgtctcggagttatggagaaggaagcaatccgacgtgatgcggttcgttcaacgcgtgcgctgttgggagtacaggcagcagccggccatcgtccgcctcacaaggcccacccgccccgacaaggcccgccgcctcggcttcaaggccaagcaggggtatgttgtttaccgcgtccgtgtgaggcgtggtggcaggaagaggcctgtgccgaagggtattgtctatggcaagcccaagcaccagggtatcacccagctcaagttccagaggaacaagagatctgttgctgaggaacgggctggacgaaagcttggtggactcagggttctcaactcctactgggtgaatgaggatagcacctacaagtactttgagatcatcctggttgatgtggcccacactgccatccgcaacgacccaagaatcaactggctatgcaatcctgtgcacaagcatcgtgagctccgtggtctcacctctgcaggcaagaagttccgtggcctgcgtggcaagggccacactcaccacaagaacaggccgtcgaggagggccacctggaagcgcaaccagaccctgtccctccgccgctaccgttgagcacacacatcttgaattcttgatgctctgctaccgtggaacccgccccatgcaggctctgatagtatttggtatttttgttgcattgttaaattttgctacccgtgttccttccgagccccttgaactgtgttgtcagtgtaccgtggagcaagtgtcgcgaactatatttgtggttctcagtcaatgaaaatgattgtttgtagtttattgctgtgtattctttctggcacgatggatttagttttgtggcggcagctgttttttttatctcatgctggttgatgtaaactgccttaacctttggtttgccatggtacatggatttagttttgcggtggtagtagatttctgcccggagcctgacattattctctgggtcgcgctggaattttgctctgacattatataaagaatttatgcttagttgttttattaaattttatccacattatataaataaatttatgactgtttgttcgtgttatttaagcattctttcgttaaatttcatccatattaaataaaccaaaaaaatgtcaacataagttttggtttatatatacgcgggtgcgatttaataagaagtttaaatagagcgtagtagttagcataagttatttttataatatcgagtaaaagtaataaatatttttatttttattttgaccaaaatgtcacagctaagcaccgaaacatgacccaatttgcgtacacgaaacagtgccccaggaggcacatgtgcatcttatcggtggtaatttggtcatttgggtgtccattaagggctggtttggtgaccattaatagcaagagattttctatttcataaatatctttcaaatttctggtcatcaaactaatcttaaagatgatagttcttaaaaataaagtttctggaatgaagtttgaaaacaatgtcaaataagggattctatagttttttttcaaggctagactttctctctagcatatattgctcatgtcttcatatccctcctttatatcacctagcaacatcatttatatatgtctctagcaacatcatctatatc

SEQ ID NO: 141574 - DNA, 1852 bp, Zea Mays
tccctcccacgccgccgccacctaaacctcctcactcctcagactcctctccgcacataccctccctacctcgccgtcgccgtcgcatctgccatgggtgagttcttggccctaccgctgatgccctctccgattcgcatgtgtggggctttacggtatgttgcaccgtttctcgctgtggcgcaggggcgtacaagtacgtctcggagttatggagaaggaagcaatccgacgtgatgcggttcgttcaacgcgtgcgctgttgggagtacaggcagcagccggccatcgtccgcctcacaaggcccacccgccccgacaaggcccgccgcctcggcttcaaggccaagcaggggtatgttgtttaccgcgtccgtgtgaggcgtggtggcaggaagaggcctgtgccgaagggtattgtctatggcaagcccaagcaccagggtatcacccagctcaagttccagaggaacaagagatctgttgctgaggaacgggctggacgaaagcttggtggactcagggttctcaactcctactgggtgaatgaggatagcacctacaagtactttgagatcatcctggttgatgtggcccacactgccatccgcaacgacccaagaatcaactggctatgcaatcctgtgcacaagcatcgtgagctccgtggtctcacctctgcaggcaagaagttccgtggcctgcgtggcaagggccacactcaccacaagaacaggccgtcgaggagggccacctggaagcgcaaccagaccctgtccctccgccgctaccgttgagcacacacatcttgaattcttgatgctctgctaccgtggaacccgccccatgcaggctctgatagtatttggtatttttgttgcattgttaaattttgctacccgtgttccttccgagccccttgaactgtgttgtcagtgtaccgtggagcaagtgtcgcgaactatatttgtggttctcagtcaatgaaaatgattgtttgtagtttattgctgtgtattctttctggcacgatggatttagttttgtggcggcagctgttttttttatctcatgctggttgatgtaaactgccttaacctttggtttgccatggtacatggatttagttttgcggtggtagtagatttctgcccggagcctgacattattctctgggtcgcgctggaattttgctctgacattatataaagaatttatgcttagttgttttattaaattttatccacattatataaataaatttatgactgtttgttcgtgttatttaagcattctttcgttaaatttcatccatattaaataaaccaaaaaaatgtcaacataagttttggtttatatatacgcgggtgcgatttaataagaagtttaaatagagcgtagtagttagcataagttatttttataatatcgagtaaaagtaataaatatttttatttttattttgaccaaaatgtcacagctaagcaccgaaacatgacccaatttgcgtacacgaaacagtgccccaggaggcacatgtgcatcttatcggtggtaatttggtcatttgggtgtccattaagggctggtttggtgaccattaatagcaagagattttctatttcataaatatctttcaaatttctggtcatcaaactaatcttaaagatgatagttcttaaaaataaagtttctggaatgaagtttgaaaacaatgtcaaataagggattctatagttttttttcaaggctagactttctctctagcatatattgctcatgtcttcatatccctcctttatatcacctagcaacatcatttatatatgtctctagcaacatcatctatatc

SEQ ID NO: 141575 - DNA, 730 bp, Zea Mays
ccggccaacacgagtgcggcgcgtcatgatgcatggctccacgagtgccgcagttggcacgctcaacggcgcccagcgatgttgacctcgatcgcctgccgctcgtcggccacctctccgccgtttcagaagtctccagttgaagaagcaccggaggaatttgaccacataatcttccctgtcaatcataaaccattccatttgtccagcagaaggcttggccctcaactaaaggaaaccttttgtatttgaatattagtgatacctgtgtatggatacgaatccaccacatcccatgaactgaagtatcattgattggaatatcattgattggaaggagctgaacaagatggaatcctgaatcgactgcccgatcaacaagacgtttaggatttagaaattctccaacgccaaggtgatcgtgtgatctgattgaaaacatgggtacaacaacacctgcagtcctgcacccctccatgatgcatcttggtaaatatagatgaagtattatttggctgtgtatgatgcattgatgcatattgatactctggtttgttagccggactatggagttccatggttctgttgttttgagcacatgttcatgcgttctgcgtggagttataatgcatcatagcatatgttgttatatttgcatacttaactactctgctattgtaaacaattgacttttcgaataattttatccttaatatgtatatatatttgc

SEQ ID NO: 141576 - DNA, 1190 bp, Zea Mays
ccatgtttcgcgccatccgtcctggacaattccgaaaccctagcaccatccgacggccatgataatttcatcgcctcggtataaggtcactcctacgccgccgccacctaaacctcaggctcctctccgcacaccccaccttccctacaccgccgccgccgtcgcacgcagccgcatccgccatgggggcgtacaagtatgtctcggagttatggaggaggaagcaatccgacgtgatgcggttcgtgcagcgcgtgcgctgctgggagtacaggcagcagccggccatcgtccgcctcacaaggcccacccgccccgacaaggcccgccgcctcggctacaaggccaagcaggggtatgttgtttaccgtgtccgtgtcaagcgtggcggcaggaagaggcctgtgccgaagggtattgtctatggcaagcccaagcaccagggtatcacccagctcaagttccagaggaacaagaggtctgttgctgaggagagggctggacgaaagcttggtggactcagggttctcaactcctactgggtgaatgaggatagcacctacaagtacttcgagatcatcctggttgatgtggctcacaccgccatccgcaacgacccaagaatcaactggctatgcaatcctgtgcacaagcaccgtgagctccgtggtctcacctctgcaggcaagaagttccgtggtctgcgtggcaagggccacactcaccacaagaacaggccgtccaggagggccacctggaagcgcaaccagaccctttccctccgccgctaccgttgagcacacacatcttgatgctctgctactgtggaacccgccccatgcaggctctctgatagtatttggtatatttgtttcattgttaaattttgctacatgtgttacttttgagccccttgaactccgttgtctgtaccatggagcaagtgacgcgtacgagtcgatgaaaatgattgtttagtagtgcattgctgtgtattctgtctggcacgattgatttagggcatgtttgggaacacttctttcaaaaccacggtttatattaccatagtttaccgtatgttatgacatgaacatattgtattttacatcattctaattcaacatctgtttggagccgggaggagaaaggccaagacaaggaaggagaaaggggctagactgcgcctgcgg

SEQ ID NO: 141577 - DNA, 1532 bp, Zea Mays
tttttttttcccagctcgcggaacgggcggcctcgttgcaacttgcagagacccagtcctctcgctttctcaccgcgattcgcctcgcttccatccgattcgattcgggagctagaggagagagaggagaggagaggcagtgatgccgctggctgagtcgcccccgtggcgccgcaaggccacagatttcttctccacgtccagtgtcaagctgaagcaggcaggccaatcggccggggataatatagttgatgttgctgggaaggttgggtccgtggtgaagagtcggtgggctgtcttccaagaggctaggcagcagcagcagcagcagcaacgtccgccgcatgagacagtgcaagagcgtatcatcactgctgctgcctccactggtttgcttttcaggaaaggcatttcagagacaaaggagaaggttgcagtgggaaaggtcaaagttgaagaggctgctaaaaaaactgcagataaaagcaagagtatcttgaacaatattgaacgctggcagaagggagtcgcaagcactgatgtgtttggtgttcctattgaagctactgtacaacgagagcaatctgatagagcggtgcccctggtgcttgtgagatgtgcggactacctggttatatcagactcgggtgcatctttacttgaaggtgtaaatcctattgatgtaggtgcactggtgaagtgctaccttgccagtatcccggagccacttactacattttcgctttatgatgagcttcgagctgcgagggttagcattcctgatcttaggaacatattgaagaagcttccaaatgtgaactacatgacgctagagtttgttacagcgttgctgctgcgagtcagccgtaaatcatcacttaacaagatggactcccgcagccttgctgtggaatttgcgcctttgatcatgtggcggcaaggtgacactggcacagatttgcgtaaccacctcaagtttaccctgaaaccgcctccaaaaattgtggatacaacatcaaatgctgccacatgggacctgttagatgaggatgacgaggatgcttcatcccagatccccttagacgatgcttcaccaccagactacagctccattgaggttatccagtgtctgatcgagcatcacaatgccatcttcaccgacgcaaatgaaaccgtgtggagatgatcggcatctcctctagatctctctggtgttagatcgtgctattgtacaagttccaggtaggaaggtgggaaggtggattagcgctcgctattgttagggataagcattttggccggaatatttttgaagtaggtttgtatatacactagtgttaactgttaattctccacgggactagaaccgggtcatgccatatcaataaaaatatatttggatggatgtaaacgaaatgtgttgtttccatcattgattgtattcagatcatataataataacaaagcctttgtccccagttgggctagactaaagttgaaatccaataaaagccacaaattatggtttagtc

SEQ ID NO: 141578 - DNA, 1647 bp, Zea Mays
gcggaacgggcggcctcgttgcaacttgcagagacccagtcctctcgctttctcaccgcgattcgcctcgcttccatccgattcgattcgggagctagaggagagagaggagaggagaggtatggtaatcgccttgagcgtgctctgcttcctgcctcttcggtcgcctccagctcgctgttcattcccgctccgcccgctgattcgccggatcgggccgtggcagtgatgccgctggctgagtcgcccccgtggcgccgcaaggccacagatttcttctccacgtccagtgtcaagctgaagcaggcaggccaatcggccggggataatatagttgatgttgctgggaaggttgggtccgtggtgaagagtcggtgggctgtcttccaagaggctaggcagcagcagcagcagcagcaacgtccgccgcatgagacagtgcaagagcgtatcatcactgctgctgcctccactggtttgcttttcaggaaaggcatttcagagacaaaggagaaggttgcagtgggaaaggtcaaagttgaagaggctgctaaaaaaactgcagataaaagcaagagtatcttgaacaatattgaacgctggcagaagggagtcgcaagcactgatgtgtttggtgttcctattgaagctactgtacaacgagagcaatctgatagagcggtgcccctggtgcttgtgagatgtgcggactacctggttatatcaggtttgaataatgagtacttattcaaatctgaaggtgacaaaaaagttcttcagcagttagtttctctttacaatgaagactcgggtgcatctttacttgaaggtgtaaatcctattgatgtaggtgcactggtgaagtgctaccttgccagtatcccggagccacttactacattttcgctttatgatgagcttcgagctgcgagggttagcattcctgatcttaggaacatattgaagaagcttccaaatgtgaactacatgacgctagagtttgttacagcgttgctgctgcgagtcagccgtaaatcatcacttaacaagatggactcccgcagccttgctgtggaatttgcgcctttgatcatgtggcggcaaggtgacactggcacagatttgcgtaaccacctcaagtttaccctgaaaccgcctccaaaaattgtggatacaacatcaaatgctgccacatgggacctgttagatgaggatgacgaggatgcttcatcccagatccccttagacgatgcttcaccaccagactacagctccattgaggttatccagtgtctgatcgagcatcacaatgccatcttcaccgacgcaaatgaaaccgtgtggagatgatcggcatctcctctagatctctctggtgttagatcgtgctattgtacaagttccaggtaggaaggtgggaaggtggattagcgctcgctattgttagggataagcattttggccggaatatttttgaagtaggtttgtatatacactagtgttaactgttaattctccacgggactagaaccgggtcatgccatatcaataaaaatatatttggatggatgtaaacgaaatgtgttgtttccatcattgattgtattcagatcatataataataacaaagcctttgtccccagttgg

SEQ ID NO: 141579 - DNA, 1481 bp, Zea Mays
gcctcgttgcaacttgcagagacccagtcctctcgctttctcaccgcgattcgcctcgcttccatccgattcgattcgggagctagaggagagagaggagaggagaggcagtgatgccgctggctgagtcgcccccgtggcgccgcaaggccacagatttcttctccacgtccagtgtcaagctgaagcaggcaggccaatcggccggggataatatagttgatgttgctgggaaggttgggtccgtggtgaagagtcggtgggctgtcttccaagaggctaggcagcagcagcagcagcagcaacgtccgccgcatgagacagtgcaagagcgtatcatcactgctgctgcctccactggtttgcttttcaggaaaggcatttcagagacaaaggagaaggttgcagtgggaaaggtcaaagttgaagaggctgctaaaaaaactgcagataaaagcaagagtatcttgaacaatattgaacgctggcagaagggagtcgcaagcactgatgtgtttggtgttcctattgaagctactgtacaacgagagcaatctgatagagcggtgcccctggtgcttgtgagatgtgcggactacctggttatatcagactcgggtgcatctttacttgaaggtgtaaatcctattgatgtaggtgcactggtgaagtgctaccttgccagtatcccggagccacttactacattttcgctttatgatgagcttcgagctgcgagggttagcattcctgatcttaggaacatattgaagaagcttccaaatgtgaactacatgacgctagagtttgttacagcgttgctgctgcgagtcagccgtaaatcatcacttaacaagatggactcccgcagccttgctgtggaatttgcgcctttgatcatgtggcggcaaggtgacactggcacagatttgcgtaaccacctcaagtttaccctgaaaccgcctccaaaaattgtggatacaacatcaaatgctgccacatgggacctgttaggtgtgtaaattctactttgtttattaccttttagatgaggatgacgaggatgcttcatcccagatccccttagacgatgcttcaccaccagactacagctccattgaggttatccagtgtctgatcgagcatcacaatgccatcttcaccgacgcaaatgaaaccgtgtggagatgatcggcatctcctctagatctctctggtgttagatcgtgctattgtacaagttccaggtaggaaggtgggaaggtggattagcgctcgctattgttagggataagcattttggccggaatatttttgaagtaggtttgtatatacactagtgttaactgttaattctccacgggactagaaccgggtcatgccatatcaataaaaatatatttggatggatgtaaacgaaatgtgttgtttccatcattgattgtattcagatcatataataataacaaagcctttgtccc

SEQ ID NO: 141580 - DNA, 2156 bp, Zea Mays
gccccaaacacccttcacttctcgctcatccccttcacccctttcccttgtgctgactgcggaagccgaacaatgccgtagatcagagcagcgcagcccccgccatgctgctacgcgccgcgctccacctcaaccgccttttctccactgacgccgccctcgcacccccgaagctgcggaacctgccctaccgtctccgtcacgtcgccgtccccgccgcgcgcgctgtcgtctccgagtacctccactcgacgcgctgcctcccgtcctcccacgccgactccatcgccacgcactccccgcgctccctcttttccttcctcgccgcgctccccaccgtgccgtgctccctccccaccgcggagtttcccgccctccttcgccgccacctcaacttccacccgctcaatgagctccccttcttcctcgaatcaatcggcgggcccaccgcggcgcccccctgcttcaactccatcttcctttccgaccatccctccctgctcggcgccgtcgccgcgctcgcgcacttcggattcccgtggtcacgcctcggcctcctctaccctggcgtcctcctcgacatgcccccggacctcatctccacgcgcctctccgttctcgaggcccgcctccacgggcttcctcgcgccgccatcatcgccgcctgcctcaccttcccatcacttctcgagggggatctatccgattatgacctactcattaaggatatcgccaccacgttcataggattgggaccggatttgagggccagcaatgacattgacgcgttctcggcggtgtgccggaggatgcggatgttttatgatgccgggacagagtttggtagcattgggggactcgtcggaggcagccagagggtgtttcttgagctcggggagaagaggattgctgagaggttatggttcttcaaagagctggggatggagggcaaggagatgggaaggtttttgctgagcaatgccaggatttttgatcttgatttctctgatgtggtgatctcagtgccaagatatctgctgaatgttggattggcagaggatgaggttgatgctgcggtggggaagcacccatatgttgttgggaagaaccagctggagaaccttgccagggtgctgcgggcaatggagctggagcatcggttcctggagaagatattggcaggtggggagagtttgcgctatttatcaccagaatttgttttggaggatgatagctatgatgccgaggtcgaaagagctttcttggatgggatggctaaggtcatggttgacaggaaagcacaatttgtagacaagaagctggagttcttgaaaagtgttgggtatggtgagaatgagataaccaccaaggtaattccagtcattaacagcaccaaggatttgctgttggagcggtttgactacctcctggaaagaggagtggagtataagatactatgtcggatcttgcgcgtttttccgaaggtgctgaaccagagtaaggatatgcttaatgagaagttgaactacctcacagaggagctgggctactccttggagtacctgggctgcttccctgcatttctgtgctttgatttggagaacagggtcaaacctaggtatacaatgctttggtggctccaagagcatggcttgcttagaaaaaaattagcccctgcaacagtgcttgctaactcagagaagaggttcattagtaccctttaccttgtgcatcctgcagttccaaagttgtggcttgagtgtttttcttcaaggatacatatggactattatctcaagaacatcaatcagcatccagacaacatataagaattatattgacattgttaatggtacatggtatttgccatgtgcatccttttctctgttgaggtgtatttgttagatgtagcagctttatattggcatttttttttgctcctgcatacttatcagtaggtcgcaggatgtagcatgaaagggatacaccaatcagacagcaaaccttgtaagttgattgtggtaaagctgtgctgcaaatttgaactctgtttcagttcaatttccacgttcctcctattgctatgcacttactggaacatcatggtgtattcatcattcttgacaacggttaactaccacagttcatcttgtagt

SEQ ID NO: 141581 - DNA, 1683 bp, Zea Mays
atgcccgttcttgcagtgtttaaatactacgtcgtctcctggcttcgcgtctctcatcaccattggtgtgaagttctttcacaagtatcagatcttgtgataaaccatgaccgggaaaaagaccatgaccgggaaaaagaccacggcttctctatggaggatgaggaagaggcgggcttctctacggcggcactccaaagaaagccaaggctccagcatgatgctctgctctgtgtaaaatcagtgcaagaacgggcattctggatgtgcaaagtgctgcatccgcacggacggggaggttattttgtagtgaacgtgccaaggacagacaacacatcgagggcacaacacgccgaggacagatacaacacaccaagggcacagcgtgccgagcataaagaaaaaagggagatgtggcttagacaatggggattcttctcttggccgagggtgcggcgtgggctggctcagacgactgacacactctctgccttgtctgagggcgtgacgcagatttgctcgggtgcggggctggctcggagacgctttcgtgtggaacctgaggctcaagagcatgcatatcgagtattagagaaaaatgcgaagaaggtgtgcagggatgcattttccaatgctcgtctacaggttgtgaacgcgtacatgaagcgccgaggtcattctatcaacaactttcgacaatattcagatgtctacttgactgtagaccagtacatggaggtaactcttccatggatggaacaccggccgcaggcttacaaggctttgtgtgagatatgggcttcgcccgagtggattgagaagtcaaacagaaatcgacataggcagcgccatcagcaggacgaggacgatgatgaggtcgtagtcaaccatacctatggggctgatggacacattcggttggctaagcgaatggaggctcaaactagagttgtcccgagcccaatcgatgtttataggagagggcatcgagcgaaaaacagtgaaatctccgatgagttgtgtagtcaagtggtcgttgagcgtatggagacatacgggcaggagatggttaagaagtatggagaagactacgattggcgaggagcgcctaccatcaacgctgaagttgtgcattcacttggaggcaaggcgcatggacgatattctatgtttaccggtgttatcgattcgacggagttgcgttctcgtggcggctcttcgtcgcaggcggactgtggtagtagcagccgtagtcgccgctctgtatctagcatgaaggatgctatgagggagcagcaagaaaagtttcgtgaagagatgcggcaacaacaaatggcatttctccaacagcaatcagagtacatggctgcttacaacgcacaggcgcaacaagcaatgaactcttggtttccacagcaggcacaacaacaaccatttgttttccctcaatttcagccgccgatgcctcagtggggattacatgctccgccacctccacctccacatcagggatccggggtcatgggccacaacacgccaccaccggtcataccagcaccaggaggagcttatgcaggggagggagcttatgcaggagaggatccaaactcgtcacacgacttcgtcaaccagttcttggcttctggaggtagtggacacaactccaacgaccccgatatgtga

SEQ ID NO: 141582 - DNA, 1207 bp, Zea Mays
agggggaaaaaaggtgcagttggcgtgatggctgtcaggctgctgcgtctgctcgagcctcgagcggaggcaccactaccgcactagcactggagcaggtcctcgccgtccacaggcgccagttcgtctcccggataagacgataattcgagccgaaaaatatcaccacacagacacacaggtacgcaaggcacagcccaagaccaccgcaccgcacctgcacaccgccagggatggcggcaaccgcgcacctcaccggtgtcctcggcgtgtcgtcgccgcctctcgctccgtcccactgcagctgcagcggcgccaagaagcagagctgctcgctgcgtcaggggcggcagcagaggaggcgcctccgcgtcgcccgcgccgtcgaggtggacgcgccttccgccggcgcgccggagccggaggaggcggaggagccgtccgtcgacttcgcgttcgtcagcccgcggctgctgccggacgggacgccggacgtgcactaccggacggcgcgcggcgggcagaagctcagggacatcatgctcgacggctacatcgacctctacgggccctacgataaggttcttctcaactgctcagggggcggcgtgtgcgggacctgcatcgtcgaggtggttgaaggcaaggaaatgctgtccccgaaaactgatgtggaaaaggagttgctcaaaaggaaacccaaaacgtggagattggcgtgccaggcaacggtgggcaacgcagattcgactggacagatgatcattcaacagttgccggagtggaagatacacgagtgggacaagtaggggttactgctttactggtcttgaagagtgctctcgtggccatactatagattacatgcagtggaaatgggaaaaaaaggaataagaagcagctgatcagtggaagagctggtgcagattgattgatgaagcttttcatactccaaacaaacaaacaaaaacctgggcatgttttttcaccatttgtagcaaccgaaaggagcatggatcaattagccccgttctgtaaaccgttcccttatacacaaaaaaaaacaaaggcgacttgttcatgatcatcgaaagacgtgattttttttttgttcgaaaaaacaagactgttagcgttgctatggcctatgtgtggctattggcgcgggaagatgatgttgcagcttccgataggcctttctgggctc

SEQ ID NO: 141583 - DNA, 1088 bp, Zea Mays
gttcgctcctcgcaatgggagcggagcggagcggacccaaaaactcgaaaagtcgaaatccaaacccgctgatcagcttatccccttcgcaggagccaggacggacgaactgcgagtacacgagagaggacagaggagaggagacacaggcgacacgcgccatttgggagagggaaaggaatggagctgacgtcttcttcccgctccgtgctctcctcctgcaaccggccggtcgctcgagctctttgcaggacggcgtacccgggtgcaaggaggaaggagaagggaatagtatgtatcttgagcgaggagaaagaagtggtacaaaggacgatccggaggcgagctgccttttctttgttgctggcttcgccggtgctatcagtggcgttctcggcctatggaaagagtaaaaccatgaacccttacgatgaaaggcgtctgcttcagcagaataagaagattcaggaagccaaccgtgcccctgaggatttcccaaacttcatcagagaaggcttccaggtcaaagtagtgacaccggacaactatattacacgggcctctggactaatgtatgaggacattaaagtcggtacaggcgactctccaaaggatggtcagcagattatattccattatgtgggctacaatgaagcaggacgaagaatagatagcacctatattcagggttcccctgcaaaaattcggttagggaacggaacactagttccaggttttgaagaaggcatacgggacatgaaaccaggtggtaagagaagaattataatacctccagagcttggtcctcctgttgggccttcgacgttcttcagtgcgaagcagttcgaagtgttcgatgtggagctactggcggtgcaggactgccagcggaggacgatagcattttactctgatgtcgtgtgcagctgagcttcggtttgtctagtcttccgcctatggcacatcgcagcagcatcctgcacttttggctgctggtctgagttgccgtccaattgtgtatatatatagccagctgttgttactgcggctactgatgatgggcaatggtagtgtgttattagttcttc

SEQ ID NO: 141584 - DNA, 779 bp, Zea Mays
gtacgggtagctgccttcgcttcgcttccataccactccactccgctgctccgctcgctcagccccctcgagcgtgcagcgcggcggcgatgcccgagctcgcggcggaccacgggccgcgggggcgcaggcggaggcagcgcgggagcgggtgatgcaggaggcggcgacggcgaccgggtgccgccgttcatgggcaacaaccgcgaccacaacccgcgggagctgcgctcctgggcgcgccgcacggggttccacccctcggccttcttctcgggggagtccaactcctccttcgcctcctccgccgcgccgcaggccccgccgccgccgccgcctcccccggtctcctcgcgtcgcccgccgccggcacgggagcgggaacccgaaccggacacggaggacgaccttgttcccgcgccgccactggaattagagcgcggcgggcccgcccccgtccgcggacgcggcggacgcccgcgccgccgcatcgacctccgcggcgagctcgtgatcccaccgggcttcggccgcgaggaggcggaaccggacgcgggaaaggggcgcgcgcgcggggacgccaggaggaggaacttcggcgtcgagatggatcagacgccggccaatgcgggccggaacgggaacggagcgctcgcggacgcggagtcgaggaagaagtccgaggaggcggaggcggacgcgaagcggaaggcggaggaggccgaggcgaggaggaagaaggaggaggaggagagggacgccgagctggctgcgtacta

SEQ ID NO: 141585 - DNA, 210 bp, Zea Mays
cagggggctatacttgttggttcagtgttccagataatattaggatacactggtcttatgtcactgtttctgaggttaataaatccagtagtggtggcaccaactattgctgcagtgggtttggcattttttagttatggtttccctcaggctggcagctgtgtagaaatcagcatgcccctcattctgttggttcttctgtgcactttg

SEQ ID NO: 141586 - DNA, 1023 bp, Zea Mays
ccatttcaagacggttatcatcatgataatagtttctctggttgcttcagttgattcgctttcatcgtaccatgcggcgtcactgctggtaaatctaagcccaccaacacgtggagttgtcagcagagcgattgggcttgaaggggtttcaacgtttattgctggagtgtggggtacaggtacaggatcgacaacgttaacagagaacatacacaccctcgaaacaaccaaaatgggcagcaggagggctttgcagcttggggcagccgtgttagtcatcttctccttctttggtaaaatcggagctctcctagcctctatacctcttgccttggccgcctctgttctgtgcttcacctgggcgctaattgtcgcgcttggtttgtccacattgcgatacacccaagcagcaagctccaggaacatgataatagttggatttaccctgttcatctccttgtcgatacccgcatactttcagcagtatgaacccagctccaacctaatcttgcccagctatcttcttccatatgctgcagcgtcaagtgggccagttcacacagccagcagcgggctgaactatgcagtgaacgcgctcctatccatcaacgttgtggtggctctccttgtcgcgttgatccttgacaacacagtgccaggcagcaaacaagagcgcggtgtgtacatttggacagatcccaaatccctcgaggtggatcctgctacattggaaccctaccgattgccggagaaggtttcgtgctggttcaggtgggcaaagtgtgtcggcatctgaaagctcttaggagtggcggtgaagattctatttattccattggtacctgctatatatatacccatgtaaagttatggtcatgttagagggaacacgttatacgagctatgctatgtaatgtaagtttgtagtaatactacgttcaaataacagttagagattattcgttttgctctcaatctacatggattgagtgggttttaattaaaaaagtcaaatttttttat

SEQ ID NO: 141587 - DNA, 856 bp, Zea Mays
aaagaagtcgcgccccactcgatgactaccgaagcccaaaggcctccgcggcgtctcggctagtcgcctttccatttttacccccttctctctcctctccggccgttgccgttgctccgcgccgctctcctgtcagtagccgctgccgccgacgctgcaagtgtgagtctgtcgccgcggccatgttcgcctggatcctccgcggctgccgcgacgagtgctccgcctccgaccagctcaagcaggctcacgatgtcttcaaggcgaaagaggtggtcctgcaaaagaagatctctcaagaggtggaacgggccaaggagttcacaaagtcgggaaacaagcaggcagcaatgcagtgcctgaagaggaagaggtactacgagagtcaaatgaaccaagttggaagcgttcagctgcgcattaacaccaaggagagaatgatcgctgatcacacgggcaacaaataacacaaagtgagaccgcatctctggaaccgtgtatcgaacacagctttgttctgttcagatatgaaatcttgtgagaatgagatgtcaaccattggtgtgttcttcgccaaacagcatatcacacttaacattagtgtgcctttaacataagcataagatattacattttggaccaaacttcttgtttcctaggcatgaccacttatttcctagcatactgcagtgtatagtgtgagccatacgtgttcttcatccacattctcaccgtattcaactgaatagcaattagtaagtcatttatgtttcaagtttttttggcactctgcacagaagggttacaatatggtattttcttgaattgagatagaggcagtgtattcctctctttg

SEQ ID NO: 141588 - DNA, 685 bp, Zea Mays
aaagaagtcgcgccccactcgatgactaccgaagcccaaaggcctccgcggcgtctcggctagtcgcctttccatttttacccccttctctctcctctccggccgttgccgttgctccgcgccgctctcctgtcagtagccgctgccgccgacgctgcaagtgtgagtctgtcgccgcggccatgttcgcctggatcctccgcggctgccgcgacgagtgctccgcctccgaccagctcaagcaggctcacgatgtcttcaaggcgaaagaggtggtcctgcaaaagaagatctctcaagaggtggaacgggccaaggagttcacaaagtcgggaaacaagcaggcagcaatgcagtgcctgaagaggaagaggtactacgagagtcaaatgaaccaagttggaagcgttcagctgcgcattaacaccaaggagagaatgatcgctgatcacacgggcaacaaataacacaaaagtaaatgatgacagtttgtatatctgagcagctacgttaacctctaaaacagcaagccggcaagccgactctatcatgtatttttaacatagagatagccttgtccttttcttatcgttcagtaaactacattgtaaacactgtcctgccattttgctcctgattttcctgaactttctgttctgcgtaatgacatttgtgtgaatgtttt

SEQ ID NO: 141589 - DNA, 706 bp, Zea Mays
aaagaagtcgcgccccactcgatgactaccgaagcccaaaggcctccgcggcgtctcggctagtcgcctttccatttttacccccttctctctcctctccggccgttgccgttgctccgcgccgctctcctgtcagtagccgctgccgccgacgctgcaagtgtgagtctgtcgccgcggccatgttcgcctggatcctccgcggctgccgcgacgagtgctccgcctccgaccagctcaagcagcatgtgctggctctgcaggctcacgatgtcttcaaggcgaaagaggtggtcctgcaaaagaagatctctcaagaggtggaacgggccaaggagttcacaaagtcgggaaacaagcaggcagcaatgcagtgcctgaagaggaagaggtactacgagagtcaaatgaaccaagttggaagcgttcagctgcgcattaacaccaaggagagaatgatcgctgatcacacgggcaacaaataacacaaaagtaaatgatgacagtttgtatatctgagcagctacgttaacctctaaaacagcaagccggcaagccgactctatcatgtatttttaacatagagatagccttgtccttttcttatcgttcagtaaactacattgtaaacactgtcctgccattttgctcctgattttcctgaactttctgttctgcgtaatgacatttgtgtgaatgttttcga

SEQ ID NO: 141590 - DNA, 1755 bp, Zea Mays
gccctctggcccagcgccatggccacgcccgccgtgacgtcccgatgagcacccatgtcggcagcgccttcgttacaccgtcacaaagttcggaaaccacacgaaaaccaccggccgagaattctgcaccgaatcttgacaacgtcatctcgaggggcatgccctactcgtgtgcataaagcttgcgcaggccaggattcacctcgcccttgcgcagaactgcataaaaccccaccccatctgcggcgagggttttcctcgaagcctcggatctccgccgagaaagcatctccagggggatttctgggaagaagagggagtggttgagccatgggcaaccttcacgccaaaggtgctggaacgggcgccaaaggtgctggagcagcaaacacttccatctcgaattctcgggactcgatgtccaatgccgccacaccttctccagtagagcaggcaaccttcaagtgggtcattgatggcttttcctccctgcttgacaaggatcaaggatggacatactccaacgtatttgagctcatgggtgtagaatggtatctgaaactgaatccaaagtacgaagtcagtaatgaggagtgtgtctctctcaggcttgaactgtcgcagagttcagtgaaactcgacactatctttgaggcatctttcaagttcatgatatatgatcagttaatcggaaagcacaaggtgcatctaggtaaccacagcttccagactgcaagtacgagctctgccatcgcattcatgttacctctgaaagcactcagacaatcctctagatttattgtcaataacagctgcgtatttggcattggcttcatcaaagttgccactatcaaagttaacacgacgctagaaacactgtttgtcaggaagatgaacatcttcaacgaggccaaagtttacacttggaaaatcgaggatttctctgctctgaagaacccgtcccactcaccggagtttgagatcgctggatacacatggtgataaataatcttttcagcttgcagtacttgacatgtactccacatgactgaacgttgatatcataatctgaacttccttgcaatgctaagagtggttctgaaccacatcggttttgaaaattttacttgaaacacaattatagcagtcctgcacgtcgtcaacctgattgtgtgaccctgaccaatttgcaggattatctctttgaatccatcctacgatggtaacagcctgtccttattcctgaaaatgaagaagacaaacgacgtccccaaaggctctgggagcctggtcgagttcgctttatccatcaaagaccaggaaaacggcaaggacaggaaatatccaggcaggtgccagttctcgagcaaacaccatcgctggggatggaagaagttcatctcgctggaggacttcaaggactcgtcaaagggttatctcatcaagggcaagtgctgcatcgaggctgaggtcgcaatcagtggctcttcgaagacggagtactctatgtaatttgatttgtgagagctcatgattagtgtttattctcgctagaaccaactatatagcgtgttccatatgtattagcatgccatcgagactctagcttgctctatagatatctcgacgtatccgctcttcaagcttcgttctgtcgagttgaatgtggtctaataagtgaatatatgcaaactgggatcttattattttaggctattctggcaatctatcttgattgcgacgaatgatttcaca

SEQ ID NO: 141591 - DNA, 1349 bp, Zea Mays
gcagaactgcataaaaccccaccccatctgcggcgagggttttcctcgaagcctcggatctccgccgagaaagcatctccagggggatttctgggaagaagagggagtggttgagccatgggcaaccttcacgccaaaggtgctggaacgggcgccaaaggtgctggagcagcaaacacttccatctcgaattctcgggactcgatgtccaatgccgccacaccttctccagtagagcaggcaaccttcaagtgggtcattgatggcttttcctccctgcttgacaaggatcaaggatggacatactccaacgtatttgagctcatgggtgtagaatggtatctgaaactgaatccaaagtacgaagtcagtaatgaggagtgtgtctctctcaggcttgaactgtcgcagagttcagtgaaactcgacactatctttgaggcatctttcaagttcatgatatatgatcagttaatcggaaagcacaaggtgcatctaggtaaccacagcttccagactgcaagtacgagctctgccatcgcattcatgttacctctgaaagcactcagacaatcctctagatttattgtcaataacagctgcgtatttggcattggcttcatcaaagttgccactatcaaagttaacacgacgctagaaacactgtttgtcaggaagatgaacatcttcaacgaggccaaagtttacacttggaaaatcgaggatttctctgctctgaagaacccgtcccactcaccggagtttgagatcgctggatacacatggattatctctttgaatccatcctacgatggtaacagcctgtccttattcctgaaaatgaagaagacaaacgacgtccccaaaggctctgggagcctggtcgagttcgctttatccatcaaagaccaggaaaacggcaaggacaggaaatatccaggcaggtgccagttctcgagcaaacaccatcgctggggatggaagaagttcatctcgctggaggacttcaaggactcgtcaaagggttatctcatcaagggcaagtgctgcatcgaggctgaggtcgcaatcagtggctcttcgaagacggagtactctatgtaatttgatttgtgagagctcatgattagtgtttattctcgctagaaccaactatatagcgtgttccatatgtattagcatgccatcgagactctagcttgctctatagatatctcgacgtatccgctcttcaagcttcgttctgtcgagttgaatgtggtctaataagtgaatatatgcaaactgggatcttattattttaggctattctggcaatctatcttgattgcgacgaatgatttcacagc

SEQ ID NO: 141592 - DNA, 1334 bp, Zea Mays
aacttcagccattcgattcttgatttgtggtccctggtgcagcgaggccacaagggggaaacgaccggaggcctggttctagagactacacaacatatcgcgatggctctatctgacctgaggtctatgtctggcttgctggcccgcacctctctcgatcccacatcggactcatctccttcgattcagcagaggacagcgctctgcctctccactacttgacagccacggatccttccatccctcgcctagcgaacagacccggctggccatcctcaacgcacccctcccattttccattcggatgtatgcgtgggtgaccagcacatcgaggagttccacaagcacacatgaggtatctgaaactgaatccaaagtacgaagtcagtaatgaggagtgtgtctctctcaggcttgaactgtcgcagagttcagtgaaactcgacactatctttgaggcatctttcaagttcatgatatatgatcagttaatcggaaagcacaaggtgcatctaggtaaccacagcttccagactgcaagtacgagctctgccatcgcattcatgttacctctgaaagcactcagacaatcctctagatttattgtcaataacagctgcgtatttggcattggcttcatcaaagttgccactatcaaagttaacacgacgctagaaacactgtttgtcaggaagatgaacatcttcaacgaggccaaagtttacacttggaaaatcgaggatttctctgctctgaagaacccgtcccactcaccggagtttgagatcgctggatacacatggattatctctttgaatccatcctacgatggtaacagcctgtccttattcctgaaaatgaagaagacaaacgacgtccccaaaggctctgggagcctggtcgagttcgctttatccatcaaagaccaggaaaacggcaaggacaggaaatatccaggcaggtgccagttctcgagcaaacaccatcgctggggatggaagaagttcatctcgctggaggacttcaaggactcgtcaaagggttatctcatcaagggcaagtgctgcatcgaggctgaggtcgcaatcagtggctcttcgaagacggagtactctatgtaatttgatttgtgagagctcatgattagtgtttattctcgctagaaccaactatatagcgtgttccatatgtattagcatgccatcgagactctagcttgctctatagatatctcgacgtatccgctcttcaagcttcgttctgtcgagttgaatgtggtctaataagtgaatatatgcaaactgggatcttattattttaggctattctggcaa

SEQ ID NO: 141593 - DNA, 2020 bp, Zea Mays
aacttcagccattcgattcttgatttgtggtccctggtgcagcgaggccacaagggggaaacgaccggaggcctggttctagagactacacaacatatcgcgatggctctatctgacctgaggtctatgtctggcttgctggcccgcacctctctcgatcccacatcggactcatctccttcgattcagcagaggacagcgctctgcctctccactacttgacagccacggatccttccatccctcgcctagcgaacagacccggctggccatcctcaacgcacccctcccattttccattcggatgtatgcgtgggtgaccagcacatcgaggagttccacaagcacacatgaggttttatcgcattcgagacagtttcagtggcacataacaactaatcaccaattcaccatggcgtcctccacctatccagtccggtcctcctcgcccttctcctccaacccgcgctcacagcagcgacctcgctctcggtgctgctgctctcaacggcgtcgtggtggattgtaggtgtggatgggcagcgcttgaagccggtgtgcacgaagtgggctttgcatttggagcccgcagccgcggagggcctagcgcggtgcggcatggcacgtcgaacatcacaggacatgtggcatcgatgggattcaactatgtcaggctcacctgaccgacctacctcctcaccaacgtcgtgctcgctggagcgtgtcggcgtgcaggagtgtgttgttttgtagtccctatttttagtccgtggaaaagccagacgcaaagtgaagtgtagttttctagaaaaaaaggtatctgaaactgaatccaaagtacgaagtcagtaatgaggagtgtgtctctctcaggcttgaactgtcgcagagttcagtgaaactcgacactatctttgaggcatctttcaagttcatgatatatgatcagttaatcggaaagcacaaggtgcatctaggtaaccacagcttccagactgcaagtacgagctctgccatcgcattcatgttacctctgaaagcactcagacaatcctctagatttattgtcaataacagctgcgtatttggcattggcttcatcaaagttgccactatcaaagttaacacgacgctagaaacactgtttgtcaggaagatgaacatcttcaacgaggccaaagtttacacttggaaaatcgaggatttctctgctctgaagaacccgtcccactcaccggagtttgagatcgctggatacacatggtgataaataatcttttcagcttgcagtacttgacatgtactccacatgactgaacgttgatatcataatctgaacttccttgcaatgctaagagtggttctgaaccacatcggttttgaaaattttacttgaaacacaattatagcagtcctgcacgtcgtcaacctgattgtgtgaccctgaccaatttgcaggattatctctttgaatccatcctacgatggtaacagcctgtccttattcctgaaaatgaagaagacaaacgacgtccccaaaggctctgggagcctggtcgagttcgctttatccatcaaagaccaggaaaacggcaaggacaggaaatatccaggcaggtgccagttctcgagcaaacaccatcgctggggatggaagaagttcatctcgctggaggacttcaaggactcgtcaaagggttatctcatcaagggcaagtgctgcatcgaggctgaggtcgcaatcagtggctcttcgaagacggagtactctatgtaatttgatttgtgagagctcatgattagtgtttattctcgctagaaccaactatatagcgtgttccatatgtattagcatgccatcgagactctagcttgctctatagatatctcgacgtatccgctcttcaagcttcgttctgtcgagttgaatgtggtctaataagtgaatatatgcaaactgggatcttattattttaggctattctggcaatctatcttgattgcgacgaatgatttcaca

SEQ ID NO: 141594 - DNA, 1609 bp, Zea Mays
ctccactacttgacagccacggatccttccatccctcgcctagcgaacagacccggctggccatcctcaacgcacccctcccattttccattcggatgtatgcgtgggtgaccagcacatcgaggagttccacaagcacacatgaggttttatcgcattcgagacagtttcagtggcacataacaactaatcaccaattcaccatggcgtcctccacctatccagtccggtcctcctcgcccttctcctccaacccgcgctcacagcagcgacctcgctctcggtgctgctgctctcaacggcgtcgtggtggattgtaggtgtggatgggcagcgcttgaagccggtgtgcacgaagtgggctttgcatttggagcccgcagccgcggagggcctagcgcggtgcggcatggcacgtcgaacatcacaggacatgtggcatcgatgggattcaactatgtcaggctcacctgaccgacctacctcctcaccaacgtcgtgctcgctggagcgtgtcggcgtgcaggagtgtgttgttttgtagtccctatttttagtccgtggaaaagccagacgcaaagtgaagtgtagttttctagaaaaaaaggtatctgaaactgaatccaaagtacgaagtcagtaatgaggagtgtgtctctctcaggcttgaactgtcgcagagttcagtgaaactcgacactatctttgaggcatctttcaagttcatgatatatgatcagttaatcggaaagcacaaggtgcatctaggtaaccacagcttccagactgcaagtacgagctctgccatcgcattcatgttacctctgaaagcactcagacaatcctctagatttattgtcaataacagctgcgtatttggcattggcttcatcaaagttgccactatcaaagttaacacgacgctagaaacactgtttgtcaggaagatgaacatcttcaacgaggccaaagtttacacttggaaaatcgaggatttctctgctctgaagaacccgtcccactcaccggagtttgagatcgctggatacacatggattatctctttgaatccatcctacgatggtaacagcctgtccttattcctgaaaatgaagaagacaaacgacgtccccaaaggctctgggagcctggtcgagttcgctttatccatcaaagaccaggaaaacggcaaggacaggaaatatccaggcaggtgccagttctcgagcaaacaccatcgctggggatggaagaagttcatctcgctggaggacttcaaggactcgtcaaagggttatctcatcaagggcaagtgctgcatcgaggctgaggtcgcaatcagtggctcttcgaagacggagtactctatgtaatttgatttgtgagagctcatgattagtgtttattctcgctagaaccaactatatagcgtgttccatatgtattagcatgccatcgagactctagcttgctctatagatatctcgacgtatccgctcttcaagcttcgttctgtcgagttgaatgtggtctaataagtgaatatatgcaaactgggatcttattattttaggctattctggcaatctatcttgattgcgacgaatga

SEQ ID NO: 141595 - DNA, 166 bp, Zea Mays
tgttttattagtatgcacaattcaaacaagttttgtgtgtttatacaatcacaatggacagttgatcaattgcttatacaataatcaattatttcgtggcttcatccacctcatcgttggttcttcgttgtttactaataagggcctggttcatagaacaagtctg

SEQ ID NO: 141596 - DNA, 360 bp, Zea Mays
atgaagctcatgatcatagtactgacacatgggcagcaccctgaatttaaatacctgacacatatgcacctaggatcctttggaaaaagaagatcatgcccaatgctcgagggcgccactgaagacatggacctcatgggtcggctcctcgatgagctcgacctgctgcagcgccactccccggatgtggaccttgacatggtggacatggaccttcttaaacatattgtagttcacaagaacaacacatttttgtacaggcagaacaactttcagaattttacctgcccgccagccagtttgaaccagtcaggaaccggtgatgatcttccagcatcatgtgagaacagagaggcatga

SEQ ID NO: 141597 - DNA, 150 bp, Zea Mays
atgggatcgaggaacgggaacgtggtacgcggtacgctactaaaactaagatttaacactactggaacgagattgttcccacgttcccagaacggaacgaacgttcccggaacgaggaacgtggccaagttcccagttcccggttactaa

SEQ ID NO: 141598 - DNA, 4550 bp, Zea Mays
ctcccgtatcccctcagtcctcacctctctctcctcgccctgctctgctctactctactcactcccccaactgccagcagccagccgaatcctctctctatctctctcctcttcttcctccgtataccgagctcagccgagcatctcctccattccccaagcacaacaactccttccacaggcggacgcagtcggtgccattcaatgccctgactgccggctgcccggcccatgcacagagagacagggcgcctctgtcttctctctctctctctctctctctctctctctgagacacgacgcagtcaccgccacctcctttaactcccctgcctcgtcgcttcccgacgctgactcgctcgggaacccgtgcgcccatgcacgcacccgccgcctacgtgcgcctccctacttgcccctgccggcctgccctgttcatgtacccaccacaatcttacacctaggaggacgctacgagctcaagctctgggctgtggcgagcggcgagcattgagtcgaggggcaccgagaagatggcaatgacgcggccgttcttggcgccgctgatgatagtagcggctgttcttctttcacgcatggcggcggcggcagcggacgacggcgacgtgctgctgcaggtgaagagcgcgttcgtcgacgatccccagggggtcttagcgggctggaacgacagtgctggctccggcgccggctcgtcggggttctgttcctggtccggcgtggcgtgcgacgcgtcggggctcagggtcgtgggcctcaacctgtccggcgccgggctggccgggacggtgtcccgcgcgctggcgcggctcgacgcgctggaagcgatcgacctgtcgtcgaacgcgctcacgggccccgtcccggcggcgctcggtgggctacccaacctccagttactgctgctctactccaaccagctcacgggccagattccggcgtcgctgggggcgctctcggcgctccaggtgctccgcttgggagacaacccgggcctgtcgggcgccatcccggacgcgctaggcaagctcggcaacctcaccgtgctcggcctagcctcctgcaacctcaccggcccgatccctgcgagcctcgtgcggctcgacgcgctcacggcgctgaacctgcagcagaacgcgctgtccggcccgataccgcgcggcctcgccggcttggcgagcctccaggcgctcgcgctcgccggcaaccagctcacgggcgcgataccgccggagctcgggacgctcgcggggctccagaagctcaaccttgggaacaactcgctggtgggcgccataccgccggagctcggcgcgctcggcgagctccagtacctcaacctcatgaataatcgcctcaccggccgcgtcccgcgcacgctcgccgcgctctcgcgcgtgcacacgatcgacctgtccggcaacatgctctctggtgcgctgcccgccgagctcggccgcctgccgcagcttactttcttggtgctatccgacaaccaactcaccggcagcgtccccggcgacctgtgcggcggcgatgaagcggagtccagtagcatcgagcaccttatgctctcgatgaacaacttcaccggggagataccggaggggctctcgcggtgccgagcgctgacacagctcggcctggcgaacaacagcctctccggcgttatccccgccgcgctcggcgagctcggcaacctgacggatctggtccttaacaacaacagcctctccggcgagctgccgccagagctcttcaacctcactgagctccagacactggcattgtatcacaacaagctctccggtcgcctgccggacgccatcggccgtcttgtgaacctggaggagctgtacctgtacgagaaccagttcaccggcgagataccggagtccatcggggactgcgcgagcttgcagatgatcgatttcttcgggaaccggttcaacgggagcataccggcgtccatggggaacctgtcgcaactgatcttcctcgacttcaggcagaacgagctgtccggcgtgatcgcgccggagctcggtgagtgccagcaactcaaaatccttgatttggccgacaatgctctgtccgggtcgattcccgagacgtttgggaagctccgttcgctggagcagttcatgctgtacaacaactcgctctccggcgccatcccggacggcatgttcgagtgccggaacatcacgagggtcaacatcgcgcacaaccggctcagcggcagcctcctgccgctctgcggcacggcgaggctgttgtcgttcgacgccaccaacaactccttcgacggcgcgatcccagcgcagttcggccggtcgtcggggctccagcgcgtgcgcctggggagcaacatgctctccggaccgatcccgccgtcgctcggcggcatcaccgcgctgacgctgctggacgtgtcaagcaacgcgctcactggcggcttcccagcgacgctcgcgcagtgcacgaatctcagcctcgtcgtcctcagccacaaccgcctgtcaggggcgattccggactggctgggctcgctgccgcagctcggcgagctgacactctccaacaacgagttcaccggagcaatcccggtgcagctcagcaactgctccaatctcctgaagctgtcgctcgacaacaaccagatcaatggaacagtgccgcctgaactcggcagcttggcgtccctcaacgtgctcaatctcgcacacaaccagctctcaggtcagattccaacgacggttgcaaaactgagcagtctctatgagctgaatctgtcacagaattatctgtccggtccaatccctccggatatcagcaagctgcaagagctgcagagcctgttggacttgagcagcaacaatttcagtggccacatccctgcatcactcggctcactctccaagctggaagacctgaacctgtcccacaacgctctggtcggcgcggtgccgtcgcagctcgctggaatgagtagcttggtgcagctggacctgtccagcaaccagcttgaagggaggctgggcattgagttcggccggtggccccaggccgcgttcgccaacaatgcagggctctgcggtagccctctgagaggttgcagcagcaggaacagccggtcggcgttccacgcggcgtccgtcgcgttggtgactgcggtggtcacgctgttgatcgtgctcgtgatcatcgtgcttgcgctgatggcggtgcgccgccaggccccggggtcagaggagatgaactgctcggcgttctcgtcgtcgagctcgggcagcgcaaaccggcagctcgtcatcaagggctcggcgcggcgggagttccggtgggaggcgatcatggaggccacggcgaacctgagcgaccagttcgccatcggatccggcgggtcgggcacggtgtacagggcggagctgtccactggcgagacggtggccgtgaagaggatcgcggacatggacagcggcatgctgctgcacgacaagagcttcacgcgggaggtcaagaccctgggccgcgtccggcaccggcacctggtcaagctgctcggcttcgtcacgtcccgcgagtgcggcggcggcggcggcatgctcgtgtacgagtacatggagaacggcagcctctacgactggctgcacggcggcagcgatggccggaagaagcagacgctcagctgggacgcgcggctcaaggtcgccgccgggctcgcgcagggcgtggagtacctccaccacgactgtgtgccgcggatcgtgcaccgggacatcaagtccagcaacgtgctcctcgacggcgacatggaggcgcacctcggcgacttcggcctcgccaaggccgttcgggagaaccggcaggccgccttcggcaaagactgcaccgagtcaggttcctgcttcgccggatcatacgggtacatcgctccagagtgtgcttactccctgaaggcgacggagaggagcgacgtgtacagcatgggcatcgtgctgatggagctcgtcaccgggctcttaccgaccgacaagacctttggcggagacatggacatggtgaggtgggtgcagtcaaggatggacgcgccattgccggcccgggagcaggtgttcgatcctgctctgaagccgctggcgccgcgtgaggagtcgtcaatgacggaggtgctggaggtggcgctccggtgcacgagggcggcaccgggggagaggccgaccgcgcggcaggtctccgatctgctgctccacgtttcactcgattactaccgcgcctgcgaaaaacgttaggatttcgaaactgggggatgaagttgtcctagtagctgcttttctaagtcgtccttttaagctagcttaatcttttcattcatgaaactagggaaaaagagacttatttttagggtttgaagttgaatcgagtcaagaatgcccttcaaaattgtatttcttaagttcaaattttgggatcgcttgtaaaaagcacttggaaatgcgcagcaaccaggaatgccgaagcatcaa

SEQ ID NO: 141599 - DNA, 1209 bp, Zea Mays
gaggaaactgctggagagggtgagagcaaggggagcagcggtcgggcagccatggggcaccactgctgcagcaagcagaaggtgaagcgtgggctgtggtcgccggaggaggacgagaagcttgtcaagtacatcaccgcccacggccacagctgctggagcgccgttcccaagcatgccgggctgcagcgctgcggcaagagctgccgcctccggtggatcaactacctccggccggacctgaagcgcggaaccttctccgaccacgaggagcgcaccatcatcgacgtccaccgcatcctcgggaaccgatgggcgcagatcgccaagcacctgcccgggcgcacggataacgaggtcaagaacttctggaactcgtgcatcaagaagaagctcatcgcgcagggcctcgaccccaagacccacaacctcctgccggcctccaggactctcctccacggcaacggggcaaaccctagcagcaacaatcctgcccacttcaactcaaacggctgcgctgctgtcgtctccgtcgccacgacgcccttcaccatcagctccccgaccaaggccgccgcctacggcaccgtcacggccacgccgccgccggagacgatggcgccggcaacgtacgacgtccctaataattaccctgacggcatgctcatgaggcatgatcaggcagccacggcggctgcgattccgggatacccgtaccaccccggaaacggcggcggcgtgctgatgagcttcagggaccagaatgctggtctccagacatctgtggacttcgtgaacggctcctcgtcctcctcctccatggatcacgccgccggcatgcctaacggcaacggctttagccaacaaggcatgggcgcggccttcatggacgtgacggcgggaatgtggagcaccgcagccgtggattctggcatgtgtgcagggatggaagtggctcagccaccgccgccgccgccgcagcagccgctgccaccacaagggctggtgcagggggaggtgctcgtcggccgacaaactgtgatgaacggtggcggtgcagttgctgacaagggcatggacatgatggacgtctcttcagtgtatggcggcgccggtgcaatggcgttcgatctggagctgatggagtcatgcgcgttgttttgcggcagcaccggcaacaccatggagcagctgcaatgggactgctaa

SEQ ID NO: 141600 - DNA, 106 bp, Zea Mays
ctgttcgttagaatctaggtgtttggatacacagattctcagattgcagattctgtttgaacaaacgatacacattaacaccgaaccaacaaaaggtcattacata

SEQ ID NO: 141601 - DNA, 534 bp, Zea Mays
atggcggttgtggaggcgtgcgaccccgcaaggatcgacatctcgtccaagacagcagcctcctcagagcggacgacgcagcttatctctggtggaaggcacgcagccacgcccccactcccctcctcgtgctccccgccgacgcctgcctcgcgctcctcgtcgaccgtctctccctctcctccgtcgttgcatctcgcctctcgcgcacgcacaaagctgaggacgttcctgctcaagccgttcaagctcatcaccgtcttcctccacgagaccagccacgcgctcgcctgcaagctcacctgcggtgatcgcacgatctacgacgctgatttggaaagtgccttgccaaacgattccaacacaaatcccccaaatcgtgcacccatcatcattaaaaaggtcgcaattgccagactgctacaaccatcctacagctacggaaatccttcgctcacactcctccagatgaattggtttacaagccgcctgaagtatgtatctgtagaacagaaatactctaaaaatttatag

SEQ ID NO: 141602 - DNA, 7293 bp, Zea Mays
acaacccccgatgcgatgggtgcccctgcccctcgatagccgcgccgctctcctgcccccgttccccatttgcatcctcgtccacctccctgccctagcaccgtcctcccctattcgacccaacgccgccgccgcctccgccgccgcataggcctcgccgcggcctctgctccgccccgcggcctccggaggttctactcgcgcgcgatccgccgctgcgtccgttgctccgccatcgattcggtggcgcgtggagtatgtctctggtgcaagagtgctgaagatgaaggagaggagctctttatgcgaaagtgcagccgatggaaactggggtttgaaatataaaaggaaaagaagcaagttaacagttagcccatctaatgagaatgaggctacctcaccaacatctgactctcgaatgagccatggttccaccaaaaagaagttgaagcatgacaataacatttctccatcagccaagaagataagagggcacgatgggtattttttcgagtgcgtagaatgtgatcttggtggcaatttgctatgttgtgatagctgtcctcgtgtttaccacttggaatgcctcaatcctcctcttaagcgtgcaccccctgggaagtggcaatgtccaagatgccgtccgaaaaaagttagcttgaagctgttaggtaatgcagatgttgacacttctaaacgtgaaaaaagtacaaggacatatgcaagtacggcatcagatagtccaccttcgcatacaaaagtctcctttaagaccaggaactccacacaagacaaaactggattaaacgaacaaggaaaagagtcatctggtggcacaatgaatgggggtgaaaccagtacgaagaataatgaagttgagaaaaagaagacactgatattacatttgaagaagcgttcaaccaaggaattgtcagagaacactaaaccctcgaagtcagaatttgttgaactttcagaagagaaaattgtaaaacatggaagtgttttgaaactcaagaaacatccacatcgtatggacttgtctccaagtaaatctaaaaccaggaggcaaagtagccagagagagagtaaaagatctggcacaaaaaagattaaatattccatgtctgatgatgacagtgtttcctcatcagaaccatcgacatctcttgataacagtgaatcaccaccaaaaagaaaacactcagatggaaaagcaccttcatccagtaccaagaaagggaaaaagaaagtgaaatttgttgagaaaaagcactctgaggagcagggcgtggtaggtgacaaaatgatgactacccaggaggatcagcaggtcgatcgcatcctaggctgccggcttcagatgagccaaatcaacccgccgtcccatgcttcattggagcagtttgaatcagctaatctccaggtggatggtatggttcttccacatgcttccgctggcattcctaataggcctcatgatggaacagagtcttctagaaatggtacaattgaggatatatgtgctgatgaatcagccaatcatagtggtcacaatttagaaatgcgaaaggatacggacagtaaatcccatgaaaaggagtcacataagcgagaacaagtcaagaagatattatcagtatgttctggtgatgagaccaatataatgaaagatgatcaagtagtcagagaaaatgtttcagcttccaaaaaaggtgaagatgagacatctgatttgccagcagaaaaggatgataccatacttccagtcaccagagcttgtacaatgatcaggaccaatcaagatcatacagatgaaagtaaacagcatgggaaaatagaacaaataacaaataaggactacaatgatgctggatatgagttcttgatcaaatgggttggaaaatcaaatattcacaacagttgggtttctgaatccgaggtaaaaatattagcaaaaaggaaactagaaaactacaaagcgaagtatggaatgaatgaagtggaagaggttttaatcaaatggtgtggtcttccttatgatgaatgcacttgggaaagatcagatgaacctaccctgatgaaatatagccatttggtcactcagttcaagaattttgaatgccaggctttggataaagatgtggtaaaagattatgcaaatgcaaggaaccgacatgagcttaatgtgttagttgatcagccaaaagaacttcagggcggcatgctcttccctcatcaattggaagcgttgaactggctgcggaaatgctggtacaagtcaaaaaatgttatccttgctgatgagatgggtcttggaaagacagtgtcagcttgtgcttttctatcatccctatattgtgaatttaagattaatttgccatgtcttgtcttggttcctctttctacaatgcccaattggatggctgaattttcatcttgggctcctcatttaaatgttgtggagtatcatggttctgcaaggtcaagatctatcattcgccagtatgagtggcatgcgggcgatgcaagccagattggcaaaacaaagagatcgtacaaattcaatgttttgcttaccacttatgaaatggtgcttgttgatgctgcatatcttcgttctgtctcatgggaagttcttatagttgatgagggacatcgcctgaagaattctagcagcaaactctttagtttacttaattcattctcatttcagcacagagttttgttgactggaactcccttacagaacaacattggtgaaatgtataacttattgaacttcttacagcctacttcttttccttctctatcatcatttgaggagaagtttaatgaccttacaacagcagaaaaagtagaggagctgaagaaacttgtagctcctcatatgcttcggagattgaaaaaagatgcaatgcaaaatatccccccaaagatagagcgaatggtacctgttgaattgacatcaatccaggctgaatactaccgtgctatgcttacaaagaactatcaagtactgcgcaacattggaaaaggtggtgcacaccagtctttattgaacatagtaatgcagcttcggaaagtctgcaaccatccctatcttattcctggaactgaacctgaatctggttcacctgagtttctgcatgaaatgcgcataaaagcctcagcaaagctaactttgttgcatttgatgctaaaaatattacacaaggaaggccatcgtgttcttattttctctcagatgacaaaacttcttgacatccttgaagattatctgactttagaatttggccctaaaacatttgaaagagttgatggctcagtatctgtggcggagcgccaggcagcgattgttcgctttaatcaggataagacacgttttgttttcttgctgtctacacggtcatgtggacttggtattaatttggcaactgcagatactgttatcatatatgattcggatttcaacccacatgctgatatacaggcgatgaacagggcacacagaattggacaatcgaacagacttctggtttacaggcttgtagtacgtgctagtgttgaagagcgtatcttgcaattagccaagaagaaattgatgcttgatcaacttttcgttaacaaatcagaatcacagaaagaagtggaagatatcattcgctggggtacagaggaactctttggaaatagtgacagtgtggatggtaaagataacagtgaagtcccaggtcctgttgctgatgttgaatttaagcatagaagaaaaactggtggcctaggtgatgtttatgaggacaaatgtattggtggttctaccaaacttgtttgggatgaaaatgctattttgaagcttcttgatagatcaaaccttccatcatcaatggctgaaagcactgacggggatttggacaatgatatgcttggtactgtgaagtcaatagattggaacgatgagctcaatgacgaccctggtaccaatgaggatactgcacctattgacaatgatggtagcgagcaggcatctgaatcaaagcaaggtgctaccaatcgttcagaagaaaatgaatgggataaacttttgcgtgtcaggtactctgcaatactatgggagcaatatcaaatagaggaggaggcatgtcttggtcgaggcaaacgtttaaggaaggctgtttcttacagagagacattcgcaacacttcctaacgaagctttaagtgaggactctgatgagggagatgaaccaaagagagaatatacagcagctggactggccttgaaggaaaaatatggaaagcttcgagctagacaaaaggaaaggattgctcagcgacacattatcaagaactatgctgatgataatcttgaagagttcatgactccatacgactctattgctaatgaacctgctgaaaatcctttggtaatcgtagaagatctaaattcttcacagctatctggcgcgaaacgtttcagtgactcaactggagaaatgaggcaatcctccaagaaatcaaagagatattctgaaatccctcaagatctttatgccaaaattcctggtaacacagcttcattcaagcaccactcaaaggccactgatgtattcaatccagggaccccaaatcacttgctacctgtacttggcctttgtgctcctaatgctgatcaggtgaactcatacaaaaactcaatttgtgcaccaagcataaaggagcgtaaaagggccagtggtgacattgtcaaacaactgtcaactcctgctgaccattctaatgtgcatagaaacgaagctcaatcagcttctgataaggccatctttcctggtgcatctgaggaggctttgcgaagaataagtaacatgattccagatagttattttcccttcagtcatattcctcctatatcagggaagggggttgatcctgttgaaaatcctggaccctccattgcatcatttcaagggaatctgggtcttccaaacttcagtctggaagacaacgctccacttaagcatattaagcctatacctgatatatttcctagcctgtcactgggtgctcataaggattatattcgtagttctgtcccagagttgccagatggttcattgctgccaaacttcatggcagatattactggtacttcgaagcaaaagtcatttatgtctggtctacttcctgggctgggtcttagcccagggcaaccaatacattcggctatgcctgataatcacaagaaagtcttggacaatataatgatgcgtgctcagtatgcgtcaaacaaattcttgaagaagagatcaaaactagattattggtcagaggatgaacttgatgctctgtggataggagttcgtaggcatggaaggggaaattgggatgctatgcttagagatccaaagctgaagtttttgaacaaccgaactagtgaggagctggccttgaggtggattttggaggagcaaaaaattatagatgaacctatgtctacatccaccaggcgttctaactcagcagcatttcctggaatatctgatgcaatgatgtctcgggcactgaatgaaagtaatttctctaaaatgaggatggagcagcctaaattgcagtcccacttaactgatattcagttaggttcgagtgatatcctatccacatttcctcatgttgacgctgctagttacattaactcaggggagggtggcccatctcaaataccatggcaggattttaagcatagatcaagttatgctggagattttcctgccggtgcatttgacaagttggagaaacctgatgttggaccgatcccgccatttatgccaaatcctttcatgactgacagcattggttcacttcccataaacagaaaaaacaatagttccatcccgcatagtgaaatcaggtcaagttctcgtgagaacattctttctggtgtttcggatggacagatcaacttgcttcatgagatgcagcgtcgtcgtcgtgtgaggtcaggcaaagaacccattgagatgaatctcaaccacatagaccactcaaatctccagcttgataatactagtgaccttggaggtttaaaaccaaacaagttacctcattggcttcaggaggctgtacgtgctccttcatctaagccacctgaacgtgagctaccagcaacagtttcggcaattgctcagtcggtctgccttcttcttggagaacaagaaccatcaatacctccattcttgatcccgggaacacctctttctcgcccaaaagatccaaggattaattcaaagaagaaactccgcaaggctcagcaatctaactctcatgtagagcattcaaaaattggatctggtgagggtgattgtgtcactaccccagcacccccatccattgaagcttcacctgcacttcctgtcgattgcgatgatggtgagccttcactcaacttgaaatctgcatcgttgtcatcttcagctggcagcaaggggctagatgaattacctcccacatttaaagaagcaaaccaaaccgtggatggctcagaagctgttgcggccaagtcagatgctcctgaaattggttgtcaggtacctggttcctctccattacatgacaaaggtagtgaatcctcggggtcgccagtgaaggacactcctgacgctggaatcagattgccaggatcagataactcagttatggcattttctgcactcccacttgttgatgaagcacctgggacaagcagcagagcagctgacacgcctgtgccatgtgatggcaatgagtcgaaagaggatgttccactagacaacgctgaaagcaccaggaaactggagccgaacggatgaactggctcctcttgcgagcatggatgcatcgcatcgagtttctgctaatacagccgacgaagatgggtggatgaaatgatcattagactcgagctagttagctcaacattcctttcttttgcgttcagcataacactgggattttccctctcccaatgtttccagtgttgatctcgtgttgtgtaatgctttagtgcaggtctcgttgcagataggatgaaacgcaaagggctagtggtacttagcagtagttgggcactagtccgtcgggggagcaactcgtggaaacctgtatacaagaaatgtatattttgctaatatggtgctggttgggtgtgtagaaggtagaccgctattcgtttatttatgcgtatatggtttagtaatttgccatctgtctagcggtggctgtaagagtagacgtgatgatgatattgcctagccttgac

SEQ ID NO: 141603 - DNA, 225 bp, Zea Mays
tctacgaaattaataggcgtggttttcaatttaaacagcaggtaattgcatttacacgttgtcaatactgcatctatgtatctacattttttggtgtcagtatacattgctacttctgcaacatgtagaagaaatgaactgttgaccaaccctgaaattcaaaacatatccaaggctggtaatacatcaaaaattaccgaggctgcctcctgcagaatagttcaa

SEQ ID NO: 141604 - DNA, 768 bp, Zea Mays
tggccatcaccagttcaccgctccactccactaccgccgccaccccttcaacacaacctccgcccccggccgtaggggagggagggccggaggaagcgaccgagcaacccaccgccggagatgcagatcttcgtgaagacgctgacggggaagaccatcacgctggaggtcgagagtagcgacaccgtcgccaacgacaaggcgaagatacaggacaaggaaggcatcccgccggaccagcagcggctcattttcgccgggaagcagctagaggacgaccgcaccctggccgactacagcatccagaaggactccacgctgcacctggtgctccggctccgcggcggcggcaggggtggctaccccctcatgagcgtcccgtgggacctcatcaaccttgcccgcaagcataatgaggacaagatgatctgccgcaagtgctatgcgcgccttcctcccaggtccaaaaactgccgcaagaagaagtgcggccacagcaacgagctgaggtcaaagaagaagctcatctccaagtttagcatgtgaactttgcaaagcgacattctggagtgccatccgaaagcgtcatgcatcagttgaatcaccctacctaaacattagttgtcctagtttaagtttctatctgtgtgttgaaccttaaatactatctttcaaatactccatgccgtgttcagcacgtgcagtgccatgcctaagaaatgctagtggaagttcttttggctggatgttgaaatccttgtcactctt

SEQ ID NO: 141605 - DNA, 2933 bp, Zea Mays
atgaccacgtcgcagaccaactcggtcgcccccgtgggccgtgggaggctcaaccgcacacattaacccacaccggccgcctccgcaggcgatccctccaccccacaggttcccttctccctcctccttcctccaaaccctggcgcaaaccctaatgtccaccgccggggacccttcccgcctctccggcgagtcctcgccgtcgtcctccacgtcctccggctcctcctcccactcctctggcgccgccgatgccgccgccaccaacctcgccctgacagcaccaacctccgccctcgccgatgacacagacgccgatgcccccacctccccgcgcgtggggacgtactttgagaccgaggacgacgcgtacgagttctacaaggcctacgcggcccgtctcggcttcgtcgtccgcaagtccaacaagtccaagaactcacggcacaccgtcacccgccgcctcttcgtctgctccaagcagggcttccgccaggagcccaagaagccccaggacgaaaccgcaggctccggagtcgcgtcctcgccctcgctgtcgctggtgcctgcgcctcggtgcccggactcgcgcacaggctgcctagcgtcgctcaccatcaagctcattccttccgcaaacgccttccgtgttactgacttcgtcgccgatcacaaccacccgctcgcctcttcctcgcccgctgtgtcactagccttgctgtcgccgagctcttcacaccacagcattgtagcagtggccagcttgccggacccaagggatgggccgcgggccgatatgcattttgagacagaggaggatgcatatgtcttctataacagatatgccgaacatgtaggcttcagtgtacggcgctcctacaagaagcggaagcgagggatgatagtgtcgcgtatttttgtttgttctcgcgagggtgtcagtgaccgcaccaagcaagagggtggagccatagtcattgcaaatggtggtgcagggtcagcaggcacacctaggccaggtccgccgccaacacggaccggatgtcaggcaagaatggtgataaagatcaccccctgccgaacataccgtgtagcaaagttttttccagagcataaccatcctctggccaatccagacagcgtgcataagctgcggtctcataaaatgagagcccgtgcacatgagcttggagcaggggaaatgcatcgaaggaagcaagggaagggtgtgcagcttggggatgttggcgcagcattgcaatacttggaggagttgcaggtagaaaatccttcagtttattacgcggtaggagtggggcctgatgggaaatccgctgtgaatttcttctgggctgatgcaaaatcaataattgactacaggagttttggggatgttgtttgctttgatacaacatatgcattgaacatttatggacggccatttgcactctttgttggtgttgacaaccataagcagttacttgtgtttggcgcagcactgctctatgatgagagcattcagtcgctgaaatgggtatttgaggtgtttgctgatgccatgcatgctaggcacccacaaactattttgattgatgaacgtcctgagtgtgccattgcagcagcagaggtgtggcctggcaccaatcactgcacaggggtgtggcatatctaccataattcaaagaggcacttgaagcaggtgtttgaaagctcaaaaagtttcagcaatgctttgaaccattgtctctttgaatgtgaggatgagattgagttcttgtcagcatgggaaaagctagttgagaaacatgacattggtgagagtgagtggctcagcagactttacctggagaaagaaaaatgggctttaccttatcagagaaccatgttttctgctgatatactctcaacccttcgtaaggataacatgattaatgaactaagacgagacctcagtgagcaagaagatatcctgcagttcttcaggcgttatgagtctattctggaagagcatcgatcaaagaaattgcatgctgatgttgatggcagccaggttactctgcctatcccatcgttgcgaatgctaaaacaatcatcaaatgcttatacacctgaagctttcaagatgttccagggagagtttgaggcttacatgaattgcatgtccttcccctgcggtgtggttggcacgatctctgagtacaagattgtgcttgatgagaagccatcagagagttttgtcaaatttgatgcactagatggctcgaccacttgcagctgcaagaagtttgaagctgttgggattcaatgctgtcatgtactgaaagtgctggatctcaagaatatcaaagaacttccagaacaatatattttgaagagatggaggaaagatgctcgttctgttcaaattggggaggaacctacctatgggtctggcagtgtcatgcgatcaacctcagaagctcgattcagtaacatgtgtcggttggctagcttgattgcttcaagagctgccaaatccgaggatgtgatgtcatacatcgaaagtcagtcaaatgctattcagaaacatctggatgatattctacacacaagctatcctgatatgggaaatcacactgttgcttcaagtagtcaagcaatttcctttgtaggcacccaacatcctgaccattccacaccagtagtggttgcacagacaacaaatggcctgatggggctttgacggcgcacatttgatcatactggcaacattggtaagtagttagtgatgtagtgttaatttactcaggagagctgattttattgtccattgctaaacatgaaaaattcactggtgtagcaatgacttgaactgcaaagattttactatgtagtggaacctcaagggctgagggtgatatagtagtaatgataagaaacaattttttttttgc

SEQ ID NO: 141606 - DNA, 3495 bp, Zea Mays
atgaccacgtcgcagaccaactcggtcgcccccgtgggccgtgggaggctcaaccgcacacattaacccacaccggccgcctccgcaggcgatccctccaccccacaggttcccttctccctcctccttcctccaaaccctggcgcaaaccctaatgtccaccgccggggacccttcccgcctctccggcgagtcctcgccgtcgtcctccacgtcctccggctcctcctcccactcctctggcgccgccgatgccgccgccaccaacctcgccctgacagcaccaacctccgccctcgccgatgacacagacgccgatgcccccacctccccgcgcgtggggacgtactttgagaccgaggacgacgcgtacgagttctacaaggcctacgcggcccgtctcggcttcgtcgtccgcaagtccaacaagtccaagaactcacggcacaccgtcacccgccgcctcttcgtctgctccaagcagggcttccgccaggagcccaagaagccccaggacgaaaccgcaggctccggagtcgcgtcctcgccctcgctgtcgctggtgcctgcgcctcggtgcccggactcgcgcacaggctgcctagcgtcgctcaccatcaagctcattccttccgcaaacgccttccgtgttactgacttcgtcgccgatcacaaccacccgctcgcctcttcctcgcccgctgtgtcactagccttgctgtcgccgagctcttcacaccacagcattgtagcagtggccagcttgccggacccaagggatgggccgcgggccgatatgcattttgagacagaggaggatgcatatgtcttctataacagatatgccgaacatgtaggcttcagtgtacggcgctcctacaagaagcggaagcgagggatgatagtgtcgcgtatttttgtttgttctcgcgagggtgtcagtgaccgcaccaagcaagagggtggagccatagtcattgcaaatggtggtgcagggtcagcaggcacacctaggccaggtccgccgccaacacggaccggatgtcaggcaagaatggtgataaagatcaccccctgccgaacataccgtgtagcaaagttttttccagagcataaccatcctctggccaatccagacagcgtgcataagctgcggtctcataaaatgagagcccgtgcacatgagcttggagcaggggaaatgcatcgaaggaagcaagggaagggtgtgcagcttggggatgttggcgcagcattgcaatacttggaggagttgcaggtagaaaatccttcagtttattacgcggtaggagtggggcctgatgggaaatccgctgtgaatttcttctgggctgatgcaaaatcaataattgactacaggagttttggggatgttgtttgctttgatacaacatatgcattgaacatttatggacggccatttgcactctttgttggtgttgacaaccataagcagttacttgtgtttggcgcagcactgctctatgatgagagcattcagtcgctgaaatgggtatttgaggtgtttgctgatgccatgcatgctaggcacccacaaactattttgattgatgaacgtcctgagtgtgccattgcagcagcagaggtgtggcctggcaccaatcactgcacaggggtgtggcatatctaccataattcaaagaggcacttgaagcaggtgtttgaaagctcaaaaagtttcagcaatgctttgaaccattgtctctttgaatgtgaggatgagattgagttcttgtcagcatgggaaaagctagttgagaaacatgacattggtgagagtgagtggctcagcagactttacctggagaaagaaaaatgggctttaccttatcagagaaccatgttttctgctgatatactctcaacccttcgtaaggataacatgattaatgaactaagacgagacctcagtgagcaagaagatatcctgcagttcttcaggcgttatgagtctattctggaagagcatcgatcaaagaaattgcatgctgatgttgatggcagccaggttactctgcctatcccatcgttgcgaatgctaaaacaatcatcaaatgcttatacacctgaagctttcaagatgttccagggagagtttgaggcttacatgaattgcatgtccttcccctgcggtgtggttggcacgatctctgagtacaagattgtgcttgatgagaagccatcagagagttttgtcaaatttgatgcactagatggctcgaccacttgcagctgcaagaagtttgaagctgttgggattcaatgctgtcatgtactgaaagtgctggatctcaagaatatcaaagaacttccagaacaatatattttgaagagatggaggaaagatgctcgttctgttcaaattggggaggaacctacctatgggtctggcagtgtcatgcgatcaacctcagaagctcgattcagtaacatgtgtcggttggctagcttgattgcttcaagagctgccaaatccgaggatgtgatgtcatacatcgaaagtcagtcaaatgctattcagaaacatctggatgatattctacacacaagctatcctgatatgggaaatcacactgttgcttcaagtagtcaagcaatttcctttgtaggcacccaacatcctgaccattccacaccagtagtggttgcacagacaacaaatggcctgatggggctttgacggcgcacatttgatcatactggcaacattgggctgcatgattgtcaggaattcctcgtcctccagaacttgtattcgtcagtggacaactgaacgggtcagtcggtctttgtaaatttagttgggcattagttgaagtccgtgtacagtatttatcttggccaagttgatgtagtttagttgaagtcagtgtacagtatttatcttggccaagttgatgtagttgtggtgctaattatattcagttttgatgtaccagtgccttctgtgcatcaaatggcatttttgtacattttagatttctggtccactcctggcaaataaggctaaccctttctttcaatgggattggagtggtaagagagcttatcgattgtacggcgagttttgtgtgttctttcatgagaaattattatgtaggcgccaaaatcttaccattattaaaaaaaagcaaaagttgcgagagcataggaacaatcaatcatcacaactagctttagaatgctattatgtatccaattatagttacagcagctgcacttggaccccaaaatcatacgtggctcctgccgtccagttctgtggtattgtgcttgttggaactagtcgtccagttttgtgcttgttggaactagctatatttcgttgctgccatgtggagctccgctggtaaatagcatccttatggacagaaggccacttggtggggagattgcagcccatacagcatcatgagttcgtcttagaagctggcatgtggggttcacagtctg

SEQ ID NO: 141607 - DNA, 1046 bp, Zea Mays
aaaggctttcgtgtgccctccggtccggccgccttctccgcgcgcgctaggagtaataaacggaaggcaccaatctcggaggcaacggcccagacgcgcaagcggaagaaagggggagcgcaacattcgcggccgcggggagggagagagacaaggggggcggtcacacacacgcggaccgcgcgagctagcgagcgagcgagatccccctctcgcgctgctggatccgatctgacctgaccttacctcgtcgccgccagccgtgagagagagaagaggaagaggaggaggaggcggagatggcaccggtgtcggcgctcgccaagtacaagctcgtcttcctgggggaccagtccgtcggcaagaccagcatcatcacccgcttcatgtacgataagttcgacaacacttaccaggctacaattggtattgatttcctgtcaaagacaatgtaccttgaagatagaactgtgagactccaactctgggatacagctggtcaggaaaggttcaggagtttaattccaagctatatcagagactcttcagttgctgtcattgtattcgatgttgcaagcaggcagtctttcttaaatacatccaagtggatagatgaagttcgcactgagaggggcagtgatgttatcattgtgcttgttgggaacaaaactgaccttgttgacaagaggcaagtctcgatagaggaaggagaaggcaaggcaaaggaccttggtgtcatgtttattgaaaccagtgctaaagctgggtttaacattaaggcgctgttccgtaaaattgctgctgcccttcctggtatggagacactctcatcagcgaagcaggaagacatggttgatgtgaacttgaggtctggcaatgcaaactcgtcccagtctcaggctcaggctgggggatgcagttgttactcgccttcgctttcgtacagtactatcgtgtctcttcttctctacccaatttaccactaccgtgtgttctgtcgtgttaccgtgtttcgtacagtactatcgtgtttctgtcgggactcg

SEQ ID NO: 141608 - DNA, 2151 bp, Zea Mays
aaaggctttcgtgtgccctccggtccggccgccttctccgcgcgcgctaggagtaataaacggaaggcaccaatctcggaggcaacggcccagacgcgcaagcggaagaaagggggagcgcaacattcgcggccgcggggagggagagagacaaggggggcggtcacacacacgcggaccgcgcgagctagcgagcgagcgagatccccctctcgcgctgctggatccgatctgacctgaccttacctcgtcgccgccagccgtgagagagagaagaggaagaggaggaggaggcggagatggcaccggtgtcggcgctcgccaagtacaagctcgtcttcctgggggaccagtccgtcggcaagaccagcatcatcacccgcttcatgtacgataagttcgacaacacttaccaggctacaattggtattgatttcctgtcaaagacaatgtaccttgaagatagaactgtgagactccaactctgggatacagctggtcaggaaaggttcaggagtttaattccaagctatatcagagactcttcagttgctgtcattgtattcgatgttgcaagcaggcagtctttcttaaatacatccaagtggatagatgaagttcgcactgagaggggcagtgatgttatcattgtgcttgttgggaacaaaactgaccttgttgacaagaggcaagtctcgatagaggaaggagaaggcaaggcaaaggaccttggtgtcatgtttattgaaaccagtgctaaagctgggtttaacattaaggcgctgttccgtaaaattgctgctgcccttcctggtatggagacactctcatcagcgaagcaggaagacatggttgatgtgaacttgaggtctggcaatgcaaactcgtcccagtctcaggctcaggctgggggatgcagttgttagttgcagtctctgacacttgctgctcatgatctctgagaccctgagcatcagaacgcgttaccactgatgcttctctcgggaaggagagttgatcggcattgaacacgcacacgctatagtttttacccggtgaatggaccatttgcattggaacgatacgtttgagttctctagtgttatttccagtggcctaagctagcaacagtgtatagttgggttggcactgcaaacttctaccgttcgagttgggtattagagctagttattggttcatgttgaacttatattattttctatcttgctgcagttatgtttgctatgtgtaccaaacatgtattggaatttttgtaagctataatatggccagcacagcagtagcctcacatgataccccttgaatctgtatcgttcaaaccgtggtatcctaaatttatatcgttcaaaccttttgccttttgcttttgagggtgtgtttggtttgtccaaacctcgcgctcctcctccggactctccccagtccccactccgtctcaaccccccccccccctccctccctccctccctccctccttgtcgcgcccagccggcctccggtccttcttcccggttcctggttgccgcctcggaacgcatggcgttgcacttgcagagcccgagttccttcccctacaggaggaggacacccggttcgtcgtggtaaccttctacaaattcgtgcccctcgacgacccccacgccgagttcgccagacacctcatcttcctccagtactatcgtgtttctgtcgggactcgggaagctcaagagagcgaccaccgcactggaggccgaagggaagggacgagatcgttgaatcgcaggtggacggctaggattggtcgcctgaggcgagaaggatgagtgaagaggataaggctgctacttctgctgagcaccgaagagggcccctaagctcaattaaaggatcctctcttctctgtccaggaggtccgtagctgctcatctttggcatgagcatgatcttgagatcggtaagttggcacaactatcctttcttgctcttctaactctgtcaaataagcatacacaggtcctgatgctcctgttgtattcaatgttgtaagtaccatcattaccttggaaccgtttgaggtgttatatgtttgctgatgtggggaatcaggttctctggaaccttcgattggaagatgaggggtttcaatgg

SEQ ID NO: 141609 - DNA, 530 bp, Zea Mays
cttatcaacttaagaatcagcaaagcaaccccatggaggaggaagaaaaagaaaaaaaaggagaaggaagggtaggaggcccagcccaccagccagccatagtccttcctctggcaaccccaggttgcttctctcccctaccattcagttgctgccccgattgagccaccgccgcctcagattcatcgtcgtcgccgacgatttggatgctaccgccgacgattcggatgtcgccgccctggatttggcctccgccaccctggatttggcctccgccgctcccgattcggcgctgccaaccccgaaatggcgccgccccttccccttccccttcccctatgtcatcttgttgattcttacctaggcggcggggacgccttggatctttcgggcgtctgaacgcctaggtgacgcctttaaaacaggggggaatttgttcccacatattacttgcagtcaaagatcgacaacttagttgctactattatcaatatacttccttattctgaatgcctacatatcaacagtaa

SEQ ID NO: 141610 - DNA, 672 bp, Zea Mays
atgctcgtaggtagtggccgagaagatcggagccgcgaggttcatgttgaaggctcgtccatcctcagcgccgccacctcgcccccgtcctcggagccgtcgtctccaccctgtcctcggagcagcatacaccatcgcgtcctcgagcacccccgagatctcgctccttcctctgcaactgtagccgcccggcgtctccccctccgcgtgagctggcccctcaccgctcgggccccagacctcctcctccagagcttcaccgcccgtcctaccgccgttggccaaccgtttggtggccccagacctcctccagagctaccgacgactacgactgtccaggaaaggtgcattcgagcccccagatctacattgaccccctttcctcgtatatgggctataactgctatcgaatccttgaagccaaagctaaaggagcttctgaagtatagggatgcagcacaaatggttgatgttgaaaccacgcaagaagctgctatggcagagatccttgttcgatgtttaagatgcgcagagggaggagaagaatgtggaaaaaatgtcagggtggctaccaagtgcaatgatatggaatctgcaaagctatggccagtctgatcttcttgttttctattaaagcgttcctttcttgtagcatggattactgggattctg

SEQ ID NO: 141611 - DNA, 273 bp, Zea Mays
atttagcaacctatgttggttttatgattttcatggaccacaaaaatagttatgtattctgtttcatacattcatgtctatataacaatttatttgaagggcatttatctgtgcagggagagttttataattattctggttgtggaaataacttcaattgtaatcatcctgtaatccgtggatttatagaggattgcttgagatactgggtaacagaaatgcatgtttatggtgttcgttttgaccttgcattgcatctacaatgaccagagg

SEQ ID NO: 141612 - DNA, 4204 bp, Zea Mays
atggcgacgcagtcgcactcctcctccgctgccgcgatagacatgtatgagacggcctctcagccggacgcctccgttgccggcgacgcctacaccttccttgagttcaacactcagggtgacgaattcgactaccccgactttccggagctttctcaaccgccgccccgatcgacgccgctgacgtcttccatccccggcgctggcgcgtcgtcctcgtcgtggcctgccccgccgccgccgccctccgacgcggcctccgctgaacccgatctcacgtctctggacgtccccaccccgccggcctcctcctcctcgccgtcgccgcggtctgcctccaaggcgcgctcgttggctgcggcagatgggctcgcctccggggtagccgcactcagcttcgaggatcctgttggagccggcgccggagaggacgggtacgactacggcaagggagacttcgtggaacacgcctgccggtactgtgggatccacaatcctgcatgcgtggcgaggtgcaacgtgccctcctgccgcaagtggttctgtaactcgcgggggaacacctctggctcccacattgtcaaccacctggttagggcaaagcataaggaagtgtgccttcacaaggatagccctttgggagaaacaatccttgaatgctacaactgtggctgtcggaatgtatttcttcttgggtttatctcagcaaaattggagaatgttgtcgttcttttatgcagagagccgtgtttaagtgttaatgcactgaaggatatgaattgggatctcagccagtggtgccctcttattgatgacaggtgtttcttgtcatggcttgtaaaggtaccttcagagcaggagcagctaagagctcggcaaattagtgcacagcaaattaacaaagtggaagagctttggaagacaaatcctgatgcatctcttgaagatcttgaaaagcctggcgtagatgatgaacctcagccagttgttttgaagtatgaagatgcttaccagtaccaaaatgtttttgcgccactgataaaacttgaggctgattatgacaagatgacgaaagagtcacagagcaaggataatgtaactgtccggtgggatattgggttgaacaagaagcgtgtagcttactttgtctttccaaaggaagacaatgagttgaggcttgtgcctggagatgagctacgcttgagatatcctggtgatagctcacatcccacatggcaatctgtgggacatgtgattaagctcactgcacaagaggaggtggcacttgagcttcgtgcaagtcagggggtgcctactgagctaaacgttggattcagtgttgatttcgtttggaagagtaccagttttgataggatgcaaggagcaatgaaaacttttgctgtggacgagacaagtgtcagtggatacatataccaccaccttttgggacatgaagttgagcatcaaataatacgtaacaccctaccaagacgctttggtgcacctggacttccagaactaaatgcttcccaggttttagcagttaaaagtgtcctgcagaagccagttagtttgattcaaggtccacctggcactggaaaaactgtcacatctggtgcaattgtgtatcacatggccaaacaaggtcaaggacaggttcttgtatgtgccccaagtaatgttgctgttgatcagctggcagagaagataagctcaaccggtctcaaggttgttaggctgtgtgcaaaatctagagaagctgtttcgtctcctgttgagcatctcacacttcattatcaggttaggcaccttgatacctctgaaaagagtgaatttcacaagttacagcaactgaaagatgaacaaggtgaattgtccagcagtgatgagaagaagtacaaggcactaaagcgtgccactgaaagagagatactgcagagtgctgatgtcatttgttgcacctgtgtcggtgctggagatcctcgtctttcaaacttccgtttccgacaagttcttattgatgagtccacacaggcaacagagcctgaatgtcttattcctttggtgcttggtgtcaagcaggttgtccttgtcggagatcattgccaattgggtcctgtcatcatgtgcaaaaaagcagcccgtgcaggattagcacaatctctctttgaacgccttgttatccttggagtgaagccattcaggctacaggtccagtatagaatgcatccatgcctctcagagtttccatccaactgcttttatgaaggcacactgcaaaatggagtgactgttaatgagaggcattcgtctggaattgattttccttggcctgttccaaatcgcccaatgttcttctatgtgcagatgggacaagaagaaatcagtgctagtgggacatcgtatctcaatagaactgaagctgcaaatgttgaaaaaattgtaacaacttttttaagaagtggtgttgtaccaagccagatcggagttatcacaccttatgaagggcaaagggcatacattgtaaattacatgtcaaggaatggctctcttcgccaacaactttacaaggaaatcgaggtcgctagtgtagactcatttcagggtagagagaaagactacattattctatcttgtgttagaagcaatgagcaccagggaattgggtttctcaatgacccgcgcaggttaaacgttgcgttaactcgtgcacgttatggcatagttattcttggtaatccaaaagtactaagcaagcagccactttggaatagcttgttgacacattacaaggagcatgagtgcttggtagaaggacctctgaacaacttaaagcagagcatggtgcagtttcagaagcccaaaaagatatataatgatcggagattgttactgggcggtgctcaaggcatgcatggagctaacttcggggctggggcctcaagccaagcagcagataagagaagtggcagggggaaagggcaatcatttgtttcttatggccctccaaatggggtgcacaagcctggtgtgcacccagcaggttatgctgtacctcgtatgccttttcctccatttcctggggctccacattctcaaccatatgcaattccgactcggggtttgcatgggcccattggagctgttccaccggtgcatcaacctggaagtagaagttttggggcacctcgttcaaatactggtgggcctattggtggccaccttgctcatcaacagaattcccagcaagctatgggtggcattgggtcaaattttaactacgctggcatggagaattcgagtagtcagccttctggtgtagcccaaatgtcccaatcgggattaatgacacaggacttcattgtagatgattttaagagccaaggatcacatgtgccatacaacattgcagaattttctacccaggcttctcaaggtggttatggtgttgagtttactcaagcgccccaatctggatactctgggaattatatgaaccaaaacacacatcctggatactcccatattggtacaacaaatgacattgtatctcaggatcacatggcccatggatctcacggaatgtttacgcaagtggggtataatgatccgtcgcaagatgagtcatctcagattcattatggaatggctgctgctggtcccctacattcgcagagcatgatgaaccccttatactctcaatcctatgctcactacaacacccagccacattctcttcaacctcctccccagtgataattaaggcttgtgatatggtgaagccacattttggaagtttggtgggttgcatcttttggcccacatgttgtgcccttctctgctatttcagaatcgatggtgcatagacatcagatgcaagcaatgtgaacaagcatatgacacactttgtattggatgtttatcggggcaggcttgtacaagatggctatggctactgaccaacagccagcgccgaggagcacaaggattgcaatgtatcatgttcttgatcgttgtggttcactacccgtttagaccacaagaggggtcatattgtgcatcggaagaggttggcggcactatcctcatccctcacctgtatataaaggcaatctgggcctatagtggtacaatgtgaacatattccaggatttgctgccactcaagtcaagttgcagcaattgcatgcctccatggtgtagag

SEQ ID NO: 141613 - DNA, 4509 bp, Zea Mays
atggcgacgcagtcgcactcctcctccgctgccgcgatagacatgtatgagacggcctctcagccggacgcctccgttgccggcgacgcctacaccttccttgagttcaacactcagggtgacgaattcgactaccccgactttccggagctttctcaaccgccgccccgatcgacgccgctgacgtcttccatccccggcgctggcgcgtcgtcctcgtcgtggcctgccccgccgccgccgccctccgacgcggcctccgctgaacccgatctcacgtctctggacgtccccaccccgccggcctcctcctcctcgccgtcgccgcggtctgcctccaaggcgcgctcgttggctgcggcagatgggctcgcctccggggtagccgcactcagcttcgaggatcctgttggagccggcgccggagaggacgggtacgactacggcaagggagacttcgtggaacacgcctgccggtactgtgggatccacaatcctgcatgcgtggcgaggtgcaacgtgccctcctgccgcaagtggttctgtaactcgcgggggaacacctctggctcccacattgtcaaccacctggttagggcaaagcataaggaagtgtgccttcacaaggatagccctttgggagaaacaatccttgaatgctacaactgtggctgtcggaatgtatttcttcttgggtttatctcagcaaaattggagaatgttgtcgttcttttatgcagagagccgtgtttaagtgttaatgcactgaaggatatgaattgggatctcagccagtggtgccctcttattgatgacaggtgtttcttgtcatggcttgtaaaggtaccttcagagcaggagcagctaagagctcggcaaattagtgcacagcaaattaacaaagtggaagagctttggaagacaaatcctgatgcatctcttgaagatcttgaaaagcctggcgtagatgatgaacctcagccagttgttttgaagtatgaagatgcttaccagtaccaaaatgtttttgcgccactgataaaacttgaggctgattatgacaagatgacgaaagagtcacagagcaaggataatgtaactgtccggtgggatattgggttgaacaagaagcgtgtagcttactttgtctttccaaaggaagacaatgagttgaggcttgtgcctggagatgagctacgcttgagatatcctggtgatagctcacatcccacatggcaatctgtgggacatgtgattaagctcactgcacaagaggaggtggcacttgagcttcgtgcaagtcagggggtgcctactgagctaaacgttggattcagtgttgatttcgtttggaagagtaccagttttgataggatgcaaggagcaatgaaaacttttgctgtggacgagacaagtgtcagtggatacatataccaccaccttttgggacatgaagttgagcatcaaataatacgtaacaccctaccaagacgctttggtgcacctggacttccagaactaaatgcttcccaggttttagcagttaaaagtgtcctgcagaagccagttagtttgattcaaggtccacctggcactggaaaaactgtcacatctggtgcaattgtgtatcacatggccaaacaaggtcaaggacaggttcttgtatgtgccccaagtaatgttgctgttgatcagctggcagagaagataagctcaaccggtctcaaggttgttaggctgtgtgcaaaatctagagaagctgtttcgtctcctgttgagcatctcacacttcattatcaggttaggcaccttgatacctctgaaaagagtgaatttcacaagttacagcaactgaaagatgaacaaggtgaattgtccagcagtgatgagaagaagtacaaggcactaaagcgtgccactgaaagagagatactgcagagtgctgatgtcatttgttgcacctgtgtcggtgctggagatcctcgtctttcaaacttccgtttccgacaagttcttattgatgagtccacacaggcaacagagcctgaatgtcttattcctttggtgcttggtgtcaagcaggttgtccttgtcggagatcattgccaattgggtcctgtcatcatgtgcaaaaaagcagcccgtgcaggattagcacaatctctctttgaacgccttgttatccttggagtgaagccattcaggctacaggtccagtatagaatgcatccatgcctctcagagtttccatccaactgcttttatgaaggcacactgcaaaatggagtgactgttaatgagaggcattcgtctggaattgattttccttggcctgttccaaatcgcccaatgttcttctatgtgcagatgggacaagaagaaatcagtgctagtgggacatcgtatctcaatagaactgaagctgcaaatgttgaaaaaattgtaacaacttttttaagaagtggtgttgtaccaagccagatcggagttatcacaccttatgaagggcaaagggcatacattgtaaattacatgtcaaggaatggctctcttcgccaacaactttacaaggaaatcgaggtcgctagtgtagactcatttcagggtagagagaaagactacattattctatcttgtgttagaagcaatgagcaccagggaattgggtttctcaatgacccgcgcaggttaaacgttgcgttaactcgtgcacgttatggcatagttattcttggtaatccaaaagtactaagcaagcagccactttggaatagcttgttgacacattacaaggagcatgagtgcttggtagaaggacctctgaacaacttaaagcagagcatggtgcagtttcagaagcccaaaaagatatataatgatcggagattgttactgggcggtgctcaaggcatgcatggagctaacttcggggctggggcctcaagccaagcagcagataagagaagtggcagggggaaagcagggcaatcatttgtttcttatggccctccaaatggggtgcacaagcctggtgtgcacccagcaggttatgctgtacctcgtatgccttttcctccatttcctggggctccacattctcaaccatatgcaattccgactcggggtttgcatgggcccattggagctgttccaccggtgcatcaacctggaagtagaagttttggggcacctcgttcaaatactggtgggcctattggtggccaccttgctcatcaacagaattcccagcaagctatgggtggcattgggtcaaattttaactacgctggcatggagaattcgagtagtcagccttctggtgtagcccaaatgtcccaatcgggattaatgacacagatgcctgttcaaggactaagtcaaacattccgtgatggtttttccattggtgggatgtctcaggacttcattgtagatgattttaagagccaaggatcacatgtgccatacaacattgcagaattttctacccaggcttctcaaggtggttatggtgttgagtttactcaagcgccccaatctggatactctgggaattatatgaaccaaaacacacatcctggatactcccatattggtacaacaaatgacattgtatctcaggatcacatggcccatggatctcacggaatgtttacgcaagtggggtataatgatccgtcgcaagatgagtcatctcagattcattatggaatggctgctgctggtcccctacattcgcagagcatgatgaaccccttatactctcaatcctatgctcactacaacacccagccacattctcttcaacctcctccccagtgataattaaggcttgtgatatggtgaagccacattttggaagtttggtgggttgcatcttttggcccacatgttgtgcccttctctgctatttcagaatcgatggtgcatagacatcagatgcaagcaatgtgaacaagcatatgacacactttgtattggatgtttatcggggcaggcttgtacaagatggctatggctactgaccaacagccagcgccgaggagcacaaggattgcaatgtatcatgttcttgatcgttgtggttcactacccgtttagaccacaagaggggtcatattgtgcatcggaagaggttggcggcactatcctcatccctcacctgtatataaaggcaatctgggcctatagtggtacaatgtgaacatattccaggatttgctgccactcaagtcaagttgcagcaattgcatgcctccatggtgtagagtggctttgtataaaggtgctataggttgggtggccacaacccttttggatatcacacatgacaagatatttacctttacattttgtatgcatctgatatggttttgatatttatgccagagatgatttaggtgatggtaaaattagttagtgacgactggaaatttgggagtgttctgtgaaagtaaatttgaccctgaatcctgcgaggaatggctgatcatgaagtttattgtataa

SEQ ID NO: 141614 - DNA, 4698 bp, Zea Mays
atggcgacgcagtcgcactcctcctccgctgccgcgatagacatgtatgagacggcctctcagccggacgcctccgttgccggcgacgcctacaccttccttgagttcaacactcagggtgacgaattcgactaccccgactttccggagctttctcaaccgccgccccgatcgacgccgctgacgtcttccatccccggcgctggcgcgtcgtcctcgtcgtggcctgccccgccgccgccgccctccgacgcggcctccgctgaacccgatctcacgtctctggacgtccccaccccgccggcctcctcctcctcgccgtcgccgcggtctgcctccaaggcgcgctcgttggctgcggcagatgggctcgcctccggggtagccgcactcagcttcgaggatcctgttggagccggcgccggagaggacgggtacgactacggcaagggagacttcgtggaacacgcctgccggtactgtgggatccacaatcctgcatgcgtggcgaggtgcaacgtgccctcctgccgcaagtggttctgtaactcgcgggggaacacctctggctcccacattgtcaaccacctggttagggcaaagcataaggaagtgtgccttcacaaggatagccctttgggagaaacaatccttgaatgctacaactgtggctgtcggaatgtatttcttcttgggtttatctcagcaaaattggagaatgttgtcgttcttttatgcagagagccgtgtttaagtgttaatgcactgaaggatatgaattgggatctcagccagtggtgccctcttattgatgacaggtgtttcttgtcatggcttgtaaaggtaccttcagagcaggagcagctaagagctcggcaaattagtgcacagcaaattaacaaagtggaagagctttggaagacaaatcctgatgcatctcttgaagatcttgaaaagcctggcgtagatgatgaacctcagccagttgttttgaagtatgaagatgcttaccagtaccaaaatgtttttgcgccactgataaaacttgaggctgattatgacaagatgacgaaagagtcacagagcaaggataatgtaactgtccggtgggatattgggttgaacaagaagcgtgtagcttactttgtctttccaaaggaagacaatgagttgaggcttgtgcctggagatgagctacgcttgagatatcctggtgatagctcacatcccacatggcaatctgtgggacatgtgattaagctcactgcacaagaggaggtggcacttgagcttcgtgcaagtcagggggtgcctactgagctaaacgttggattcagtgttgatttcgtttggaagagtaccagttttgataggatgcaaggagcaatgaaaacttttgctgtggacgagacaagtgtcagtggatacatataccaccaccttttgggacatgaagttgagcatcaaataatacgtaacaccctaccaagacgctttggtgcacctggacttccagaactaaatgcttcccaggttttagcagttaaaagtgtcctgcagaagccagttagtttgattcaaggtccacctggcactggaaaaactgtcacatctggtgcaattgtgtatcacatggccaaacaaggtcaaggacaggttcttgtatgtgccccaagtaatgttgctgttgatcagctggcagagaagataagctcaaccggtctcaaggttgttaggctgtgtgcaaaatctagagaagctgtttcgtctcctgttgagcatctcacacttcattatcaggttaggcaccttgatacctctgaaaagagtgaatttcacaagttacagcaactgaaagatgaacaaggtgaattgtccagcagtgatgagaagaagtacaaggcactaaagcgtgccactgaaagagagatactgcagagtgctgatgtcatttgttgcacctgtgtcggtgctggagatcctcgtctttcaaacttccgtttccgacaagttcttattgatgagtccacacaggcaacagagcctgaatgtcttattcctttggtgcttggtgtcaagcaggttgtccttgtcggagatcattgccaattgggtcctgtcatcatgtgcaaaaaagcagcccgtgcaggattagcacaatctctctttgaacgccttgttatccttggagtgaagccattcaggctacaggtccagtatagaatgcatccatgcctctcagagtttccatccaactgcttttatgaaggcacactgcaaaatggagtgactgttaatgagaggcattcgtctggaattgattttccttggcctgttccaaatcgcccaatgttcttctatgtgcagatgggacaagaagaaatcagtgctagtgggacatcgtatctcaatagaactgaagctgcaaatgttgaaaaaattgtaacaacttttttaagaagtggtgttgtaccaagccagatcggagttatcacaccttatgaagggcaaagggcatacattgtaaattacatgtcaaggaatggctctcttcgccaacaactttacaaggaaatcgaggtcgctagtgtagactcatttcagggtagagagaaagactacattattctatcttgtgttagaagcaatgagcaccagggaattgggtttctcaatgacccgcgcaggttaaacgttgcgttaactcgtgcacgttatggcatagttattcttggtaatccaaaagtactaagcaagcagccactttggaatagcttgttgacacattacaaggagcatgagtgcttggtagaaggacctctgaacaacttaaagcagagcatggtgcagtttcagaagcccaaaaagatatataatgatcggagattgttactgggcggtgctcaaggcatgcatggagctaacttcggggctggggcctcaagccaagcagcagataagagaagtggcagggggaaagggcaatcatttgtttcttatggccctccaaatggggtgcacaagcctggtgtgcacccagcaggttatgctgtacctcgtatgccttttcctccatttcctggggctccacattctcaaccatatgcaattccgactcggggtttgcatgggcccattggagctgttccaccggtgcatcaacctggaagtagaagttttggggcacctcgttcaaatactggtgggcctattggtggccaccttgctcatcaacagaattcccagcaagctatgggtggcattgggtcaaattttaactacgctggcatggagaattcgagtagtcagccttctggtgtagcccaaatgtcccaatcgggattaatgacacagatgcctgttcaaggactaagtcaaacattccgtgatggtttttccattggtgggatgtctcaggacttcattgtagatgattttaagagccaaggatcacatgtgccatacaacattgcagaattttctacccaggtttctgtacagttcactacatgttattttttacttctttctggattcatatacgcttgtggttttgtgaaatttaacaaaccaaattatctggttactgtgaagtttagttctttctttggctcatagaaaaaagtttccatcaacaggcttctcaaggtggttatggtgttgagtttactcaagcgccccaatctggatactctgggaattatatgaaccaaaacacacatcctggatactcccatattggtacaacaaatgacattgtatctcaggatcacatggcccatggatctcacggaatgtttacgcaagtggggtataatgatccgtcgcaagatgagtcatctcagattcattatggaatggctgctgctggtcccctacattcgcagagcatgatgaaccccttatactctcaatcctatgctcactacaacacccagccacattctcttcaacctcctccccagtgataattaaggcttgtgatatggtgaagccacattttggaagtttggtgggttgcatcttttggcccacatgttgtgcccttctctgctatttcagaatcgatggtgcatagacatcagatgcaagcaatgtgaacaagcatatgacacactttgtattggatgtttatcggggcaggcttgtacaagatggctatggctactgaccaacagccagcgccgaggagcacaaggattgcaatgtatcatgttcttgatcgttgtggttcactacccgtttagaccacaagaggggtcatattgtgcatcggaagaggttggcggcactatcctcatccctcacctgtatataaaggcaatctgggcctatagtggtacaatgtgaacatattccaggatttgctgccactcaagtcaagttgcagcaattgcatgcctccatggtgtagagtggctttgtataaaggtgctataggttgggtggccacaacccttttggatatcacacatgacaagatatttacctttacattttgtatgcatctgatatggttttgatatttatgccagagatgatttaggtgatggtaaaattagttagtgacgactggaaatttgggagtgttctgtgaaagtaaatttgaccctgaatcctgcgaggaatggctgatcatgaagtttattgtataatttggatagtccgttcagagatattcatgcataggtgcatcac

SEQ ID NO: 141615 - DNA, 4619 bp, Zea Mays
atggcgacgcagtcgcactcctcctccgctgccgcgatagacatgtatgagacggcctctcagccggacgcctccgttgccggcgacgcctacaccttccttgagttcaacactcagggtgacgaattcgactaccccgactttccggagctttctcaaccgccgccccgatcgacgccgctgacgtcttccatccccggcgctggcgcgtcgtcctcgtcgtggcctgccccgccgccgccgccctccgacgcggcctccgctgaacccgatctcacgtctctggacgtccccaccccgccggcctcctcctcctcgccgtcgccgcggtctgcctccaaggcgcgctcgttggctgcggcagatgggctcgcctccggggtagccgcactcagcttcgaggatcctgttggagccggcgccggagaggacgggtacgactacggcaagggagacttcgtggaacacgcctgccggtactgtgggatccacaatcctgcatgcgtggcgaggtgcaacgtgccctcctgccgcaagtggttctgtaactcgcgggggaacacctctggctcccacattgtcaaccacctggttagggcaaagcataaggaagtgtgccttcacaaggatagccctttgggagaaacaatccttgaatgctacaactgtggctgtcggaatgtatttcttcttgggtttatctcagcaaaattggagaatgttgtcgttcttttatgcagagagccgtgtttaagtgttaatgcactgaaggatatgaattgggatctcagccagtggtgccctcttattgatgacaggtgtttcttgtcatggcttgtaaaggtaccttcagagcaggagcagctaagagctcggcaaattagtgcacagcaaattaacaaagtggaagagctttggaagacaaatcctgatgcatctcttgaagatcttgaaaagcctggcgtagatgatgaacctcagccagttgttttgaagtatgaagatgcttaccagtaccaaaatgtttttgcgccactgataaaacttgaggctgattatgacaagatgacgaaagagtcacagagcaaggataatgtaactgtccggtgggatattgggttgaacaagaagcgtgtagcttactttgtctttccaaaggaagacaatgagttgaggcttgtgcctggagatgagctacgcttgagatatcctggtgatagctcacatcccacatggcaatctgtgggacatgtgattaagctcactgcacaagaggaggtggcacttgagcttcgtgcaagtcagggggtgcctactgagctaaacgttggattcagtgttgatttcgtttggaagagtaccagttttgataggatgcaaggagcaatgaaaacttttgctgtggacgagacaagtgtcagtggatacatataccaccaccttttgggacatgaagttgagcatcaaataatacgtaacaccctaccaagacgctttggtgcacctggacttccagaactaaatgcttcccaggttttagcagttaaaagtgtcctgcagaagccagttagtttgattcaaggtccacctggcactggaaaaactgtcacatctggtgcaattgtgtatcacatggccaaacaaggtcaaggacaggttcttgtatgtgccccaagtaatgttgctgttgatcagctggcagagaagataagctcaaccggtctcaaggttgttaggctgtgtgcaaaatctagagaagctgtttcgtctcctgttgagcatctcacacttcattatcaggttaggcaccttgatacctctgaaaagagtgaatttcacaagttacagcaactgaaagatgaacaaggtgaattgtccagcagtgatgagaagaagtacaaggcactaaagcgtgccactgaaagagagatactgcagagtgctgatgtcatttgttgcacctgtgtcggtgctggagatcctcgtctttcaaacttccgtttccgacaagttcttattgatgagtccacacaggcaacagagcctgaatgtcttattcctttggtgcttggtgtcaagcaggttgtccttgtcggagatcattgccaattgggtcctgtcatcatgtgcaaaaaagcagcccgtgcaggattagcacaatctctctttgaacgccttgttatccttggagtgaagccattcaggctacaggtccagtatagaatgcatccatgcctctcagagtttccatccaactgcttttatgaaggcacactgcaaaatggagtgactgttaatgagaggcattcgtctggaattgattttccttggcctgttccaaatcgcccaatgttcttctatgtgcagatgggacaagaagaaatcagtgctagtgggacatcgtatctcaatagaactgaagctgcaaatgttgaaaaaattgtaacaacttttttaagaagtggtgttgtaccaagccagatcggagttatcacaccttatgaagggcaaagggcatacattgtaaattacatgtcaaggaatggctctcttcgccaacaactttacaaggaaatcgaggtcgctagtgtagactcatttcagggtagagagaaagactacattattctatcttgtgttagaagcaatgagcaccagggaattgggtttctcaatgacccgcgcaggttaaacgttgcgttaactcgtgcacgttatggcatagttattcttggtaatccaaaagtactaagcaagcagccactttggaatagcttgttgacacattacaaggagcatgagtgcttggtagaaggacctctgaacaacttaaagcagagcatggtgcagtttcagaagcccaaaaagatatataatgatcggagattgttactgggcggtgctcaaggcatgcatggagctaacttcggggctggggcctcaagccaagcagcagataagagaagtggcagggggaaagggcaatcatttgtttcttatggccctccaaatggggtgcacaagcctggtgtgcacccagcaggttatgctgtacctcgtatgccttttcctccatttcctggggctccacattctcaaccatatgcaattccgactcggggtttgcatgggcccattggagctgttccaccggtgcatcaacctggaagtagaagttttggggcacctcgttcaaatactggtgggcctattggtggccaccttgctcatcaacagaattcccagcaagctatgggtggcattgggtcaaattttaactacgctggcatggagaattcgagtagtcagccttctggtgtagcccaaatgtcccaatcgggattaatgacacagatgcctgttcaaggactaagtcaaacattccgtgatggtttttccattggtgggatgtctcaggacttcattgtagatgattttaagagccaaggatcacatgtgccatacaacattgcagaattttctacccaggcttctcaaggtggttatggtgttgagtttactcaagcgccccaatctggatactctgggaattatatgaaccaaaacacacatcctggatactcccatattggtacaacaaatgacattgtatctcaggatcacatggcccatggatctcacggaatgtttacgcaagtggggtataatgatccgtcgcaagatgagtcatctcagattcattatggaatggctgctgctggtcccctacattcgcagagcatgatgaaccccttatactctcaatcctatgctcactacaacacccagccacattctcttcaacctcctccccagtgataattaaggcttgtgatatggtgaagccacattttggaagtttggtgggttgcatcttttggcccacatgttgtgcccttctctgctatttcagaatcgatggtgcatagacatcagatgcaagcaatgtgaacaagcatatgacacactttgtattggatgtttatcggggcaggcttgtacaagatggctatggctactgaccaacagccagcgccgaggagcacaaggattgcaatgtatcatgttcttgatcgttgtggttcactacccgtttagaccacaagaggggtcatattgtgcatcggaagaggttggcggcactatcctcatccctcacctgtatataaaggcaatctgggcctatagtggtacaatgtgaacatattccaggatttgctgccactcaagtcaagttgcagcaattgcatgcctccatggtgtagagtggctttgtataaaggtgctataggttgggtggccacaacccttttggatatcacacatgacaagatatttacctttacattttgtatgcatctgatatggttttgatatttatgccagagatgatttaggtgatggtaaaattagttagtgacgactggaaatttgggagtgttctgtgaaagtaaatttgaccctgaatcctgcgaggaatggctgatcatgaagtttattgtataatttggatagtccgttcagagatattcatgcataggtgcatcacatatttgttctttatctttctgcaagtggcacttttctgagtggtcaattctgcaatgaaatgtgcgtgt

SEQ ID NO: 141616 - DNA, 437 bp, Zea Mays
aagacttcgacttctcttggcttgctcatcggctgcgtctctttgcgatggcgcgtccacgcatgcagatacactacgtcccgccgtacgctacagtgctacacactgctgtccttgcctcctccagctgagattgctagtgatttggcccacgcgcggcggcgcggaagctgttccatgttaagctgcagtcgatgctgctcctcccccttctccacctctcagagcggcgaacgcctgcaaaagaaagcaatcaaactatgatttccccatgcacgagagagattcgatgctaagccgcagtggaatgtaacgtcgaggaatgtcacttttccttgcaacctttttagcgtatatctatatctatgtaactgatacgggctgttgttgcaacaacagaccatggtgattatttaaagtaagcctaggatttagac

SEQ ID NO: 141617 - DNA, 1102 bp, Zea Mays
cccactaaggctgccggctactccagccactctcgtcttcaaatcacccgaaccccagacggccagccgagctccccgctacgtactttgcacggaggcatccgtcaaaatacacgaagggcaacgaggcgaggcctagtatagaggaaaacgagtgagaggggggaaatgctgcgccacgccgcccgccgtctcgtctcccgcaccgccgcggcgcccaccgcccgccgggcgctcgtcacggcagaggtgcctgcggaggccgccgaggactccacgtttgtggaggcgtggaagaaggtcgcccccaacatcgagcccccaacgacgcccctcttcctcatgcagccgcgcccgcccacgccggctaccatccccactaagctcaccgtcaacttcgtcctcccctacaagtccgagatcgccaacaaggaggtggacatggtaattgtaccagctacaactggtcagatgggcgttttgccaggccatgttgccacgattgcagagctcaagcctggtgttctctcagtacatgaggggaacgatgtgaccaagtactttgtgagcagtggatttgctttcgtccatgcaaactccattgctgatattgtggctgttgaggctgtccctgtggatcagatcgacccagcttttgttcagaagggtctcgctgaattcactgccaagcttggttcggcctctactgacctggagaaggctgaggctcagatcggtgtcgatgttcacagtgcgctcaatgctgcattgaccggttaattggtgtcatcttaaattgtctgtcttttagattgagtttaactttgcaaatcctaaataaattatagtccatctaaaacatggacatatgtttcttgttacctgaatcctgcatggatttatttttgtactcgtgaatattttaactctggagctcaaaacccggagttgctttctttttccgttgagttgcggccttggatcagatgaaatcgatgttcctccatagctccagtaaattgttaaatattgttaagtctattttaagagaaatataaaccacatttgattactgcatgagatgttttggatcttgtgtcag

SEQ ID NO: 141618 - DNA, 192 bp, Zea Mays
caactctctcccagtcggtatattccttgcccctctaaaagaagaagtccatgttgattataatgaacctcctgatataacgctattgtacctctcccggggtttcgagaaggggttgcttatctgttgaacccacaattagatcaggatgggaatcctcaatggcattgtacctaagggaatagaattgag

SEQ ID NO: 141619 - DNA, 2424 bp, Zea Mays
cagtcccaggcccaggcccaggcccgagcggtagcctgtaggtcgccggcgatgccgttcctgtcgacgccgtcgttcgacctatccgccggcgcagagccaaccctgggcccgcgctcagcggccccgccgcctccacccacggcggccgcgcatcatcagccgccggtgtccgaggcggcggcccggcggcttcgggaggcggaggagcggctgcgggaagccatcgaggagctacaccggcaccagggcggtggcgttaagggagatggggacgagcagcgggagggagagcgggggtgcggtcacgacggggagtcatgcgcggcgcacgccgcggggaacctgtgccagagcttcctgctttcgtacggtgtccgcgtcggcatcggcatcctcctccgcgccttcaagctcgtgcgccgcaggtcctatggctcgctcctcgaccttaagcaactggtttcggagaaagatcttatagtaagagaggaagcttgccgggtagggttgctttttggcggattcactggatcatatcatgcacttcgatgtttccttaggagatttaggaaaaaggagacaccattcaatgcaatattagcaggttcggtggcaggattggccatactagcactggatgattcaagtaggaggcgtactctatctttatatcttctagcaaggctcgctcagtgtgcatataattctgcaaaatctaagaacaaatttcatttttggggaagccattggagacatggagatgcattgcttttttcattagcatgtgcccaggttatgtatgcttttgttatgaggcctgaaagcttacctaagtcgtaccaagaatttatccttaagacaggaccagtagcagaacctgtctacaaggttgtcaaagaatgctgcagaggtggtcctgtggatctaactgccctctcagcccatttatcaaacaagaggaatccggatttgataaatttaacaacaaatccatccattatcccatgttctgtgatccaccctgacagagcatcatgcttggctcaaaatgttaatgttgtttcatcaacattcaagaagacattccctctatatttctcattgacatttgtgccctttgttgtcctacgtcttcaaaagttcttggaatcgccaacgacaacttgttggcgtgctcttgtgggtgcagttcgctccaccacctttttgtctgccttcgtcactgtattccaggctgctatatgtttgcaccgaaaagttgcgaacaaagaccacaaacttgtgtattggtttgctggtttgatgtcgggtctttcaattcttttggaaaagaaagctagaagggctgagctagccctctatgtgcttccacgtgctggagattccctatggtatatattgatcaaccgccacctgctcccaaatattaaaaatgctgaggtggctcttttctgcatgtgcatgggaggaatcatgtattttctggagtacgagccagacacaatggctccattcctcagagggctcatcaggcgcttcctggcaagcaagatcagcaatccaagccccccgcctcccaatcggaatgcctcctactcgtaccttcagacgctgaatgctctggatcaatcaagaacccaaccaggggtggataacggactgacgacatcggagaaatacaacctcgaatcaattcctggactttagagacctcatctgtggtattagtaaattgggtcttgtagcttgggaagatcacgaaaactcgaacacccattacatgtgccatcctgtgatgggtttatactctgttatacgtgtttgtcttgagtgcaaaataaatggataagcagagatggtttgtgcgggagtatggactgatacgaagcaatttgctcgttcttgtacatgcccaagtccacaaggtcaggatttgaatcggtcaccaggggcacgaaggtatttttttcgttgcatcacaacgtcgaagacatgatcctgaattcctgacaaaccgaaaggtcgccccgagcagcctcgcaagggtgtgccgaagctcttgcaatttcgtttttatccctttttaattttgttgtgattttacctctgttctacaaacgaagctcagtcgtattcttgtgttgttacagttgacaatgttaaatctgatatgaaaaaacaaaaatttgcacacaatttattactattttactcgtcattgtattacgtatttgcgattttactcccgtaggatgcaccgtacagaataggagggtcgtttggatctttcgcatattatattttcatatttttatttttctaatcactaattatgatttttcacttttaaaatggatgcataaaatcataaagtagcttcgcttttaaaatggatgcataaaatcataaagttaaaaacag

SEQ ID NO: 141620 - DNA, 597 bp, Zea Mays
agacttaaataaacatagtttaatattatttgtaacccatcacgttataattatgtggaccaaacattattaaaaatgacaaaccattactagatggagtgagtactgtttgtgacgaagtgtactcatcaataaataaaacaaaataagagcaagtctagcttcccggtcaacggctcctcgtataaggcacccctacttgtatcacaaattcacaaccagaagcagctctcaggattcgtagcgcctgcatgcagctccaggatggcggaggccatcgttggtccgctggtggggaagctccaggagatggcggtgagcgaggcgaaggctctagtggcagtgaacgacgacatccgcggcctccgggaccggctcatgtggatgcaggccttcttgcggcatgccgacccgcggcgacgcgacacctccgacgagctcatcagggtgtggctcaagcagacccgcgatgttgccttcgacgccgaggacgccattgacgactactccctcaaggtcgacctctcaagccaagaacctgaagggagactgggagtacacatcgccactgacaaatcaaacatcctttctttgtaa

SEQ ID NO: 141621 - DNA, 121 bp, Zea Mays
ctaatgtactattgttaaaaatatttgtactctgttctacaaattcagttaagtttaaaaatattttgattaaagattgatttatttagagacagaagaattacttaatatctgaaaatat

SEQ ID NO: 141622 - DNA, 250 bp, Zea Mays
atatccaaattggagccagtccattgtttgttttttctctggattcactacacaagtaagcattcgacacaatctatcaagaaagatcgcagagatcaacttaaggcttgaagacatcattaacaataaggagaaatacaagattgaagctgcacccaatgattttccattggtgacatggaaaccttctacggacatctctactgtggcaaaaagtttgtaagttcccacaacactactctctaaagtg

SEQ ID NO: 141623 - DNA, 97 bp, Zea Mays
aaaattattatgaaagcacaaaatttgtgcagcatcttatttaaaagcgtagcaagaacatatagtacttgtctcaaacataacagagaaacatcaa

SEQ ID NO: 141624 - DNA, 1483 bp, Zea Mays
atgccattattaccaaacttgcttcagtgttgggtgacgccactatcaggcttgcttcgttgttgtggggaacatggcagccctcaagagagcaccaactcatacataaaagaaatgttgcaagtatccaagtttcttcgtgtcatcaatctacaaggcatcgagatcggtgagagcttaccaacaactattgggaatgtagcacaccttcagtacctcggtgtcactgcttgttccttgaaatatatcccatcgacaattgaaaaccttaaaaatcttcagacgttggatgttcgagacacgtttgtttataaacttccagaagcattttggagtataacgacactgcggcatgtatttggtgagggtcttttcttgcctaagcaggtgggtgacttgaaacacctgcagacacttgaaagcatagatcctgataaggataatggttgggacagcagcacttttgagaaaatggctcaccttcagtcccttcatgtttgggattctaaggagaatggagttaatgctgaggctctatctgctgttattgataaagctaatttcctcgaacacctagataccctcactcttgatgttcatgacatcccattgagtgtgttcaccagttcttccctgaggcgtcttcgtaccctaaacttagacggcaagttggacatgttggtgctgcaatctaaagaaaaggagtcaaaatttcatttccccaaccttagcttcctatcattggcaaacacagaggtgtcgcagaactttatcaacaagcttgggaagctgccttcgctcaccactctaatattggatgtaaaatcctacaaggatgatcaagatcaacttgccttccaagctggtggatttacaagccttacaaagctgatactttctgatctggaaattgtgaaactcgagataaagaaatatgcacttccagaactcacagatttggaggttgagttgtactacgacgaaatcgaaatcgaggtatatggcgagcatgagtttgtgaagaaaattgaacaagtggatgaatacctctatggccgtatcactcaagttccggttgctccaaagaaaattggtcagcttcctagcatgaagcaacgcgtggctagctgaagatcacaggtaaactaagacaccaatatagtaccacttgctgttatttcgatttgcctgttcagtatgtacaactctgtcatgagtcgtgagtttattagtgtggatgtgatggcagattggcatgtctacataataattgctggccgcacctgtctacagtatgcatgtattcctaaattgtaaaataagtgaaaaaacgcatatgtgcgcgtgtatcatggtgtgtactcctaaattgtaaaataagtgaaagaaaaaacaagtggatcattgaatgttgaaggatgtttttgtaaccagatgttctttagactctgttttttgtttagagaaatataatcccttatgt

SEQ ID NO: 141625 - DNA, 839 bp, Zea Mays
gtcctccgatccgttgacggtcaggcccttctgctgggtcgtcctgctgcatgcgtcgccgtggtcggggacacagaggaggagatcgagggagatggagtgcctgctggggctgctcaaggttagggtggtgcgaggagtgcacctggccatctgcgaccccctcacccacagcagcgacccctacgtcgtcctccgccacggacagcagaaagtcaagtcaagtataaaataccgcacgatcaatccggaatggaacgaggaactcaccctgtccatcacaaacatgatgaacccggtcaagattgaactcttcgaccatgacacgttcaccaaggacgacagcatgggcaacgccgagttctccatcctcaacttcgtggagatcgccaagcaggacctgagcgacgtccccgacggcacggtgatgaagacgatccacacggagaagggcagctgcctcgccaccgacagccacatcacgtgcaaggacggcaaggtctcccaggacatcctgctcaggctcagggacaccgagaccggcgacctcgtcctgcgcctgacctgggtcaacatccccggcgtcgcgcggtgaatcatcccctcgatcggcggggacggggccagggcatgaggcggcggcgacccgaccgacgcctgcccagctgattatacatccgtttacctggtattggcataaggagacccttggatgcgtgtaatgtttgtttgcagttctgataaggtgtgcaagaaggctcatgctactgggagcaatgcttctgcgggttttttatccacaaattacatttgttctcgttgatcacatttccataaaa

SEQ ID NO: 141626 - DNA, 432 bp, Zea Mays
atggccaagctccacttccaaaccagcagttaccttctagtcatcaacatcccggggcccttagtagccagccaaatattcgtggagttggtgggcctttatatcccttccaagcatctgcctagtggatcattctctgctgagactaataacatagagtttatgaatttacctgctcaaatgcatcaaggtagagcaggtacaaagtaccagcaaaagtcagttagtggtcatgtagttccaaatcatgctggtccatcaccaattcgacctcaaatgggttctgatatgggtaatagtgatggacactttgaaagagatgaccctcacacttgtggaaggtttgatggagcaaaggctctccagcagcaaccaaagcttactgctctcctaacttcacaaaatcccatggtaataatcttggtacagtag

SEQ ID NO: 141627 - DNA, 1186 bp, Zea Mays
gcgaactggcgatggaagcacagtacaacgtgtacggtatcataaacatatgatacctccgagcgagtagacatggagatcgatcattacacaagacataaaacctgaagtcccacggcgataccgataagcactagctgcaaactgctctctctcgttttctctctctctctctgtgtgtgtgactgactgactgtcgactccgggaagctcaaacacggaagtccactccttccatgacgaagcggacagccggacaccgtcgcgaacgtctggaatcttggactcattcaattctcaaatgagcggctgcggcgccttgaaatgagcagtagctgtatttgcacccttgcgaatcgcatgacgcagcctctccagcgccgcgtacgacgacccgcgctcctcaacggccttgcggcacgcggccttcatctcgtgggccttctcccgcgccttgcgcccctcctcgccgccgcccatgagggccctcaccgcccgctccagctccgcggcctcgacgaagttgtcgcgcctcctgtccacctccatggccacggccacgcccacgacggccacgagctcgaacgcgttcaggtgctgctccgcgtacagcggccacggcgccagcggcacgccgtgccacaggctctccatcgtcgagttccacccgcagtgggtcacgaagccgcccacggccgggtgggcgagcaccgccttctgcggcgcccaccgcggccacacgaggcccctgcccctggtccgctccaggaaccccgcggggaggagctcgtccaggtcggcgtccgacgggtgccgcgatccggccgcgggaggcccgcgcagcgcccacaggaaccggtgcccgctccgctccagccccgccgcggcctcgcgcgccttcgccgcgtcgaaccagcccaggctcccgaagcagaggaacaccaccgacgcacgcggctgcgcgtcgagccaccggacgcacgcctcgtcgccggacgcacctccccccgcaccgaggttgagaaccggaccgatcgggtacagcggcggcgccggccgtcccggcacgcaccggcctccggcgatggcggcgagcagccccggttcgagctcggccaccgtgttgacgacgatgccgtcggcgtccatgaaacgccggccgtggtaaacgaaccacgtgaagttg

SEQ ID NO: 141628 - DNA, 1612 bp, Zea Mays
aaggaaaaaagcactgaagtaacggttacggccaaacaccgactgttccaatggcgacgcccgcgctggtgctcctaccggagtgggggtccggccacctcatgtccatgctcgagtcctgtaagcgcgtcctcctcagcagcagcggcggcaaggccttctccatcaccctgctcgtgatgcgcccgccgacggccgaggccacctccgaggtggaggcgcacgtgcggcgcgaggccgcgtgcgggctggacatccgcttccaccgcctccccgccgtggaggcccccaccgacgccgtcggggtcgaggagttcatcgcgcgctacatcggcctccacgcgccgcacgtccgtgacgccgtggccgccatggcgtgccccgtggccgcgctcgtgctcgacctcttcgccgcgccgctggtggacgtggcgcggggcctcggggtgccgtcctacgtcttcatgtcgtccacgggggccatgctcgcgctcatgctgcacctgcccgtgctccacgagtccgtccccgccgtggacttcgacgagatggagggggacgtgccgctgccggggctgccgccggtgccgccggactccatgccgtgccccgtggcggacaagaggagccccaactacgcgtgcttcgtgcgcctcggcgaccgcttcatggacgccacgggggtcatcgccaacacagcggacgagctcgagccggggcccctggcggccgtcgcccggggccggtgcgtgcccggccggcccgcgccgccggtgtacccgatcggccccgtgctgtcgctcggcggccgctcgccgtctcacgagtgcgtcgcgtggctggacgcgcagccgccggggtccgttgcgttcctctgtttcgggagcatggggtggttcgacccgccgcaggttgcggagatcactgccgcgctcgagcggtgcggccaccgcttcctgtgggtcctgcggggaccaccctcggacgcgtccgggtcggagcacccgacggacgcgaacctcgacgagctgctcccggaggggttcttggagaggacggggggcaagggcctggtgtggccgacgtgggcgccgcagaaggagatcctggcgcaccccgccgtgggcggcttcgtgacgcacggcggctggaactcggtgctggagagcctgtggcacggcgtgcccatggcgccgtggccgctgtacgcggagcagcacctgaacgcgtttcagctggtggccgacatgggcgtggccgtgccgctcaaggtggacaggaaacggggcaacttcgtggtggccgcggagctcgagcgcgctgtgcggtccctgatggacgccgacggcgagcaggggaggagggcgagggagaaggccgcgcgtatgaaggccgtgtgccggaaggccgtggaggagggcgggtcgtcgcacgcggcgctgcagagactcgcagaggcgctccacgacggcgccgtgatcccgaagaagtgaaacgcggccgctccatgttcctttgtttggtgatgtttcatggaatactatgcgcgcgtaattgtttttttataccaatagcgcaataacagtaataatacaaatttagattacaataa

SEQ ID NO: 141629 - DNA, 544 bp, Zea Mays
ggggagagaattgaataaaatttggcagttaaggtacatacatatattattatatagcgaaattagtatgctgctcttctttgctgttcagggtgactcgatgaagctacaggctatatgtactcttgggatgttagtcttctataagttgctttcctctaaaagcgaccgcttgcagccatctttgttagaagggacgcagacagtgaacagctttgtagatggtcccacggattgtgaagttttttttttcacaacctggattggagtctgtatcaatcatgaagatcaatacacacttttgttcattacaatgacatctttcatgacttcgaacctggtgtatcaaagtcattaattcttcttgtacaactatgtagattaactcttgttttcttagatatgtatttgttttgtcagatatgataggcacatgcagttttggtgatgaacatgacctatcaaaaaattactttaaattatacatagtcattttcttgatttttttgtttaatgatctaaggtcctataaccagaagatgtc

SEQ ID NO: 141630 - DNA, 2057 bp, Zea Mays
tatttacgaattgaaatctcacctatttttctttaataacgtttggcatcgtggacgacagccactcgtggaacctacagggctttaacttctcccaacttcctcaaacaaatcctagcatcttcctaccccgtcccgatccatccatggcagcccctaccgtcgtcttactgcccgtgtggggtgctggccacctcatgtccatgctcgacgccggcaagcggctgctcacccgcgggggtcgcgcgctctcgctcaccgtgctcgtcatgcgagcgcccacggagcagctcgcggccgatctcgacgcccacatacgcagggaggaggcatcgggcctcgacgtccgcttcgtccgcctccccgccgttcagcccccgacggacttccacggcatcgaggagttcatctccaggctggtacagctgcacgcgccccacgtcagggcggctatctccagcctggcttccccggtggcagcggtcgttatggacttcttctgcacggcgctgctcgacgtgacccgcgagctcgccgtgcccgcgtacgtctacttcactgccagcgccgggatgctcgcgttcttcctccgcctcccgtcgctccacgaggaggtgacggtccagttcgaggagatggagggcgcggtggatgtgcccgggctgccgcccgtgccgccgtcttccctgccggtgccagtgatggacaagaaccacccgaattacacgtggttcatgtaccacggcaggcgcttcgccgaggccgacggcatcatcgtcaacacggctgccgagctcgagcagagcgtgcttgctgccatcgccgacgggcggtgcacgccgggtgtccgtgccccgacggtctatccaattggcccggttatctcgttcagccccccgcccactaacacagaacatccgcacgagtgcgtgcggtggctcgacacgcagcccgcggcctccgtggtgctcctctgcttcgggagccaagggttctccgcggcgccacaggcgcacgagatcgcgcacggcctggagcgtagcggccaccgcttcctctgggtgctgcgcggcccaccggcacccggcgagcggcacccgtcggacgcgaacctctccgagctgctccccgatggattcctcgaaaggaccaagggcagaggcctggtgtggccgacgaaggcgccgcagaaagagatactagcccacgccgccgttggtggtttcgtgacacacggcggctggaactcggtgctcgagagcctgtggttcggggtgccgatggcaccgtggccgctgtacgccgagcagcacctgaacgcgttcacgctggtggcctatgtaggcgtcgccgtggcgatgaaggtggacaggaagaggaacaatttcgtggaggcctcggagctggagcgagcggtgaaggagctgatgggcggtggcgaggaagggaggaaggcgagggagaaggccatggagatgagggatgcctgcaggaacgccgtggaggagggtggctcatcctactcttcactacgaaggctatcagagaagatatgtaaagtcgacaagaacctatgagtctgacgatgagaggcaattttacatcacattctttattgctgtaaactagcagtaagagaggatgtgattgattaaggttgagaataaattcttatcattgaatataaattagatgaatgatatattttatctaaaaataaagtaaaaatcaaacacctataatttggcaatttctattatatatatatttcaagtgttcatagatgcttagaccatagagccttggccttgtgtaattgtgtttggtacttaggtatcacgtatctctgtcgttaccttcaaataaaaagtgtaataagggggctgttgaaatcagatgtctaaatttgaatttgagtttcttcagtgagatggctattatatattctctccgctctaaaatattattcatacaatattatatatatatatatatgtattatatatgtatatagatttattgtcatctattgaacatggacacaaaaaaaataaaga

SEQ ID NO: 141631 - DNA, 1886 bp, Zea Mays
cttatcagataagctgctttttcaacaagcagcagttgtaccaaacaaggccattgtctgcccatcacaggaaatgaggaaacgaatgggccagacagagatgaatcaatggccttcaatagttgatataaccaactggctaatgttattcggcgccggtaagacacacaccagcgtggagggaaagattagacgccgacatgccgagcccaaccatcgtgctcctcccgatgtgggctacaggccacttctcctcgatgctcgaagccggcaagaggctgctgttctgcagcgccggccgcactgcagcatacagcctcactgttctcgtgacgcccccgccgatggccgcgtcgtccgaggccagcagcagccagcaggcacactgtgagatgatggccaccgtcgacggcatcgttttccaccacctccccgccatcgagcaccgcaccgacctcgcccacccgtcggagtacatccggctctacgcgccgcaagtcaaggaggccatcgcgggtttggcggccccggtggcagcggtcgtcgtcgacttcttcgggaccccgctcctcgacgtcgcccacgacctcgccgtgccagcctacgtgtacttcgcgtccaccggcgccatgctcgcgctcatgctgcgtttaccgggcattcaggaggagctggcttccaggttgcgggaggagggaggggtcgttgacgtgccagggatgcctccggtgccggtggcctctatgccgtcaccggacgtgaacgactacacgtggttcgcgtactacggccgccgcttcctggaaaccagaggcatcatcgctaacacggcagccgagctggagccaggcgttcttgcgtccatcgccggcggcaggtgcacgcctggcgggcgtgctccaacggtgtacccaatcggcccggtgctctcgccgaagccgcgcgtcgtcgtcgatgctcggtcgtcgtcgtctgcgcaagagtgcatccggtggctcgacgcgcagccgccggcgtccgtcgtgttcctctgcttcgggagcatggggtggatgaacgcggagcaggcgcgcgaggtggccgccggcctcgagcgcagcgggcacaggttcctgtgggtgctgcgcggcccaccggccggcagcggctcggggcacccgacggacgcaaacctcggcgacctgcttcccgacgggttcctggagaggacgaaggcccagggggttgtgtggcctggttgggcaccgcagctggagatcctcgcccacgccgccgtgggtggcttcgttacccactgtggctggaactcggtgctggagagcctgtggcacggcgtgccgatggcgccgtggccgctgtacgccgagcagccgcttaacgcgttcgagctcgtcgcgtgcatgggtgtcgctgttgaccttagggtcgtcggcacgggaagggccagctccgtggtggaggcagcggaactggagcgagctgtacggagcttgatgggcgggtcagaggaagggaggaaggcgaaggagaaggccaggaagatgaaggcggcatgccggaaggccgcggagaagggcggatcggcgtatgctgcgttgcaggcagtggtgcaggatatgctagaaagccatgtacccggcacggcacccaaataacaaacaccccagcagaagtgacacgaagataataagatatgaatctgtcaacatgttggttttgtgtttctctatggtttgtacaaccgtttcatggtggctcagatcttggttgctatgtcgatcgatcaagcactaaaaaacaattgtatcttatgaggccacatacaaacatgtttagttcagatatatatgactgatcacatccaaaagtgttgtggttttcgtaca

SEQ ID NO: 141632 - DNA, 240 bp, Zea Mays
atgacagaagagagagagcatgctgacgtagtaggtttttatctgatctggaggtggtggctccccgggtcgccccgcccgccgtgctggtcctgcgcctccgcggggttcctccggcgccgctcgttgtgccccgccaggcgcaggcggcagctgcgcttggtgtcgtcgaagtgcgacagctcgtggaacctccaaagaggttgcatgagactgagagacgcttctgcaagatcttga

SEQ ID NO: 141633 - DNA, 672 bp, Zea Mays
atgacagaagagagagagcatgctgacgtagtaggtttttatctgatctggaggtggtggctccccgggtcgccccgcccgccgtgctggtcctgcgcctccgcggggttcctccggcgccgctcgttgtgccccgccaggcgcaggcggcagctgcgcttggtgtcgtcgaagtgcgacagctcgtggaaccggctgcattgctggcagaagcgctggcggaggccggcgaggaggacgacggacgccttgcggtgcgcgtcgcacaccttgtgcctccggttgtaccgcttctccacgcccatgtcggcgctgcaccgctccacctggcagctcggcccggcgccgccggccgcctgggcgttcacggcggcgcccctcctcgccgccgccgccggggaggcgccggccgccgcgaccctcctcgccaccgcccgggaggtgccacccgcgcccgccagctccgcgggactgttgttgtcctccaccccgtgcggcggcggcagcggcagcggcagcgcgccgttgttgttggccgccccggagtcgtccgagccgtcgccggacgccgcggcggccgcgagcgcggcaatggacgccgccgccgagctcgagggggccatgccgcctgtgccggcggaggaggaggagtccggcatagagctagcgtag

SEQ ID NO: 141634 - DNA, 3132 bp, Zea Mays
cgagcaaccgcagcggagacatgccccgttgcacaggggctggggttgtgccgcgccgaggaggagccgggaggcggtgacgaacgcaacggaagccgcgggcggcgggtcttgttggcagagggcgaccgcgtggttccggggtcttgttgggcggcggatcgtgtgggattgagcgaagatcgtcgtcaactttcggcgctcgctgggggcgcagggcggggaggaaagcagatagggcacggaaggatcggcattgaggcaggcgtccggagatggaccgtcggagctggctgtggcggcgcaagtcgacggacaagagccccgcagagacggagacctcggcgtcctcggcgtccgagaggatcactgatgaacaggatactgccaagagctccccaaactcgactcagtcgccggaggtcacatcgaaggaactggaagacggtgacaatgtgaaggtgaaggtattgagtgagaggctctcatccgtagttctggatattcgtgcgaaggatgatctcgtgaagcagcattccaaggttgcagaggaggctgttctaggatgggagaaggccgagacagagatcgcgtcactgaaggcgcagctgaacgctgcggcggccaagaactctgcgctggaggaccgcctcgtccacctggacggcgccctcaaggaatgcgtccggcagctccggcgcgccaaggacgagcaggaccagacggtgcagggcgcgctagcacagcaagcgcggcagtgggagtcgcacaaggccgacctcgagctgcgcgtcgtcgagctcacggcgaggttggaggccaagtccgagcgctcggtggccgccgccgactgcgacaccggctccaggctagccgcgctggagaaggagaactcggcgctcaggacgcagctgctcgccaagacggaggagctggagctcaggacgatcgagaaggagctcaaccggcgggcggcggagactgcgagcaagcagcagctggagggcatcaagaaggtggccaagctccaagttgagtgcaggaggctgcaggccgcggcacaacggaggccctccgtgaacgtcgaactcaggcgttctccgagctcggcctgcgccgagtcggtgacggattgccagtcggactgctccgactcatgggcctcggtcctcgtcgccgagctcgaccagttcaggatcgacaggagcggcgcgagcagcagggccgccagcctcgcgaccgcggacattggcgtgatggacgacttcctcgagatggagaagctcgcctctgcgtcaaaaggcgacgccgtcgaggacgcgagcgggcaggtgctcaggctcgaggagaaggtcaagaagctggcagccgagaaggccgagcgggagaaggcgctgcacgaggctcagcgcgagctgaggacttcccgccagcgggtaatggtggcagaggagagatcagctgagctacagcggcagctgaaccttgccaatggcgagaaacatgccatgggggccgaggtgaaagctgctgaggcgaagagaggagagctggagggcttgctcgagctcgcccgcgccgagatcgcggggttgctggacaaggggcgcatcctggaggaacggctcgagtctgagaaggcgctgacacttgagctcgcagcaaagtaccaggacatggaggcgctgagggcagagaagagggagctgagcgctcagctggagacgtcacggtccgaagccaagaagctcggtgacaagatcgccctgatggagaggaagctggaggtggagaaggccttgtcgatccgactggcgacgaaatgccatggcattgatgctctggaagcaaagaagaagggagtcgagctcgagctggagacggcgcgcgaggaaatcgcttcgctgcaaaacaaggctagcagcttggaactgcgacgagtcgaggaagagaaagcgtcgtctgctgcactcgcactgcggtgccaagaactggatgaccttagatcccagctggagtcttcgaattcacggatcgttgagctcaatgagaaggttaaaacgctcgaggatgtagtcgaggaacagaggccagtgacggtggaattggagtctcagctccggtcgaggcgcgctgaaatcagtagcctgaaggaggatataagcctgttgcagaagaagctggagagccagaagaacctgtcatcagcttacatatctgcacttggtgcttctgaaacagagaagaaggagctggctagtcggtttgagctcggagagaaagaagccgaggaattacgtgggaagatgagcttgcttgaggaacagatccgtaaagagaaggcacggtcatccgagtttgcggtaaaatgtcagaagatggaggaacaaatctcctgtagatctcttcttggccaccaaccagtgaaatcatctgcggcgatcaaagatcttcagctcagaaaggagacagagctggccaaggctgcagagaaactggccgactgccagaagacgatagcttcactgagcagccagctgaaatcgttggctgatttcgacgaattcccccctgaaactgagaccagtggcgctgactcagacgacgcctgggacagcgatctgaagcttctccaacccgcaagctatcccacgcagattggctgtttggcagtcacatgattcacgatcctcgttggcaagtggatagcgaaactgtttttgcttggcttccgccgcatgattgctgtgatgagattgccatgatgttccaccacatgtcatatagagttaagttaataggtgagcaaatgttcatatggaagctgtttatagagttgtttggtgaagcctcaaagggactcatattgaatattatctttgatcttccaatctccctgtcccttggaaacatcctcactgtcagaagactgcaaatagtgaaatacacatggcatgtcaatcaaagaatgtaagaataaaaaccaggggcaggttcatatgacggcacgttcccacccgacatgctaccacatgttcataaggatcttggatttgcaaattccaattgaaagtttgtacataattcagttctagcatcttgtatctgtcaagagaaaatccgggtcttagt

SEQ ID NO: 141635 - DNA, 740 bp, Zea Mays
tccccgacggggtccctcccgggagcgagatccaggcgccgtcggcgatcttccgccgtccctgcgtattactacagatgcacgtacaaggacaacatgagctgcccggccacgaagcaggtacagcagaaggaccacaacgacccgccattgtacgcggtcacctactacagcgaccactcgtgcaacagcgccttcctcccgctcttcccctccgagttccagctgcggacaccgtccgggaaggccgtctccatctgcttcgactcctcgtccggggcgccggcgcaagagccggcggccgtggcgtccgtcgccaccaatgccagcggcggctcgccctcttccagcgccgcggcggcgcggcgaggcacaccgccggatatcagttacccgctcgacctgcggtggtctgacacgtacccgtggggcgccggcgccgtggactagaagctggcgtcctgcgccaccgagtgccatgacgccttctcggctggcgccgtgccggaggaggtggtagatgcaggcagatttgggtctatcaggttcttccattttttgtaaattcatcggtggaaggcaactgattttacttcgacaaactaatatgatacagatgtttctttttttacatgccgaagcttaccagagattcgcacgcaacttttctttttcttggttcaaaatcgaaatagcagtgctaatgttaatccagcagttcatttctccgtgttgtgcct

SEQ ID NO: 141636 - DNA, 632 bp, Zea Mays
tagggcaatataaatatggctctgaaacatttgaagcctcagcttcaccttctggtgcaagttattcaaaatgcaagaatgatgttgtgaaatctcttaaagtggatgaagcatgtacccacctgaaatgttcttttggtggcatttggaatggtggcggtggtgctggacagaaaaatctttttgtggcatcgtttttatttgacatggctgatgaggaaaatggaagtcatccgaataagaggggcacgtacgacgagaacctggtgaacggacagattgcgcagcaactgatagggactcatctggttgccatctttctgaatcatatctgttgaatcctcgagctctggggatgaatcatggatggctacgaggaggccgcgattgaggacgactcccaatgttttctaatcggttgatcgtttctaatcgacacagaggcgatcagccgattagatcgattcttacctcacaactgatgtcttcgatggtgataaataccgggattatattggtgacattattgcgtaactttggagttagttcattctatttgagtcagcgtatttataatgatattacatatttatatcgtcaaaataatatttgtgttaatgtgatttgttggc

SEQ ID NO: 141637 - DNA, 691 bp, Zea Mays
gaggatggtggtcatctgattaaagcatgcctcctcgcccctcgctcatccacctgaagctgtggcgacttcggtcttgtcacctgcttcgtcgatctgtgagaaaagcaatcaccggtctgtgagatcaagttcaagaggctggacactggggaagagaaagtttggctgtgtttttgctgtactcacttctgtggtcggaatggtttgtcaaacttggggacctgccgggcatgtggcaccatggttctcctcagctgcttcagcgccttctcctcctcaatctacagaaacagatattgcgtcggtcgatcagcagcagaaggtaaatttgttgtcaaggggcagggaatgcatctgtaccttttgcgcgaattcgttctcctctctcaaccttttccctctcatcaacatgcaacacaaattgttgaacttcagtgagaggtttccgctctttctccggaagtgggatagggtccctgtgacaaagattacaagaggctgtttacatatctcgctcacagagaaaggacgaattcttaagagaaatggctgcatgtgttactcactctttcagtacagggcttaggttcaggcttcggcggcacctgaacaaggattatgtttagacaggatgaatcaaagattgtggtgccaactgaaaacgtccagagtaaaattttcacatgcc

SEQ ID NO: 141638 - DNA, 325 bp, Zea Mays
atggagacggcagcggcggcggccggcgtggagctaggctcctcgaagccccaaatcgccacgcaggcagagatggcggaggcccaggtgctgctcgcctaccacgaccagtgcgcgcacggcgcacctcatcccgatcaacaagtgtcgtgtcgccgagttgtacctcccctggaagtgctagcccgagcgtcgtgcctatgagaagtttcagtaagagctcgtcatggagcggatgctccagatgcagaatatccgtgaggcgcaggagaccaaggtcaagggaggcgcctccattggcctcatcgcagccatcgccaagctc

SEQ ID NO: 141639 - DNA, 355 bp, Zea Mays
aatccacatgtatttctctatcatataaaactctatattgattttttaaaataatttatatgaatttgataatgtttgtcacaactcacacgaattctgtataccataatgaattgatggttgagagactatgcacgagacatgcaaattaacaaaactcatacaagcgtcgaacagtgtgctgatgatgatcagagacacaagggcagcacatgatcaggtcttaacatgtttggcttccgaacaggcttttctccagatccccaaggaagaagaagatccggtcagatatatgtcgatgctcatcccaacgtacataagctatcaatggtattatatgttcccgttgcaacgc

SEQ ID NO: 141640 - DNA, 1403 bp, Zea Mays
agtactaattcctaaaacacgtttcggggcgaagcaattctatcctcatcaatcatcggtagggttccggcgattccccatggccggccgccaccgaaacccgctgccaccttcctacccccgcgccgccgctgccgccgccggcaaccatctgcctcccccgcttcacccccacctcccgccacaccatcccctcgacgactaccgcgacccgccgcgcctccccccgcaccaccatatcgacgacttccgcgatccgtcccgcctgccgcctggccaccccgacagcttccaggagccgccgccaccgcatcttcgtcatttcgtgggccacggccacggcggtgccggtggccccctgccacctcagccgcatgtggtagcagcgctggaggagcggctgggcgccgagatcgacgaggcgcatgcgctgctcgcgcagaaccagcgactggctgcgacccacgtggcgctcgtgcaggaggtcgctgccgcgcggcacgagctcggccgcaccgcgaacgcgctcacttccgctcaggaggagagcgacctacgccttcgcgaggtttatgagaggtcactgaagatggaagcagagcttcgggcagtacatgaaatgagagcagatcttgcccaagttcgtatggacattcaaaacctgggtgcagagaggcaggaactcatgggccaagttcagggattaacacaagatttggctcggtctgcagaagacttgcagaaggtatctgcattaaaatctgagatccaagagatcaaacatgaaacacaacatttgagatcttgtattgagcttgagaagaaaggatatgcagagagttatgagcagggacaggagatgcagaaaaatttgatttcagtggcttctgaggtggagaaacttcgagctgaggttgctaacgcggagaagaggtcacgggccattgtgtctgcaggcaatcaaggttataatggaagctatgggaaccccaaggccaattatgctgcaaacccttataactctggatatggcatgaatcaagcaactgctgccactgattctggttctcagtatggaactggtgcaacgcatggttcttggggtgcctatgacttgcaaagggcgtccgggcgtagataagtactgcgaattcgtcaggtctttcacggaagctttggccatgcctctatgattgttgtggtggatcagatgttgaacaggtggggcacaggtatagatgaatagcgcacacatttgctttagtttagcttctatcggcctgtgcaagggaacatatatctgttgcatcgagtgtcaatgtattggaagttttctatcgagcatgaatatattaaggatacgagcgtcgtgatgtttaactaattattattagttcccctca

SEQ ID NO: 141641 - DNA, 2486 bp, Zea Mays
gtactaattcctaaaacacgtttcggggcgaagcaattctatcctcatcaatcatcggtagggttccggcgattccccatggccggccgccaccgaaacccgctgccaccttcctacccccgcgccgccgctgccgccgccggcaaccatctgcctcccccgcttcacccccacctcccgccacaccatcccctcgacgactaccgcgacccgccgcgcctccccccgcaccaccatatcgacgacttccgcgatccgtcccgcctgccgcctggccaccccgacagcttccaggagccgccgccaccgcatcttcgtcatttcgtgggccacggccacggcggtgccggtggccccctgccacctcagccgcatgtggtagcagcgctggaggagcggctgggcgccgagatcgacgaggcgcatgcgctgctcgcgcagaaccagcgactggctgcgacccacgtggcgctcgtgcaggaggtcgctgccgcgcggcacgagctcggccgcaccgcgaacgcgctcacttccgctcaggaggagagcgacctacgccttcgcgaggtttatgagaggtcactgaagatggaagcagagcttcgggcagtacatgaaatgagagcagatcttgcccaagttcgtatggacattcaaaacctgggtgcagagaggcaggaactcatgggccaagttcagggattaacacaagatttggctcggtctgcagaagacttgcagaaggtatctgcattaaaatctgagatccaagagatcaaacatgaaacacaacatttgaggtacattctgttaaatctttgacctactcttttttgaatatagagaaggtttaaggatttttggcatgcatacaaactcgttattaatgatgcaattatgcacaagagaagcaatgatgcgcaacctgtgtatccgagaaaaaaaatcattattaatgttttatctgctcttccctgctttggcttacgcctttagctcttcccaagcagcatttatgagtgaacattgtcattgttcccttccttttcacctggacaacctagtcaaaacacccctcactcgaaactggaatgatatgttcaaaaagggatttgatggaattttgattgtatgttgagtaatagagagaaaggcgaatctgcaatgaatacctttgcttttattcaactgtatggcatttgttatgacccaatatgcagatcttgtattgagcttgagaagaaaggatatgcagagagttatgagcagggacaggagatgcagaaaaatttgatttcagtggcttctgaggtggagaaacttcgagctgaggttgctaacgcggagaagaggtcacgggccattgtgtctgcaggcaatcaaggtatgatctaagtaggaggttatctatttttagtatatcgcttctgttccaaatgtctgctacgtatgtgatcaattaggtgacatgaccttgtcaacaaaactacccaagttttaagataatgctccaaaagattgcttccagagtgattgtgaatttgagagttgaaaaatctatatgctaaaacctaagctatccatatatattagtgctgaactatcagcctgttgtaaaatgtgatgtgttagctgattcgtgatctgactataggcgaagttgattagtaatctggcatagtaggtgaaactggtttgtaatctggcataataggcgtaggattactaggtgaagctgatctgtctctgtgtcagggattgatttactgaccggaaagtccagtttctcggtaaaatattttgttaccgctcaagtacgagagatgtttctcgctacggtttttggtgttttccgattctaaattaaaaaaaatatgaagtcaatattttttagtcaaaatgaaatttcgctacagtaaaaacgaaaaggtaatccctgctctgtttatgtggcatgtgtgctactcataatgcagcgactatcctgcaggttataatggaagctatgggaaccccaaggccaattatgctgcaaacccttataactctggatatggcatgaatcaagtattccatctggcctgtactttatcatctgcagaactagtcctcacatcccttctcatttgaagctgtttctctattgcaggcaactgctgccactgattctggttctcagtatggaactggtgcaacgcatggttcttggggtgcctatgacttgcaaagggcgtccgggcgtagataagtactgcgaattcgtcaggtctttcacggaagctttggccatgcctctatgattgttgtggtggatcagatgttgaacaggtggggcacaggtatagatgaatagcgcacacatttgctttagtttagcttctatcggcctgtgcaagggaacatatatctgttgcatcgagtgtcaatgtattggaagttttctatcgagcatgaatatattaaggatacgagcgtcgtgatgttta

SEQ ID NO: 141642 - DNA, 1300 bp, Zea Mays
catcggtagggttccggcgattccccatggccggccgccaccgaaacccgctgccaccttcctacccccgcttcacccccacctcccgccacaccatcccctcgacgactaccgcgacccgccgcgcctccccccgcaccaccatatcgacgacttccgcgatccgtcccgcctgccgcctggccaccccgacagcttccaggagccgccgccaccgcatcttcgtcatttcgtgggccacggccacggcggtgccggtggccccctgccacctcagccgcatgtggtagcagcgctggaggagcggctgggcgccgagatcgacgaggcgcatgcgctgctcgcgcagaaccagcgactggctgcgacccacgtggcgctcgtgcaggaggtcgctgccgcgcggcacgagctcggccgcaccgcgaacgcgctcacttccgctcaggaggagagcgacctacgccttcgcgaggtttatgagaggtcactgaagatggaagcagagcttcgggcagtacatgaaatgagagcagatcttgcccaagttcgtatggacattcaaaacctgggtgcagagaggcaggaactcatgggccaagttcagggattaacacaagatttggctcggtctgcagaagacttgcagaaggtatctgcattaaaatctgagatccaagagatcaaacatgaaacacaacatttgagatcttgtattgagcttgagaagaaaggatatgcagagagttatgagcagggacaggagatgcagaaaaatttgatttcagtggcttctgaggtggagaaacttcgagctgaggttgctaacgcggagaagaggtcacgggccattgtgtctgcaggcaatcaaggttataatggaagctatgggaaccccaaggccaattatgctgcaaacccttataactctggatatggcatgaatcaagcaactgctgccactgattctggttctcagtatggaactggtgcaacgcatggttcttggggtgcctatgacttgcaaagggcgtccgggcgtagataagtactgcgaattcgtcaggtctttcacggaagctttggccatgcctctatgattgttgtggtggatcagatgttgaacaggtggggcacaggtatagatgaatagcgcacacatttgctttagtttagcttctatcggcctgtgcaagggaacatatatctgttgcatcgagtgtcaatgtattggaagttttctatcgagcatgaatatattaaggatacgagcgtcgtgatgtttaactaattattatta

SEQ ID NO: 141643 - DNA, 780 bp, Zea Mays
ccttttcacctggacaacctagtcaaaacacccctcactcgaaactggaatgatatgttcaaaaagggatttgatggaattttgattgtatgttgagtaatagagagaaaggcgaatctgcaatgaatacctttgcttttattcaactgtatggcatttgttatgacccaatatgcagatcttgtattgagcttgagaagaaaggatatgcagagagttatgagcagggacaggagatgcagaaaaatttgatttcagtggcttctgaggtggagaaacttcgagctgaggttgctaacgcggagaagaggtcacgggccattgtgtctgcaggcaatcaaggttataatggaagctatgggaaccccaaggccaattatgctgcaaacccttataactctggatatggcatgaatcaagcaactgctgccactgattctggttctcagtatggaactggtgcaacgcatggttcttggggtgcctatgacttgcaaagggcgtccgggcgtagataagtactgcgaattcgtcaggtctttcacggaagctttggccatgcctctatgattgttgtggtggatcagatgttgaacaggtggggcacaggtatagatgaatagcgcacacatttgctttagtttagcttctatcggcctgtgcaagggaacatatatctgttgcatcgagtgtcaatgtattggaagttttctatcgagcatgaatatattaaggatacgagcgtcgtgatgtttaactaattattattagttcccctca

SEQ ID NO: 141644 - DNA, 1626 bp, Zea Mays
ctttttcaaattttttgggtgccaaatatttgccctccagtgctgtccacggctcagcctcacacacgcgcgagagcaaattgcagagctgctcgtcgccggcgatcgccgcagggttcgtccgagaggggagaggctctctgtatcggggcatggtgatcctggaccgcactccggccgcggcgcagggggccgcctgtagcccgctcccgaagtcgcctaggttttcgtgggaggtggcctcgccgccctcggaccccatcctcccgtacctcagtgcaaatcatcaaacatacagaagaatgaaccttctgtgatagatccatggtctccttctactaggaatactttactggagaaaattaatggtggcttgaggaagttttctggctattataagagtaacaaggtgtactgtggaaaggtgcctttgacttcttcgttgaatgttttaagaaacaagggcatcaagttaggtggtagaaagtatcaaatcaaaggatctactggcactggtgcttttgctaaagtatacaaagccactgttgacagtaatgcggaagaaatggttgctttgaagattcagaatccctcatttactttggaattttacatgtattgccaacttgatctgcgtatatctgatgtcgagagaccaagctttggctacgcacatgaaatgcatatcttctctgatgtcagtgtgttagtttgtgattacctgccgtatggaactctcctggatgtcataaattctcacttagtagtcggtcgatacatggatgaagttctatgcatgtattataccatagagatgctgaacatgctggaaacactgcatagtgttggcataatccatggtgatttcaaacctgacaacatccttgtttgctacccgagtggagagatcacagaggacaatttccgaagtgaaaaacgagtagagaggaatcaggggctctgccttgttgattggggccgtggcattgatctggctcttttcccctcctgcacggagttccacggggactgtggaacctcaggattcagatgcatcgagatgcaagaacatagaaactggacttatcaggtcgacacatacggcctctgcgtcgttgtgcacatgatgctacacgggtcaggcatgaacgtcaagaaggttcccaggattggtggaggctacgaatggcaacctaaacagccgtttaaaaggtactggaacgttgatctgtggcagaagctcttctcgacgctgctgaacccgccctcgaacgacagcgacgtggccgcgctccagagcctgcgagcgtcattccggcagtacatgtgcagcaaccggcagctggtcggcaagctgaaccagctgctggcgaaacaaaaggcctcgctgtgctcgtcctaggctgcgtgacaaagccgaaacgcggctggtgcctgtgccccccatgtaatgtaactccggctaggctaatacgaactcacatgtatccttaagtaatttactagctagttacccgtgatttggtagggttgttatatatcattaaaataagtattaagatatttatttaaatataattattgtttatttttatacactatggaatgtgtggtggtttagtggtt

SEQ ID NO: 141645 - DNA, 1786 bp, Zea Mays
ctttttcaaattttttgggtgccaaatatttgccctccagtgctgtccacggctcagcctcacacacgcgcgagagcaaattgcagagctgctcgtcgccggcgatcgccgcagggttcgtccgagaggggagaggctctctgtatcggggcatggtgatcctggaccgcactccggccgcggcgcagggggccgcctgtagcccgctcccgaagtcgcctaggttttcgtgggaggtggcctcgccgccctcggaccccatcctcccgtacctcaggtctattagcagggccatggatgagctcggaacagggcctcagtatgacacgacagccttagacaggctcaagcattacttgactgaatgcattgcaaaatatggggatgactaccaatactccactgatccacggttgctcaagatttggatcctctattgcaaatcatcaaacatacagaagaatgaaccttctgtgatagatccatggtctccttctactaggaatactttactggagaaaattaatggtggcttgaggaagttttctggctattataagagtaacaaggtgtactgtggaaaggtgcctttgacttcttcgttgaatgttttaagaaacaagggcatcaagttaggtggtagaaagtatcaaatcaaaggatctactggcactggtgcttttgctaaagtatacaaagccactgttgacagtaatgcggaagaaatggttgctttgaagattcagaatccctcatttactttggaattttacatgtattgccaacttgatctgcgtatatctgatgtcgagagaccaagctttggctacgcacatgaaatgcatatcttctctgatgtcagtgtgttagtttgtgattacctgccgtatggaactctcctggatgtcataaattctcacttagtagtcggtcgatacatggatgaagttctatgcatgtattataccatagagatgctgaacatgctggaaacactgcatagtgttggcataatccatggtgatttcaaacctgacaacatccttgtttgctacccgagtggagagatcacagaggacaatttccgaagtgaaaaacgagtagagaggaatcaggggctctgccttgttgattggggccgtggcattgatctggctcttttcccctcctgcacggagttccacggggactgtggaacctcaggattcagatgcatcgagatgcaagaacatagaaactggacttatcaggtcgacacatacggcctctgcgtcgttgtgcacatgatgctacacgggtcaggcatgaacgtcaagaaggttcccaggattggtggaggctacgaatggcaacctaaacagccgtttaaaaggtactggaacgttgatctgtggcagaagctcttctcgacgctgctgaacccgccctcgaacgacagcgacgtggccgcgctccagagcctgcgagcgtcattccggcagtacatgtgcagcaaccggcagctggtcggcaagctgaaccagctgctggcgaaacaaaaggcctcgctgtgctcgtcctaggctgcgtgacaaagccgaaacgcggctggtgcctgtgccccccatgtaatgtaactccggctaggctaatacgaactcacatgtatccttaagtaatttactagctagttacccgtgatttggtagggttgttatatatcattaaaataagtattaagatatttatttaaatataattattgtttatttttatacactatggaatgtgtggtggtttagtggtt

SEQ ID NO: 141646 - DNA, 2038 bp, Zea Mays
ctttttcaaattttttgggtgccaaatatttgccctccagtgctgtccacggctcagcctcacacacgcgcgagagcaaattgcagagctgctcgtcgccggcgatcgccgcagggttcgtccgagaggggagaggctctctgtatcggggcatggtgatcctggaccgcactccggccgcggcgcagggggccgcctgtagcccgctcccgaagtcgcctaggttttcgtgggaggtggcctcgccgccctcggaccccatcctcccgtacctcaggtctattagcagggccatggatgagctcggaacagggcctcagtatgacacgacagccttagacaggctcaagcattacttgactgaatgcattgcaaaatatggggatgactaccaatactccactgatccacggttgctcaagatttggatcctctatgcagatgcaattgaggacttccccagtgtttacaaccagctggaggagaaaggaatgtttcaggagcatgcactattgtatgactcatatgcacaatatctaattgctcatgggaaattggttgaggctgataaggtgtatggaatcggtatttctaggaaagcagagccccttgataatttgaagaagatgcacttgacatttctaaaacatctggagaatattttagaagaagcagatgcggaagaacagtgcaaatcatcaaacatacagaagaatgaaccttctgtgatagatccatggtctccttctactaggaatactttactggagaaaattaatggtggcttgaggaagttttctggctattataagagtaacaaggtgtactgtggaaaggtgcctttgacttcttcgttgaatgttttaagaaacaagggcatcaagttaggtggtagaaagtatcaaatcaaaggatctactggcactggtgcttttgctaaagtatacaaagccactgttgacagtaatgcggaagaaatggttgctttgaagattcagaatccctcatttactttggaattttacatgtattgccaacttgatctgcgtatatctgatgtcgagagaccaagctttggctacgcacatgaaatgcatatcttctctgatgtcagtgtgttagtttgtgattacctgccgtatggaactctcctggatgtcataaattctcacttagtagtcggtcgatacatggatgaagttctatgcatgtattataccatagagatgctgaacatgctggaaacactgcatagtgttggcataatccatggtgatttcaaacctgacaacatccttgtttgctacccgagtggagagatcacagaggacaatttccgaagtgaaaaacgagtagagaggaatcaggggctctgccttgttgattggggccgtggcattgatctggctcttttcccctcctgcacggagttccacggggactgtggaacctcaggattcagatgcatcgagatgcaagaacatagaaactggacttatcaggtcgacacatacggcctctgcgtcgttgtgcacatgatgctacacgggtcaggcatgaacgtcaagaaggttcccaggattggtggaggctacgaatggcaacctaaacagccgtttaaaaggtactggaacgttgatctgtggcagaagctcttctcgacgctgctgaacccgccctcgaacgacagcgacgtggccgcgctccagagcctgcgagcgtcattccggcagtacatgtgcagcaaccggcagctggtcggcaagctgaaccagctgctggcgaaacaaaaggcctcgctgtgctcgtcctaggctgcgtgacaaagccgaaacgcggctggtgcctgtgccccccatgtaatgtaactccggctaggctaatacgaactcacatgtatccttaagtaatttactagctagttacccgtgatttggtagggttgttatatatcattaaaataagtattaagatatttatttaaatataattattgtttatttttatacactatggaatgtgtggtggtttagtggtt

SEQ ID NO: 141647 - DNA, 2496 bp, Zea Mays
cccttgcttctctcccccggcccgcccgcccgcccgctcgctcgccgctggatcagtttcgtggcgctttggagcagcgaagtggttgctgtgcttggtatttctagtgcgtagtatcgccatcagcgctcaataatactactcctcttcctctatgctgcacgccccggcccctttgttttgtagctcttgtcagcgaaccttccccctgaaaaccccacccacccttcctctccgatcctcctagtagcgcctcacttgcttcattccgatccattccaccacccatctccctcctcagctcccctctccgctctccctccctcgctcgcgctctccacgcggatcaccggaggctagctagcaagctcgaccggcgcggccgatctagctcgcgcttgttggccgcttcagcttagcagcggcggcacgtcgtcaacctgtgctgtgagaaagactagtagagagagatacgtgtaaggatggctggcgcggggggtgcgacggctgtgaagcagccggcggcgggggcgcccgacgctggggccagcaggagcggggtcggggctggcgccgccggggcgccggtcgccgacccgcgcgccgaggcgctgcggtgcccgcgctgcgactcggccaacaccaagttctgctactacaacaactactcgctgtcgcagccgcggcacttctgcaaggcgtgcaagcgctactggacgcgcgggggcacgctccgcaacgtccccgtcggcgggggctgccgcaagaacaagcgctccaggagcagcggcgggcccggcgccggcgggaggaacgggtcctccgctgctgctgctgctgccgccgccgccgccgccgtcacgtcctcctcggcgccgtcgacgctgtccctcccgctgcatacggggtccctgccgtcgttgtcctcggcgctggggctgcccgggggcgcctcgctcgcgtcgctcctcctcgggaccgctggctctggcggtgaccacctcggcctcttccaggccgccatgcagtcggtggtctcctcggaggcgaccgcctacgagatgcagcagcagcagcagacgcaggtggaccacctgctaggcctcggctacggaggcgccggcgccggcgccggcgcgcagatccacctcaagccgtggatgcacgaggcacccggtgctggcgcgggcgggatcatggacagcttctacgcgccgctgctgtccagctccctcgtgccgggcctggaggagctgcacgtcaaggcggaggtcgccggtgccggggatcaccagcagaagcccgcgcccggggaccagcagagcgccagctgggagctgccgacgccgtcgtcgtccaacgtcgacgccaacgtcatcgcatctgacgcgctcatggccgccgccgccgcgtccatgaaccccggggttagctccgccacagccgccacggcgccaaccgtcccctcctcgttcatgtactggggcaacggcggtattggcggcgctgccgcggcgtggccagacctcaccaactgcggatcctccattgccacgttcttctagccgtctggctgtcccgcactcccgctggcctcgcgttaacttcgtttttttaccttaattttctggttaattttttcttgactaaaataacatgtaatttgtggggaaagctgagatgagagagagagagagagagcactgtggaagaagagagctagatcatctcaccacctcatagggcagaaaattggacaaatcaaacaatgatccaatatttcaagaggatttcttcaccgacgactctgagcttcatcggatctatggtcttcgccgtcgagcgatgatcaaggccgtcgacgactagagcatgcatggatttgggaggaggaggaggacaacatgagaccatggggaagctaaagagagctagcaaagaagccaagaagtgtaagtgcagcgctgccatgacactacttgatttcctacttcgttcttggctagctagcttctccttgggtgttttgtacatagagcatatggtgtgtgtggggatacaatagtcaaggtggcccatgagagatcatgcatggtgcaagtcatgaacctctctctctcatctcggcatttgaaatcagtgtgtttaattggttacttcctctctctctctctctctctctctctctctaccatggtttttggaagaactctctagatgtacaagttaatactactagtactttccacacctattgcagctgaattagagaactgtttttgagttctcatgcattattagagttgtcaagggttcatcatgcatcaagttatctagctactttctttctccctgcttctacttctagagtggaattaatttctccttctttctcgggggttttttttgttcaaacttggcttgtacgaattatgatggctttgtgagttatgagaaatttaaacatctggcacttctaatgatggtacatagata

SEQ ID NO: 141648 - DNA, 1652 bp, Zea Mays
atgaggacactccagcccattaggcccatcaatggaaccgagaatattgccgccgcgatgctggctgttggtaaaaagtcaagtcaaccaccagagtgctttgagattggagatcgaaggttgaaggctgaggacgggtcgcttgtgggcttccttttcccttctcttcgctttgttttttatcttctcgacaaaacctccaaggcacctccgttccccgttcgtcctccacacctgtatctcttccccatggccgggctcggcgctggactgggagcacgcccttccgcgaccttctaggccgggccttctaggacggaaggctccggccactcactgtcgctgcccctctccgtcccgtcggctccggtacggataggcacgatcgctctgcccatgttctctgcatctgcgtgccaattcgtaaaaaaatagcttcgctgcctgctctcgtgtcagtgttcttcccaccgggtggacattgatacgagatcatgtgctaggcttcagagaaccgcggcacatttcgcggcgcatgcttactggtaaagtggtaaatttaattgttgcactgtacttctatccaatttatgtcagttccacatacagacatacttgccttttgtgccagtaatagttgagttttgagtgaacctatttttttacttgcttgggttggttacatgcctcccttatatgttttaggactcagattgaaaattaattttatgccgactcacgtgacatcgtgctgtttaaatgattttattgccacctgtccttaacactctgcatggttatcagacacttctagtaaacaatacactcatgactcatctagtcatctccatatctgtttctgcacatatctagtttgctttctccttgctgtttcaaggtgcaactatggacccatcgggtggctttggatggagtgtactgctctagatagttgtgaagttggagttcctaatgtcattgtccgcgaaggcattttttttgtgtgcaggttacaactaaggtcgttttgctataactaggcctaactaatcctcccagtttgcattgttggcttgttgccggcaaattcgtagtgccaaaacgatgctttactgtgtcaagcaggctcacatgggtggaagatgagcttatggagaatatctccaaggaatgacttgggacgaggtacctaagagatatgagtggaatatcttcaagatgttagctaaggataggtgcgctcggagactagcaattaacatgtatgaaccatgatctttgtctctttttctatttacccttaactctactgtattgtcttttactcttttggtgttttttccttctattcttgtttcttgtgtgtttaatctctagcttaccctaacttatttgggacaaaaaggttatgttgttgttgtattgttttgcactgaaggggcggtctatctgagtcaccaggttgcgggttgtatttgtgggggaacgtttgcctcgttttatgccttccccagacccaactcatgggaacctccaatgctggattctggatttcgtaatatttgactgtctatcagttcgtacgcgtcttcttatgataatcttgtagtttgtgggttatctacattaaactaatacaccaaattctccgc

SEQ ID NO: 141649 - DNA, 1701 bp, Zea Mays
atgaggacactccagcccattaggcccatcaatggaaccgagaatattgccgccgcgatgctggctgttggtaaaaagtcaagtcaaccaccagagtgctttgagattggagatcgaaggttgaaggctgaggacgggtcgcttgtgggcttccttttcccttctcttcgctttgttttttatcttctcgacaaaacctccaaggcacctccgttccccgttcgtcctccacacctgtatctcttccccatggccgggctcggcgctggactgggagcacgcccttccgcgaccttctaggccgggccttctaggacggaaggctccggccactcactgtcgctgcccctctccgtcccgtcggctccgtgttcttcccaccgggtggacattgatacgagatcatgtgctaggcttcagagaaccgcggcacatttcgcggcgcatgcttactggtaaagtggtaaatttaattgttgcactgtacttctatccaatttatgtcagttccacatacagacatacttgccttttgtgccagtaatagttgagttttgagtgaacctatttttttacttgcttgggttggttacatgcctcccttatatgttttaggactcagattgaaaattaattttatgccgactcacgtgacatcgtgctgtttaaatgattttattgccacctgtccttaacactctgcatggttatcagacacttctagtaaacaatacactcatgactcatctagtcatctccatatctgtttctgcacatatctagtttgctttctccttgctgtttcaaggtgcaactatggacccatcgggtggctttggatggagtgtactgctctagatagttgtgaagttggagttcctaatgtcattgtccgcgaaggcattttttttgtgtgcaggttacaactaaggtcgttttgctataactaggcctaactaatcctcccagtttgcattgttggcttgttgccggcaaattcgtagtgccaaaacgatgctttactgtgtcaagcaggctcacatgggtggaagatgagcttatggagaagcagaatatctccaaggaatgacttgggacgaggtacctaagagatatgagtggaatatcttcaagatgttagctaaggataggtgcgctcggagactagcaattaacataaaaggccacctttgaggcgtggaaaggccgaccatcttatgttagttcaaaaggattgccagaactatgcaagggcttaatggattactggaacgagagctgcttgcaaacttgttgcccatgttcttgactttgctgggacttcagttaagccatccattacttcaaatgaaattgacgcagcagttcatgatatgatcattgaggctgctacctatccttctccacttggatatcgtggatttctatatgtacatcagtaaatgagtctgtcaagggatacctgattcagctcctcagatgcagaatggggatattataaatattgatgtaaatgtgttccagaatggataccatgggggtaccttcagaacatttgcatgtggacaggtgaatgattctatcaagcattttctcaatgaccagctccatccatccagcaccaagcggcaagcacgcacgctcccactcccacgccaacgccacgcagcagaaatcagcaatcttgggggtgggagggaa

SEQ ID NO: 141650 - DNA, 1277 bp, Zea Mays
atgaggacactccagcccattaggcccatcaatggaaccgagaatattgccgccgcgatgctggctgttggtaaaaagtcaagtcaaccaccagagtgctttgagattggagatcgaaggttgaaggctgaggacgggtcgcttgtgggcttccttttcccttctcttcgctttgttttttatcttctcgacaaaacctccaaggcacctccgttccccgttcgtcctccacacctgtatctcttccccatggccgggctcggcgctggactgggagcacgcccttccgcgaccttctaggccgggccttctaggacggaaggctccggccactcactgtcgctgcccctctccgtcccgtcggctccggtacggataggcacgatcgctctgcccatgttctctgcatctgcgtgccaattcgtaaaaaaatagcttcgctgcctgctctcgtgtcagtgttcttcccaccgggtggacattgatacgagatcatgtgctaggcttcagagaaccgcggcacatttcgcggcgcatgcttactgtttgcattgttggcttgttgccggcaaattcgtagtgccaaaacgatgctttactgtgtcaagcaggctcacatgggtggaagatgagcttatggagaagcagaatatctccaaggaatgacttgggacgaggtacctaagagatatgagtggaatatcttcaagatgttagctaaggataggtgcgctcggagactagcaattaacataaaaggccacctttgaggcgtggaaaggccgaccatcttatgttagttcaaaaggattgccagaactatgcaagggcttaatggattactggaacgagagctgcttgcaaacttgttgcccatgttcttgactttgctgggacttcagttaagccatccattacttcaaatgaaattgacgcagcagttcatgatatgatcattgaggctgctacctatccttctccacttggatatcgtggatttctatatgtacatcagtaaatgagtctgtcaagggatacctgattcagctcctcagatgcagaatggggatattataaatattgatgtaaatgtgttccagaatggataccatgggggtaccttcagaacatttgcatgtggacaggtgaatgattctatcaagcattttctcaatgaccagctccatccatccagcaccaagcggcaagcacgcacgctcccactcccacgccaacgccacgcagcagaaatcagcaatcttgggggtgggagggaa

SEQ ID NO: 141651 - DNA, 2817 bp, Zea Mays
tttatcttctcgacaaaacctccaaggcacctccgttccccgttcgtcctccacacctgtatctcttccccatggccgggctcggcgctggactgggagcacgcccttccgcgaccttctaggccgggccttctaggacggaaggctccggccactcactgtcgctgcccctctccgtcccgtcggctccggttacaactaaggtcgttttgctataactaggcctaactaatcctcccagtttgcattgttggcttgttgccggcaaattcgtagtgccaaaacgatgctttactgtgtcaagcaggctcacatgggtggaagatgagcttatggagaatatctccaaggaatgacttgggacgaggtacctaagagatatgagtggaatatcttcaagatgttagctaaggataggtgcgctcggagactagcaattaacataaaaggccacctttgaggcgtggaaaggccgaccatcttatgttagttcaaaaggattgccagaactatgcaagggcttaatggattactggaacgagagctgcttgcaaacttgttgcccatgttcttgactttgctgggacttcagttaagccatccattacttcaaatgaaattgacgcagcagttcatgatatgatcattgaggctgctacctatccttctccacttggatatcgtggatttctatatgtacatcagtaaatgagtctgtcaagggatacctgattcagctcctcagatgcagaatggggatattataaatattgatgtaaatgtgttccagaatggataccatgggggtaccttcagaacatttgcatgtggacaggaccagctccatccatccagcaccaagcggcaagcacgcacgctcccactcccacgccaacgccacgcagcagaaatcagcaatcttgggggtgggagggaaggagattcctggagaaagcgatcgagtgcgcatcaaaagaagcagtcttggacgaaagaagcagtcccggaggccggcacgagcaggagcaggcgcagcagggcacactaccaaatcccaatggggagcaggagcggaggagggagtgtcagtggcagctgcttgctactcttccccttcctcctcttgctccacctcatctctcttcgctcaggcccatcggcggtgctggtgtcggcggcggggtccggcgagccgtacgtgggcgtgacgatcggcacgcaggtgacgaacctgctgtcgccgtcggacctggcgtcgttcctgcgcgcgcagcgcatcacccgcgtgcggctgtacgacgcggacccgcggctgctgtcggcgctagcggcctccggcgtgcgtgccatcgtgggggtccccaacgacgagctcctggcgctggggtcctccccggcgacggccgcctcctgggtgtcccgccgcgtggtccccttcgcgggcgtgaactccagcaccccgaacgtcgtctccgccatcgccgtcggggacgaggtcccgaccgcgctcccgtcggcgctgcccgtgctgctcccggccatccggtccctggcggccgcgctcgccgccgccaacctctcgtccatcccggtgtcgacgccgctgcccttctccgtggtggtggacccgttcccgccgtcgcaggccttcttcaaccagtccctggacaagtcgttcgtggcgccgctgctggcgcacctcgccaacacgtcggcgccgctgatgctgaacctgtacccctactactcgctgatgcagagcaagggcgtgatcccgctggacaacgcgctgttccggccgctgccgccgtcgatggagatggtggacccgaacacgctgctccggtacacgaacgtgttcgacgcgatgctggacgcggtgcgcgtggccgtgcggaacctgaacgcgacgggcggcgcgggcgtgccgatcctggtgacggagacggggtggccgtcgtacggggaccggcgcgcggagccgtacgcgggaagggacaacgcggacgcgtacaactcgaacctgatcaagcacgtgctggaggagaaggccggcacgcccatggcgcccggcgccggcgcgcagtccagcgcctacatctacgagctcttcaacgaggacctccgggcgggccccgtgtcggaggcgaactggggcctgttctacgggaacggcaccccggtgtacctcctgcacgtgtccggcgcggacgggttcctggggaacgacacgacggaccggaccttctgcgtggccgccgacgacgcggaccagaaggcggtgcaggcggccatggactgggcgtgcgggcccgggcgcgccgactgcacggcgatacagcccgggcaggcgtgctaccagcccgacgacgtgcgcagccacgcgtcgttcgcgttcgacgcctactaccagtcccagggccgcgccgccggctcgtgctacttccagggcgccggcatggtcaccaccgtggatccgagtgagtgtcatctcgcctttttttctgcctgctcgatcgtcaccatccgtgtttattactagtaagtacataataatcgcgcttcttaaatgcccgcctgacaaagacaaatgactagcgagctgtgctgtgcggaacgaaactgcccagtagcttctcgtgacagaagaagtgagtggtgttggtcggactagagggcaatagaaacgtactgtacgttttggtgtgggttcgagcagtaggagcgacgctattgtcacgcccaggaaaaagcaggtggtggcgctcattcaccgttcagtattgaacgcccgcgggggcggggcatggaaagttg

SEQ ID NO: 141652 - DNA, 1046 bp, Zea Mays
ggccgcgcactccattcccatcgcaccggcaccgctcctctcccggcctcccctttccatctcctccacgaaatctgcgcagctcacgctgacgacaccgaccgaccccgcagctgccctctatctagctgccctccctcccatccagcagcccaccccccacccacctcggacctgctgctccctccactcaccacccccggccgagcgaattgaagaagctccccctctgaactgaagcaatggcaggcggcaatgccggtggcgccgctcgagtcctgttctccatcctcggcctggcgctggcgctgccgctgctcgtggccggcgacgacccgtaccggttcttcacgtggacggtgacctacggcgacatctacccgctgggcgtcaagcagcaggggatcctgatcaacaaccagttcccggggccgcagatcgaggccgtcaccaacgacaacctcatcatcaacgtcttcaacaagctcaacgagccgttcctcctctcctggagcgggctccagcagcggcggaactcgttcgaggacggcgtggccgggacgacgtgcccgatcccgccgggctccaacttcacctacatcatgcaggccaaggaccagatcggcacctactactacttcccatcgctggccttccacaaggccgccggcgggttcggcggcatccgcgtgctcagccgcccgcagatccccgtcccgttcccgccgccggccgccgactacaccgtcctcatcggcgactggtacaaggccaaccacaccgacttgcggtacgtgctcgacagcggcgtggcgctcgggttccctgacgggctgctcatcaacggccggggcctgaatggctacaccttcaacgttcagcccggtgagtcgtagtagctacgacagactgaacagcacgaacaatgctgaagctccgacgaactatattatatcactgcaggccggacgtaccggttccggatcaccaacgtggggctggccacgtccctcaacatccggttccaggggcacaccatgaagctg

SEQ ID NO: 141653 - DNA, 2267 bp, Zea Mays
cattcccatcgcaccggcaccgctcctctcccggcctcccctttccatctcctccacgaaatctgcgcagctcacgctgacgacaccgaccgaccccgcagctgccctctatctagctgccctccctcccatccagcagcccaccccccacccacctcggacctgctgctccctccactcaccacccccggccgagcgaattgaagaagctccccctctgaactgaagcaatggcaggcggcaatgccggtggcgccgctcgagtcctgttctccatcctcggcctggcgctggcgctgccgctgctcgtggccggcgacgacccgtaccggttcttcacgtggacggtgacctacggcgacatctacccgctgggcgtcaagcagcaggggatcctgatcaacaaccagttcccggggccgcagatcgaggccgtcaccaacgacaacctcatcatcaacgtcttcaacaagctcaacgagccgttcctcctctcctggagcgggctccagcagcggcggaactcgttcgaggacggcgtggccgggacgacgtgcccgatcccgccgggctccaacttcacctacatcatgcaggccaaggaccagatcggcacctactactacttcccatcgctggccttccacaaggccgccggcgggttcggcggcatccgcgtgctcagccgcccgcagatccccgtcccgttcccgccgccggccgccgactacaccgtcctcatcggcgactggtacaaggccaaccacaccgacttgcggtacgtgctcgacagcggcgtggcgctcgggttccctgacgggctgctcatcaacggccggggcctgaatggctacaccttcaacgttcagcccggccggacgtaccggttccggatcaccaacgtggggctggccacgtccctcaacatccggttccaggggcacaccatgaagctggtggaggtggagggctcgcacaccatgcagaccacctactcgtccctggacgtgcacctgggccagtcctactccgtgctgctcaccgccgaccagccgggctacgactacgccgtcgtcgtctccacgcgcttcacgagccggatcatctccaccacggcggtcctgcgctacgccaactccgccggcagggcgccgggtcccctccccggtggccccaccatccagatcgactggtcgctcaaccaggcccgctcggtccggtggaacctgacggccagcgggccgcggcccaacccgcaggggtcgtaccactacggcctggtgccggtgacccggaccatccgcctggccaactcggcggcgaccatcggcgggaagcggcgctacgcggtgaacggcgcgtcgtacgtgggccccgacaccccgctcaaggtcgcagactactacaagatcggcggcgtcttctccgtgggcaccatcgccgacagcccccccgcctacggcggcgccgcctacctgcggacgtcggtcatgggcgccagctacagggactacgtcgaggtcgtgttcgagaacggcgaggacgaggtgcagtcgtggcacatcgacggatacgccttctgggtcgtcgggatggatggagggaaatggtcgtcggcaagcaggcagggctacaacctgagggacggcgtttcgcggtacactgttcaggtgtaccccagatcgtggacggcgatttacatgcccctggacaacgtgggcatgtggaacgtccggtcggagaactgggccaggcagtacctggggcagcagttctacctccgcgtctggacgccgtccacgtcgttgcgcgacgagtaccccatccccaagaacgcgctcctgtgcggccgggcggccggacgccggaccaggccgctgtgagagtgacactgccgccggatcattcacagcttttgtcatgagaggatgacacactattggtttggtctttggagaagagcaggaacatacacaagtttatataccctcaactgaagggaggttcagaggaacgaaagtgttgcttgccgattttttttcattttagtttttttttccctttaaagtttcatatttacgtctctgctgaactaaaaccgtgttggaatttctgggtcaacactataacttatactccctccgtcccaacatagtatttgttttagagtgttaacggattcatacaatatttgatgtatgtgtatcatacatgtgtctagatttaccgttatctatttaaatatggacaaaaagaaaataaaaaac

SEQ ID NO: 141654 - DNA, 2341 bp, Zea Mays
tccacgatgccaccaccaccgccgccccatcacagcccagccatccaacggccgagcacgaccggatcggacgtgcccctgaatttccaccgctgccactaccaaatcccgttttttaaaatcaaaatacaaggctcccttcttccagtcccccgtgctccggctccccttcctccgcatgttcccacctcctgcgcggccccgggtcactgccaggtaggccacaccatgcagccgccgcagtcgctggtgtcccgcgcgcgcaccgcgatccactccgccgccgcccgcgtgctcaccgacatcaaggccgacctccgagatgccgaaggatccggcgggcgtagccgggcgccgtcgccgaggacgtctctggatcgggaggccgccgaagcgagcgccacggggcgggagccggacgtgaagccgccgtcgccgcgtgatgaggtcctagaaataagccccccagagaacgaggattcctcaagcataccaactgaatcaacctgttcaacaaaactgacctttcctccagcttcaatagttaaacaactggtgtctgccattgaaaatgggaaaagtttcaagtcaatgagtgatatgaggtatactggagaacaattgctgaaagataagggaggtttgagcttgtctgttgttaaatcacttgttcgacgtgacaaggaagaaagatcgagctccgatttttttggtgatgaagaaactcaatctttgatgtactccttgttcaaattagaggaacagttttccttcgaagcaagtcaatgtttccctgaattggttcattcaagatctgtgtccaaggatctacatggtgcaccacctggaagttttattcaccatttagcagtggttattggcagcattagttctgtgcacaagatggcatttttttggcagtcagttgttcttgagttgaggaaactatggtctgattggcaacctgtgcctcgtatgccactggaggttgctccagatttgaattcttgtttactacatcaggaaatccaagttgtaaattgctgcattgccaggaaaaaaagaagaaaagcagctaaggagtcactggattccttgctaaatcaggcaagtattggtaaatcagaacccaggttgtcagaagcgaagtttcctgacagcgagatgtatgcaagagataatactggtgattatgtccttcgacttggtgctgaccagtcatctgagaacttaacattgctggaaactggtgagcctatctattccccgacactgcaggaaggccccatcatgacagcagagcttataaaagaaacagaggagctagtcttacggacaggaagtcttggtgctggatgctctcaacttctatcagatatgcaggctttcaaggcagcaaatcctggttgtgtcctggaagactttgttagatggcactctccacccgattggtctgaggattgtgctgcaaacagtaccacagttggggaaggctcatctagacgtgggcggttaagtgataggatgcaaacaaaagaaggtaacttgtggaaggaactgtgggaggctgcaaaacctatacctgctgttgaacaaactcctatatatgatgaagatttagctgtggagagcatctttgatgctttggaggttattgagccatcaaaactgtttgagcagctacttggcgtcattctttctgtatgctttgtggcagcagaatcagttttagcagcagatagcaatctgtcaaaattattctacgattgcaaggactacataattggcgtttaccacaatgacatgtcaaaagatgagctagatgagatgtacaaggtgtacgagacgatggaagccatagtaacccaccctgaagaagctctccagatcatggagcaacctgatgagaagtctgttgacaataaaaaccgcttcacgctgaagctcaactttatggccaaagatcgcccgccgctctggaagcgcacgacaaaggacgacaagatttctcaaaaggtcgagaagaatacgtcagaggaaaagaacacgaagatattctccaacctttttgacaagaaggtcagcatattttcaaagaagaatgtgagatcgtcggaggtgccaccggcatccacttcatcttcttcgccagggccatttgacgagagtgagtggacgattttgtagttggaactcctgtattgtttcttttgtacaacatgtagaggggggggtgccccggagatgtcgggaataatcttaagctgtacatattcagtctaattcattgaacattttgaaataaattgaaaatataaaaattccatgtggtctgagcatc

SEQ ID NO: 141655 - DNA, 923 bp, Zea Mays
ctatatattgcgcgctccctagctcgccaatggggggagacgtcactaaacatcggagttcaagctaaccaggcgccaacatatactgcgttagaccttagacgacggccatgtctagcgctagacacactgccgtcttccttctccttcttggcgttgtttatgagctgagcaccgttgcacttgccaatttttacattccaaagttcggtggccatggtgttttcggacgccgttgccggtttggctttggaggagatatagggttcggcggaggtgctggaggtggtttcggtggcggtggagggctcggtggtggcatcagccatggtggcgggtttggagcgggtggtggattgggtggaggaggagggtttggaggaggccttggtagtgggtttggtgttggatcaggcatcggtggtggcggtggatcagggggaggccttggaataggacatggaggaggctttggtggtggaggcggaggtggaggcggagggggagggggactcgacggtggccatggtggtggtttcggtagcggaggtggagttggaagtggtgtttacggcagtggaggagggtttggaggcggcggcggaggaggccttggtagtgggcatggtggaggctttggctctggactgggtgtaggaagtggtagtacacatgaaggtcttgatggtgttggaggcatcgggggtggcggaggacttggtgccgggtatggtggaggttttagcgcaggagcgggtataggaggtggcattggaaaaggtcttggaggtggaggtgggtatggcggcggcttcagagctagtgctagtttcgaaggcagtgttggtggaggcggcggtcattgatagggcagacaaacaagcatggtgttttgtcttgttgtgtttcatgacgtacgtgga

SEQ ID NO: 141656 - DNA, 407 bp, Zea Mays
ggtggacttccggatcgttcttagggattttgcccgaacttcggtagaggcacctgatctttgctttgggaaagaagggatgtagcagcacggccaccacacttttaaataaaggaataactgtttattaatgatgttaaacaggaagggtcaagtctagggaattattacattctaatctttcatggtagttgaactgtttagtttggtgggctgagatgtctatcttttgtctggtcatgaatgttcttttctaccgttgcattttgattatactatggcaattatctttcttttatatcctgtataaactatatgcttcccttgttatgctactttcaagggaggtgctgccggattttgcagtactttctttctctatgtgttgcatgagtcttgtagaaagg

SEQ ID NO: 141657 - DNA, 91 bp, Zea Mays
tcgacgacactcggcaaatagagatcggcgaactgtacatcggcaacggcttctttgccgattactttttattgccgagtgtcactcggta

SEQ ID NO: 141658 - DNA, 91 bp, Zea Mays
aataccggcaaagagtggatgataccgatgaagttgattggaagcgtcgtctttgccaaatactccatttccctttcaattctatgactaa

SEQ ID NO: 141659 - DNA, 1975 bp, Zea Mays
gccactgttcccatcatggcggtggccaagaagcctacccgcgctctccctcatctcctcctcgtagccttcctctgcttgacgtgctctgtttgtgctcgcttcgacgatgactacgacgactcgaggtatggccctggaggtttcggtcgtggtccgggctttgatcgtggcccgagaggtggctaccgacgcggtccggacttcggacgtggaccgtttggtcgtgactgtcgcttcggtcgctgccgcagaggtggtggcggacttggaggcggtggaggcggtggccttggaggtggtggaggtggcggacttggaggtggcggcgggcttggcggtggaggaggtggtggccttggaggtggtggcggacttggaggcggcggtggaggaggtggtggccttggtggtggaggtggcgctggtgctggaggaggttttggtggtggcgtcggaggaggaggtggtgcaggaggcggacttggtggtggaggcggtggtggatttggaggcggcggaggcggtggactcggaggtggtggaggcaaaggtggcggctttggtgctggcgatggcatcggaagcggagctggtggtggcagtggactaggtggtggaggcggcggtggaatgggtggtggcggcggcggtggcctcggaggaggcgcgggaggaggcttcggagcgggtggcggcgtaggtggtggagccggcggaggtggtggccttggtggcggtggaggtggagggcttggaggaggcaagggtggaggctttggggccggcggtggtatgggaggtggcgcaggcggaggtggcggacttggtagcggtggtgggcttggtggcggtggagggcttggaggaggcaagggtggaggctttggggccggcggtggtatgggaggtggggcaggcggaggtggtgggcttggtggcggtggaggcggaggttttggaggaggtaagggcggaggctttggagccggcggtggtataggaggtggggcaggaggaggcggggggcttggtggcggcggcggtggcatgggcggtggtggtggaggcggactaggtggtggttcaggaggaggattcggtggcggggcaggcggtggcgttggaggaggaggcggccttggtggtggtggcggcggaggtatgggcggtggaggcggcggcggccttggacatggcgttggtctcggtggagggggcgggggcggcctcggcatcggcattggcgttggcgtcggagtcgggttgggcgcgggggcaggcgcaggcgcaggtggcggcgctggtgcgggtgctgttgctggaaaccgcgggcgttgattcatccgtccatgtccagtttaaagaagaacgcatccatgcaagcatgtgtatgttcggcgctggagtagctatgaattactctatgacgtggttaaattatggttaatttcactcctcctgtttttggttgctgtgtagtctttgctcattattattggtgcaagtgtttgcaataaatcttatatactcttgggaaaaaagagtctaatggttagtagtatattaatacagttctagtgattttttttccatgtaattcctggcttccaggcagcttgtttgagcttcgcgttcgaagggtctcccactgtgtgcactatggcctttctgcgtttccttcctccttccctgcaatttcctgatgaatctctctgcaattcctctggagtatttaatggtgtgtttggtttgatgtcaaagtaggatgagtcggggacaccaccgtcctctcgattttttgagatcatgccgccctcaaaaatcattccggtgttcacctcgtccccgcttgactctcaactaaacactatgaaaaacgtgaccgcctcattccatctctctttgtacattcaaccaaacgcaccaacacgacggttcgggaagtggcttgattgcattggagggcttcaga

SEQ ID NO: 141660 - DNA, 1345 bp, Zea Mays
ccggcgctcatcccctcctgctgctcccccgccggctgctcccctccctgctcccccgccggtgagttctcctcccccgtcggctgctcccctccctgctcatccccctcccctgctttcctcccctgctgaaactgctttcctcccctgtgcagtgtacaagtgaaagaaatcaaaggattaaggtttaaggatgtcatcagaaactgcagctgcaccttctgaaactgaagcagctagagcgaatctcctaaaaagaaattcagatgatgttggatgggaatatggtgttcttgttgatgctaacaacaaagacaaggtgaagtgtaagttctgtgacaaggagatgaggggagggatttataggttgaaggagcatcttgcccatgttggaaagaatgtgaagaaatgcacgtctgcaacaccgcaggctctagaggctaaagagaagtgcaagaaagcaatagtggctgcaaaaaggaagagggaggagaagactattcgtgagctagaacttagagaggaagtgaatgtatctagggttggagaggagtcagaagaagtcacttgtgttggaagctcacagcctcacaaattagggccaattgacaaatggacacgtgctattgatcctaccaaggctgattcattcaaacaacagcagctgaacaaggaattatggaaagaaagagagcatgaggtgcacaagtttattgcaagatgggcctataatcatggaatacctttcaatgcatgtgacaatgatgagttcaagcaaatgtgtgaagcaattggacaatttggaccaggacttacacctccaactcaagatgcctttcgaggtagtttgctggaagaagaatatgaaagaaccaagtgtttgctgcaggaacgtgaagccgagaagatgaaaaatgggtgctctattatgaccgatgcttggtcagataggaagaggagaagcataatgaaatcatccagataagtcacaatttagtgttttctatttttttatgaacagctagctgtctattgactaatttactaactactagctgtcaaaatgtgttgcagccttgcaggagctagaaacatgcaagagtaagctaagctaggaatcagatatgtctactggccttctttttatacttactgtgactcatatagtcatctatagtagttatatacgtatatatagttatatacataatatatatataatttatggctatattgccaaaacgcctagaaaagcgcctagaagcgcctaagaccgagtactcccgactaggcgctaggcaatgggtcaccgcctagattccgcctagcacctagctgaaccttg

SEQ ID NO: 141661 - DNA, 177 bp, Zea Mays
ggatccagggctatgagccccaacacgccaccaccggtgataccaacaccaccaggaggagcttatggaggggagggagctactacagaagagaatccaaaccagataaacgactttgttaacgacatgttcgcttctggaggtagtggtcacagttcaaacgacccctatacgtga

SEQ ID NO: 141662 - DNA, 3125 bp, Zea Mays
ttccccgctccgctgacccggccagccacaacccacaaatggaagcgggctccttccccagcaagttcccgccaattcccgcgggcgacaaaacctagtatcctaccaaatctccgccccaaaatcccccaaaccacccttccaatccccagtcctaatcactccacccactcggccgcttctcctttcctcccgcgccaccgccttcgcgccgccatgacgcgccgaggcaggaacccctcctccagtgaatcgccgcctaacctgaaacccccatcgctaacctagcattttccgcgggaaccctaaccatcgtcgcctccattgcaggatccagtagcggccgccggcgccgccgcgaccaggaggatgaggacgacctcccctctgacgacacctccgacaccgatttcgtcgccgactccggggacgcggtggagaacgacgacagcgacgaggagttcgcgcccgataaggacaccccgcccgcgcccgcggtgcccgaggcggccctgccgccgccggtgccgatccggattaagaatcaggcgcggaacaggagggagaagaggaggcgaggtaagaaggcgaggagggacgcgccgcccctgccatgggaagagtggcaggtggcaaacgacagttggctcgacgagcggaacgcagccgacgggggcgtcgaggccacggacgccacggtggcggccgtgccgaccgcggacccggccccggaggtggtgctccgattgctgcgtttccagaaggagtggctcgcttgggcgctcgcgcaggaggcgtccgtcacgcggggcggcatcctcgccgacgagatggggatggggaagaccatccaggctatctcgctcgtcctaaccgcgcgccgcctccggcccccggaccatcactccgccgcctcctcgtccaactcctcggtgggccgcaccaagccccaggtcgggtgcacgctggtcgtctgccctgtggtggccgtcatccagtggactgaggagatcgaacgccacactgctagtggcagcgtgcgcgtgctcatctaccacggtgccaagcgtgtcactcagagtttcgatttcaacagctatgactttgttatcaccacctactctaccattgaggcggactaccggaagcacatcatgccgcccaagactcggtgccaatactgcaataaattgttctaccccaacaagatgaaggtgcacttgatgtatcactgtgggcctaatgctaaacgcacagaagctcaggctaagcagcagagcaagaggaagtgggacagcagcaaggaaaaggtgaaggagaagaggagggttcataagaagggtgatgaggtgaataaggattttcaagagttggctgatgaactgggcagacagttaaggggccaatctcctctgcattctgtgcggtgggagcgtgttatcctggatgaggctcacttcataaaagatagacgatgtaatactgcacgggctgtttttgcattggagtcagaatgcaagtgggctctgagtggaacacctttgcagaaccgtgttggagaactttactctcttattcggtttttgcaaatcttcccctactcatactatttctgcaaggactgtagctgtgagatactagataccagtatgaagaaacaatgcgactgtggtcactcatctgttaggcacttttgctggtggaataagtacatatcaacaccaatacagtatgggtcaacaagtttcgaaggaaaaagagccatgactcttctgaaggaaaaagttctgaaaggcatagtgttaaggcgcacaaagaaaggccgagcagcagatcttgctcttccaccaaagattgtgacattgaggcgggactcttttgataaaaacgaaatggaattctatgaagctttgtacactcagagtgtcacacaatttgatgcatatgtagatgctggaacactgatgaataactacgctcatatcttcgatcttctcacaaggttgagacaggctgttgatcatccctatcttgtagcatattctaaaacagcaggacatcctgaaggaatgaagaatgaaggaaacgagtccatggagagccaatgtggtatatgtcataatttggctgaagatgttgtggttacctcttgtgatcatgcattctgcaagacttgtttgatagactactctgcagctttggggaatgtttcatgtccatcctgttcaatacctctcaccgtggacttaacagcacaaaattcagttggaaaagtaactcgaagtgtcaagggtcgcaaatgttcaggaatattgagcagactaccaagccttgtggattttaagacgagtacaaaaattgatgccttgagggaggagataagaaacatgattgagcacgatggttctgccaaagggattgtcttcagccagttcacatcattcttggatttgattcagttttccttggagaggtccggcattaagtgtgtccagttgaatggagccatgaacattaccgaaaagggaagagccatagacaccttcacccatgatgcagactgcagggtcttcttgatgagcttaaaagctggaggagtcgctctgaatctcactgtagcatctcatgtgttcctgatggacccttggtggaatccagcggtcgagaaccaagcgcaggaccgtatccaccgaattgggcagttcaagccaatcaagagcactaggtttgtgataaaggacacggttgaagagcgcatactgcaactgcaacagaagaagcagctggtgtttgaaggcaccgtgggggactcgccggatgccatgtcgaagcttacagaggcggacctcaagtttctgtttcagatctaaatgctgacgtagttaagcatgagtagggagggccaggctatgctaggactaggagcactgacttgttggaagttggaaccctgacgctgccataacaccaggacggacggggtcggcggtgcgtagatcgactgctgctgtgcctgttggaactgatgtacttttgcagtgtgtgtaacatcgatggcagcgactagcgaggctttccgttggagtagcccgtttgggaaagaacagaacagggtgttgtaggcc

SEQ ID NO: 141663 - DNA, 4589 bp, Zea Mays
atgccgcggacgccgtcgctatcgccatcgccgtcgccgtcgccggagaggcaccagcaccagcccgcgcgccggaggggcggcgcagccccgtcgcagctggcactccaccaccaccaccaccaccgcggcggacactcgccgtcgccgccgccccgccgctcgctccgcccgcgccgcgccgccgcgccctcctcccgcccgctcgtcgacgacttcttccccttcccctcctcgccgtcgtcctcgcccttccgctcccgccagcgggggccgtcgccggagccgtccagctccgactccggcgctgacggtggcgccgcgggctcctcggtctccgaccggcgccggcgcaagctcaagctcgtcgtcaagctctcccagctgcccccggaccagctccaacgccgggccccacctcccccgtcgtactctgacgactccgatgggaccgaggacctggccggggacggaagcggcgacgaggagcaggtcaagccgcccaagaagcgccggatcgagccgcgcgccgacagatctcgccatcgcgagtttggtggtggtgggaggagcgaccccacgagcgcgccgcggacgaagcggccttcggtgccagggactgcgaggacgacgccgctgccagaccagaaggcgctggagatgattcttgagaagcttcaaaagaaggatacctatggagtgtttgctgagccagtggatccagaggagctgcctgattatcatgatgtgattgagcacccaatggacttcggcaccgtcaggaagaagcttgccaggaatgcatatcgctcgtttgagcaatttgaggacgatgtgttcttaatttgcagcaatgcgatgcagtacaatgcacctgatacaatttacttcagacaggctcattccatacaggagctggcacgaaagaagtttcaggaactgagggatgagggcataccaacagaaaacccgattaagattggacagaaaattagaccaaatttctgcactggagcactggttaagaaacctgttttgaggtatccagatgatgatatagatttgtcccacaaagagaaagttaagagacccaattcaaataatgtggatgatgacatgagcttcaaaaatcaagttaaaaaaaccatgtccaagaattcacaggatcgaagttgcttattacagaaagagcgaattaagaaacccattcccaggaattcagaggacaatttaagttcctcattccacaaagagcgacctaagaaactgatctccagacattcgaaggacgacccagactccccatctggcaaagagcaagttaggaaagtcatttcaaaaaatttagaaaatgatgaaagctccccgttccacaaacatcaagtcaagaagtccactccacagagttcaaaggacgacttcttatcccagaaaaaacacattaagccaattggcagaaatggagaagatccaggtttttcatcccgcaaaaagcccattgaggatccagttcgcacaaatgttgaagatgcaggcttctcatctacgaaaaggctgtctgagaagcccatcagtgtaaacggagaagaggatcgtgaccattgtcatcaggagtcatctaaggaaccgagttgcggagttgagcaggatggtcaaggttactcatgcgatgaagaggctgtgaaaaagccagtttgtatggatagccacgatgcccaaggttcagatatctctgctgccactattgcttctgtgggagatggctctaatggtttaagcatgtcacagcctaatgccactgaacctactggttgtcctcttaccaatggggttatagacaaagacatcagctctccactagatgaaataagatctgagaagactgacgatattttggccaaacctagctacaagccaattgtggtagacgaaacgagacggaaaacttatgatgcatctgaagaacagcctctgatgaaatctgatccagtttttgatgttttctctgcggaaccaaaagagctcgtgaatgttgggctcgatgctgaacactcatatgcatatgtaaggagtctggctcgttttgctggttcgcttggtactcaaggctggagaattgcttctgaccgcattcggcaagcattacctgctgatgtaaactatggtcgtggttgggttggagaatatgagcctccattaccgtctattcttgttgtgaatgatcaacctagatacccgaagagctctgagacaaatagacgaaggaatgctcctctgcctagggataatgaaaggttcagatcaacagaaactaataatccaaaggatatgagacgggtagccacttgcaataatgtagttggagtggctggaccactagagagtccagaaattaagccaagattatttggtgttaccactgagcctcaacacaggagcacagacgcgttatcactgcacgagaaccacagagtgtctggtaatgtcgcaaagaccaaaagaacaacgaatgagcaaacaagaaaaggcaattcatcttctagtgcccgacctcttgaaatgcagctacagaaaggagcttcttctggcgcgcttgatatccctgccccaaataaaatggctggccagcctagaccgtttttgcaaccaccagaatcaactagagctcagcaaatgaaaaagattgactcatcaaaaagcaaaattccaattgaaatggcaccacagcaagttgagtgtgcaaaagatgctgattctagtgtgcatgatactccttcctcaaatgggcagcctaaacacttcttccagtcacaagcagcagcttcctctggtgtgcatgatatgcattcctctaacgggcagtctaaacactaccaatcacaagcagcagcttcctctggtatgcatgctatgtcttcctctaatgggcatcctaaacactacttcaagtcacaagcagcaccttcgtcgggtgtgcatgatatgtcttcctccaatgggcagcctaaacattttttccaatcacaagcagtagcttctggtgtgcatgatatggcctcaaacgggcagtctaaacccttgttccagtcccaagaagcaactgtactacagcccaaaaatgaagcaacatgggtgtaccatggacgacctggtgatggaaaggttggaacatcaaaaaaaagcagaccatcgacaagtattgggttcatcactaaaaatcaatcaataaatgctgcaaaatttgccatgaatttgaatggccaaagtattgtcagtgaccatacaaaatcagcaggcgcaaccgctatgcctgcccaagcaaatataccaaacagaggtcttgatgctcctcggaacatattctcagcatttccagctaatgttagggagaaccagagcattccatcagctccagtggctcaatcttggatctcgtttggtgctgctacagagaacaaaccaaccattgtcagcccagctttcgttgacaataattgtggctggaaaatgccatttgctaatgtccaaccttgtgatgataccaaattaagcgttgttcctcagttctttagacatcctgttcaggtagttagagagaactcggttcaaaacaaggggctggtaatatttccccagttggtgcagccagatttcgcaagatcacaagggcaaccacagtggcaggggctgtttccccacatgcaacagaagccaggcaaggatgtactccgcccggacttgaacatcgggttcccatctccaggttcaccaccagctcgacaatcgtccggcatcaatttggaagcacagcagccagacctcgctttgcagttatgatctgggaaaagacaatgaaaacttcatacggccaggccaggatttatgctataatctctaagcatgtgaaggcatgaggagctcaggtgcgaaacaaggcgagaacagcattgggacatccgggacatggatcggtgatgattgattgtgatgttgactttacatgccatatggcgtcatcgcaactcatcaactcatcgcgtcgatgtacgacgatatcagaaaatggatggatgaacactgcttgaaatgagatcatgtctacttgggggcattctgacaggagttaagaatccagcatttggggaaatgctttggtggcatgcatgtaggtagcacactagcatgcccatgatctgaaaacttggggcgcgcctctctgaccacgatacagctttcttcggtggaaattttggcaccagaatttagaatttagaatttagaatataagccgttcattcggtagtgtaggtcctgtggtcacccctatgtaatgtaatgcccataccaaaatgaatgttggctgtaaattgttctgtgttgaatagattgttagggtagggcagtggccagtggccttcacacctcttctgaatgaaattgcttcttttgttcatgatgtatgtagcaggaaaccaggaactgtggtctccgttcagttcaaatggcatgctgaatctaaagaggtcattaggtctcgtgaagatgcactggttcagtttgtccttgcattggattttttctagctttaa

SEQ ID NO: 141664 - DNA, 805 bp, Zea Mays
atctcggcgctcctaaatgcaacgcagctctgcattcagctcactgaccatgctcgccgtccatgcaggttgcaatcccagtggtgccgacagtgagggtggtcatcactttcaccaagttcgtgcccctcacggagccagaggagttcttcaccccgatgtcgagccccagcctgctggcgagcccagggccagggagcatcacggcgaagcccgacgcccacaagagcagctcgtacctgaggtggggctcgaagaactcgagaccgaaggccgtgaacctgtcgcaggtcgcggacaatgccgaccccttcacggtgcccagcgactacgcctgggtgaacagccttgggtccaagaaccacgacaagaagtcggccaagtccaagaagggcaagagcaaggaaacctgaacaaactcatccagtccagcggtgtattcactccgcgagaaccttgtatgcatgcgtaagccgtcatcggcccagaaacctgtaattaccaagtgccagcctgggacatgcctcgacgtttaggccgggcttgctcagcgacgataagcgtggcggttttagctgccggggacggaagagttcagagagtgttaaactaggcctccatttcaactgattgttcagcaatgtgatgtgttgtaaaacttggcaccaccaaaaaatgcaatgattcctctggtagttctggcacacacacacacacacttctgttatttagttgtatctgtatatctccctggtaaggtctgtggatgaactggaagaagaggagcaaggcactgaaacagttc

SEQ ID NO: 141665 - DNA, 941 bp, Zea Mays
ctcgcgctctctctctctctctcagtctctctgacccccaagattcctctgctcctccatctccatggctgtcgccggcttgccgtgcttcccgctctctgccgccgccgccgccccagctgtgcggctggccgcgaggccaaaccggcagcgaccaccccgacgatggacgggtgccgcaccgtcagcagaccgtggggagatgggcaacgacgacggtggtggtgaggcgttgccgccaggtcggtccgtcgtcgtgacgactacaaagcccgccgcagcagaactttctgtgaaggggacatcgccttcgcttattcggtcattggatactaaaatgtgtgatgtttgtgtggcatatcagggatcacctggtacggtcattgaggcatttgtgcttaaagctttcccagaatgtacaacagttcccctccaaaggtctgaagctgcgcttgaggctgtcgagtcttcacttgctgacatagctattcttcctatcgaaaatgcatacaccggaagcttccataagagctatgacatacttcttagtcatgatttgcaaattgtgcaagaagtacaaatggatgtagagctatgtcttcttgctttacctggagtgcataaggatgatttgaagacaattttcagccatccacagtatcttgctcaatgcgaacattccatttctggtttgagtgtttcaaagaaaaacgtggatcatggagttgttggtgctgagattatatcaaagcagaatttaagggattctggagttatatgcagtgctcgagcagcagaattgtatgggcttaacatcttagaatgcaactttcaggatgaatcacccaatgtcacaaggtacctagtattggcaaaaactgctaaccttcccaaagaacacgaccaatacaagacaagcgttgttttcggtctcgaagaag

SEQ ID NO: 141666 - DNA, 685 bp, Zea Mays
attctatgatctaatagtttatctttctctctctctcctgcagggacatcgccttcgcttattcggtcattggatactaaaatgtgtgatgtttgtgtggcatatcagggatcacctggtacggtcattgaggcatttgtgcttaaagctttcccagaatgtacaacagttcccctccaaaggtctgaagctgcgcttgaggctgtcgagtcttcacttgctgacatagctattcttcctatcgaaaatgcatacaccggaagcttccataagagctatgacatacttcttagtcatgatttgcaaattgtgcaagaagtacaaatggatgtagagctatgtcttcttgctttacctggagtgcataaggatgatttgaagacaattttcagccatccacagtatcttgctcaatgcgaacattccatttctggtttgagtgtttcaaagaaaaacgtggatcatggagttgttggtgctgagattatatcaaagcagaatttaagggattctggagttatatgcagtgctcgagcagcagaattgtatgggcttaacatcttagaatgcaactttcaggatgaatcacccaatgtcacaaggtacctagtattggcaaaaactgctaaccttcccaaagaacacgaccaatacaagacaagcgttgttttcggtctcgaagaag

SEQ ID NO: 141667 - DNA, 1790 bp, Zea Mays
gagagaagagagagaggaagggaaaaaaaaatatctgctgcctccttgcggcgctttgccattaatttagtcagcatcacatcgcaatcacaagactcctatacccaaacccacgccccccaccccctattattctatatatataatacacacactagtgtagtagtgtggagtacttcaattggcgttggccgaagaagaggagaagcgaagcaagcaggcttcgagaacaagggggagggggaggaccaagcgaaagggggaactagagcaagatgggcggcgaactgctgcttgcgctcctcctcgtctctgctgctgccgcccctcaggtacttggagttggcaatggagacaatcacatgagaatcatccaggaggacatcattgagacagtcaacaaccatcccagtgctgggtggacagcctcacgtaatccttacttttcaaactataccattgcgcaatttaagcacatacttggagtgaaaccagcaccacagaatgcactaagcaatgttcctgtcaaaacttattcaagatcactggaacttccaaaagagtttgacgctagatctgcatggtcccgttgcagcacaattgggaacatacttggtaggtttatttggttaactcggtgcattttagctgtatatctattttagttgcccgatggatactcatttcttgtttgaatttttcaatcctggataaccctgatcttcatgagcagatcaagtaagttcaacagtctagcatatattattagtgcctaaaagagcgatgcaacatgcttgtagtataatgtcttgtctgatgacaacagggtcactgtggctcttgttgggcttttggtgctgtggagtgcctccaggaccgtttttgcattcacctcaacatgagcattttactttcagtcaatgacctactggcatgctgcggttttatgtgcggcgatgggtgtgatggaggctatcctatagaggcatggcgctactttgttcaaaatggtgttgttacggatgagtgtgatccatacttcgacccggtcggttgcaagcatcctggatgcgaacctgcttatcctacaccaaagtgtgaaaagaaatgcaaggagcagaaccaagtttggcaggaaaagaagcatttcagcattgatgcgtacagaataaattcagatccacatgacataatggcagaggtctacaaaaatggtcctgtagaagttgctttcacagtttacgaggttagtaaggacatgacaaaagcggaacaagagaaacacaagccaaaaaacaaatctggatttcgcacactacaaatctggagtgtacaagcacatcaccggtggcattatgggtggccatgccgtcaagttgattggatggggaaccagtgatgctggagaggattactggcttctggcaaatcagtggaatagaggctggggcgatgatggatacttcaagatcataaggggcaaaaatgaatgtggcatcgaggagggcgttgttgctggaatgccatcgacaaagaatatggttccaaacttcggcggtgccgttggaagagctatagtttaattggttacgtttgcatggcctcaaatgctgttggaattaactaaagtaattttaaaatgcaattgttaaatggccacgatggtgtatgtattttgtacactagctcattccaaaggtcgttatgttgctgatgccacatcactttggtcaagtggaataatattaataagaactagaatttcgattcgaatgttacggtttcaagtc

SEQ ID NO: 141668 - DNA, 1682 bp, Zea Mays
gagagaagagagagaggaagggaaaaaaaaatatctgctgcctccttgcggcgctttgccattaatttagtcagcatcacatcgcaatcacaagactcctatacccaaacccacgccccccaccccctattattctatatatataatacacacactagtgtagtagtgtggagtacttcaattggcgttggccgaagaagaggagaagcgaagcaagcaggcttcgagaacaagggggagggggaggaccaagcgaaagggggaactagagcaagatgggcggcgaactgctgcttgcgctcctcctcgtctctgctgctgccgcccctcaggtacttggagttggcaatggagacaatcacatgagaatcatccaggtcacgtaatccttacttttcaaactataccattgcgcaatttaagcacatacttggagtgaaaccagcaccacagaatgcactaagcaatgttcctgtcaaaacttattcaagatcactggaacttccaaaagagtttgacgctagatctgcatggtcccgttgcagcacaattgggaacatacttggtaggtttatttggttaactcggtgcattttagctgtatatctattttagttgcccgatggatactcatttcttgtttgaatttttcaatcctggataaccctgatcttcatgagcagatcaagtaagttcaacagtctagcatatattattagtgcctaaaagagcgatgcaacatgcttgtagtataatgtcttgtctgatgacaacagggtcactgtggctcttgttgggcttttggtgctgtggagtgcctccaggaccgtttttgcattcacctcaacatgagcattttactttcagtcaatgacctactggcatgctgcggttttatgtgcggcgatgggtgtgatggaggctatcctatagaggcatggcgctactttgttcaaaatggtgttgttacggatgagtgtgatccatacttcgacccggtcggttgcaagcatcctggatgcgaacctgcttatcctacaccaaagtgtgaaaagaaatgcaaggagcagaaccaagtttggcaggaaaagaagcatttcagcattgatgcgtacagaataaattcagatccacatgacataatggcagaggtctacaaaaatggtcctgtagaagttgctttcacagtttacgaggatttcgcacactacaaatctggagtgtacaagcacatcaccggtggcattatgggtggccatgccgtcaagttgattggatggggaaccagtgatgctggagaggattactggcttctggcaaatcagtggaatagaggctggggcgatgatggatacttcaagatcataaggggcaaaaatgaatgtggcatcgaggagggcgttgttgctggaatgccatcgacaaagaatatggttccaaacttcggcggtgccgttggaagagctatagtttaattggttacgtttgcatggcctcaaatgctgttggaattaactaaagtaattttaaaatgcaattgttaaatggccacgatggtgtatgtattttgtacactagctcattccaaaggtcgttatgttgctgatgccacatcactttggtcaagtggaataatattaataagaactagaatttcgattcgaatgttacggtttcaagtc

SEQ ID NO: 141669 - DNA, 1732 bp, Zea Mays
gagagaagagagagaggaagggaaaaaaaaatatctgctgcctccttgcggcgctttgccattaatttagtcagcatcacatcgcaatcacaagactcctatacccaaacccacgccccccaccccctattattctatatatataatacacacactagtgtagtagtgtggagtacttcaattggcgttggccgaagaagaggagaagcgaagcaagcaggcttcgagaacaagggggagggggaggaccaagcgaaagggggaactagagcaagatgggcggcgaactgctgcttgcgctcctcctcgtctctgctgctgccgcccctcaggtacttggagttggcaatggagacaatcacatgagaatcatccaggaggacatcattgagacagtcaacaaccatcccagtgctgggtggacagcctcacgtaatccttacttttcaaactataccattgcgcaatttaagcacatacttggagtgaaaccagcaccacagaatgcactaagcaatgttcctgtcaaaacttattcaagatcactggaacttccaaaagagtttgacgctagatctgcatggtcccgttgcagcacaattgggaacatacttggtaggtttatttggttaactcggtgcattttagctgtatatctattttagttgcccgatggatactcatttcttgtttgaatttttcaatcctggataaccctgatcttcatgagcagatcaagtaagttcaacagtctagcatatattattagtgcctaaaagagcgatgcaacatgcttgtagtataatgtcttgtctgatgacaacagggtcactgtggctcttgttgggcttttggtgctgtggagtgcctccaggaccgtttttgcattcacctcaacatgagcattttactttcagtcaatgacctactggcatgctgcggttttatgtgcggcgatgggtgtgatggaggctatcctatagaggcatggcgctactttgttcaaaatggtgttgttacggatgagtgtgatccatacttcgacccggtcggttgcaagcatcctggatgcgaacctgcttatcctacaccaaagtgtgaaaagaaatgcaaggagcagaaccaagtttggcaggaaaagaagcatttcagcattgatgcgtacagaataaattcagatccacatgacataatggcagaggtctacaaaaatggtcctgtagaagttgctttcacagtttacgaggatttcgcacactacaaatctggagtgtacaagcacatcaccggtggcattatgggtggccatgccgtcaagttgattggatggggaaccagtgatgctggagaggattactggcttctggcaaatcagtggaatagaggctggggcgatgatggatacttcaagatcataaggggcaaaaatgaatgtggcatcgaggagggcgttgttgctggaatgccatcgacaaagaatatggttccaaacttcggcggtgccgttggaagagctatagtttaattggttacgtttgcatggcctcaaatgctgttggaattaactaaagtaattttaaaatgcaattgttaaatggccacgatggtgtatgtattttgtacactagctcattccaaaggtcgttatgttgctgatgccacatcactttggtcaagtggaataatattaataagaactagaatttcgattcgaatgttacggtttcaagtc

SEQ ID NO: 141670 - DNA, 1526 bp, Zea Mays
gagagaagagagagaggaagggaaaaaaaaatatctgctgcctccttgcggcgctttgccattaatttagtcagcatcacatcgcaatcacaagactcctatacccaaacccacgccccccaccccctattattctatatatataatacacacactagtgtagtagtgtggagtacttcaattggcgttggccgaagaagaggagaagcgaagcaagcaggcttcgagaacaagggggagggggaggaccaagcgaaagggggaactagagcaagatgggcggcgaactgctgcttgcgctcctcctcgtctctgctgctgccgcccctcaggtacttggagttggcaatggagacaatcacatgagaatcatccaggaggacatcattgagacagtcaacaaccatcccagtgctgggtggacagcctcacgtaatccttacttttcaaactataccattgcgcaatttaagcacatacttggagtgaaaccagcaccacagaatgcactaagcaatgttcctgtcaaaacttattcaagatcactggaacttccaaaagagtttgacgctagatctgcatggtcccgttgcagcacaattgggaacatacttgaacagggtcactgtggctcttgttgggcttttggtgctgtggagtgcctccaggaccgtttttgcattcacctcaacatgagcattttactttcagtcaatgacctactggcatgctgcggttttatgtgcggcgatgggtgtgatggaggctatcctatagaggcatggcgctactttgttcaaaatggtgttgttacggatgagtgtgatccatacttcgacccggtcggttgcaagcatcctggatgcgaacctgcttatcctacaccaaagtgtgaaaagaaatgcaaggagcagaaccaagtttggcaggaaaagaagcatttcagcattgatgcgtacagaataaattcagatccacatgacataatggcagaggtctacaaaaatggtcctgtagaagttgctttcacagtttacgaggatttcgcacactacaaatctggagtgtacaagcacatcaccggtggcattatgggtggccatgccgtcaagttgattggatggggaaccagtgatgctggagaggattactggcttctggcaaatcagtggaatagaggctggggcgatgatggatacttcaagatcataaggggcaaaaatgaatgtggcatcgaggagggcgttgttgctggaatgccatcgacaaagaatatggttccaaacttcggcggtgccgttggaagagctatagtttaattggttacgtttgcatggcctcaaatgctgttggaattaactaaagtaattttaaaatgcaattgttaaatggccacgatggtgtatgtattttgtacactagctcattccaaaggtcgttatgttgctgatgccacatcactttggtcaagtggaataatattaataagaactagaatttcgattcgaatgttacggtttcaagtc

SEQ ID NO: 141671 - DNA, 603 bp, Zea Mays
gaggtccggtatcgccacgtatccaggcgtgggtggccgaagcccggaccccctcgagtgcgatccgggcccatgatcagggaatgcttgggaataccatgtcgtcgcttattctcgggcctatcccttatccaggcaggggcatgaagagacggatggagaagacgagatgacatgatcgttacaccctacgcacgagagcgtatcaggctacaccgcaacctacatcaagacctgagttccgattagacggggcaaggtgacaggataaggacgacagaagatcgtgcaacgtccaagaagggatacagactcatgaagatctagcgttgtcagctctacccaattgtttctcgttccatattgtactctcttaggcccatcggtcagagccaaaactcccttgtatgtgccttccttggactataaaagggagagcacttgctctgtagcagggagaggtcaatctaacactcggaccttcgactccctaactctaaagcaatataactcatagtgaatgtgagatactatgctccggtggcctgaaacgctctaaacccttgtgttcttgtgtccatctagaaggccagacaatcaact

SEQ ID NO: 141672 - DNA, 907 bp, Zea Mays
aagattatacattttggcatctctggattgaaattcttgtgtgtcgcaaggaacacagaactccgttgcgtttgtgctattatcaggaattacaggcagagtggagaaaatgaggaaaaagaattatatatagcaggagcaccgcaccaccaaggggactcaggctcagccagcgagggcgtcggcaccggcgacgatctcgaggatctccccggtgatcttggcctggcgctgtcggttgtaggcgatggagaggttcttgcggagctcgatggcgttgtcggtggcgctgctcatggcgctcatccgggcggcgagctcgctggcgagcgactcctgcagggcacggaggatctggctgttgaggtagagcgggagcagcgcgtccaggatctgcacggggtcctgctcgaactgcaccacgggggagaagggctgcgtctcgatcttcaccttctcgcgctccacggtgagcttcccctccttggtggtgaggcggaagagctcgtcctcggtggcgtccacgcagacgccgttgacgtcgcagatctcgcccttgggcgacatggggagcagcgtctggatgatggggtcggagcgcaccagcgacacgaacttggagtagagcagctccaccttgtccacctcctcggagacgaagagcgagtagacgaggtcgcagatggcctgcgagtccttgacggtgggcacgctgctcacctctagatcgcgctccaacgggatgtaggggcggcgctggaagtaggcgttgcccttcttccccacgctgacgacggtgtactggaggcccagctgcttgagctcatcgatgcgggtttccgccttcttgagcacgttgttgttgaagctcccgcagaggccgcgctcgccgaggtgggagcacgac

SEQ ID NO: 141673 - DNA, 2306 bp, Zea Mays
aagcttttactcaaaaacgcgctgtcgccgtttctccccctgtcaaccttttttctttgagaaaactcggccccccgcaggatcttttgttccggaccccgtgagtcgctgccacgatcgaggcagggcgccaattgcggtggccaccacttccaatccactccccgcgttcgcctcgccgagctgttcttgctctgtcctctctccaactccacgatttgttccacacccggttcccgagcctccgcagcgcttcttgctgaaaaagggaactccgagttctccagctctggatcggcagagagcggtggttccttttgcggactctgaggtccagttcttgtttttgatttgtctcatcaacccaccagtcgggctgcaggcttagagctggaaggaataatttgactagagaaatggggcagtgttgcagcagagctacggccccggactctggacggggaggtgccaatggttatggctattctaaccaggcaaagccggcgcaagcacctccgagttacaaccctcctcagcaggcggccgaggtgaggtacacaccatcggcgacgaactcttcggcagtcccacccgtggctgtgccgccgaagccaacggcggacacgattcttggcaagcagtacgaggacgtgcgctctgtctactccctcgggaaggagcttggccggggccagttcggggtgacatacctctgcacagagattgcctctggtaggcagtacgcctgcaagtccatctccaagcgcaagctcgtcagcaaggcagacagggaggacattcgaagggagatccagatcatgcagcacctgtctgggcagccaaacattgttgagttccggggagcatacgaggacaagagcaatgtccatgtggtgatggagctctgcgcaggtggggagctcttcgatcgcatcattgcaaaggggcactacacagaacgtgcggctgctacaatctgcagagcagttgtgaatgttgtcaacatttgccacttcatgggtgtgatgcatcgtgatctgaaacccgagaacttcttgcttgcgaccaaggaggagaatgcaatgctcaaggccactgattttgggctttctgtcttcattgaagaaggaaagatgtacagggacattgttggaagtgcttactatgttgctcctgaagtccttagacggagctatggaaaagagatagatgtttggagtgcgggtgttattttgtacattcttctcagtggcgtgcctccattttgggctgaaactgaaaaggggatatttgatgctattctgcatgaggagattgactttgaaagtcaaccttggccatcaatttctgagagtgctaaagacttggtgagaaagatgttgacacgagatccaaagaaaagactgacttcagcccaagttcttcaacatcagtggctcagagaaggtggggaggcatctgataagcctatcgacagtgctgttctttctagaatgaagcaattcagagcaatgaataagctgaaaaagatggccctaaaggttattgcttcaaaccttaacgaggaagagatcaaggggctaaagcaaatgttcatgaacatggacacagacaatagtggcacaatcacatacgaagaactcaaagcaggattagccaaacttggatcaaagctgtcagaagctgaagtaaagcagttgatggaggctgctgatgttgatgggaatggatctattgactatgttgagttcatcactgccacaatgcatagacacaagctcgaaagggacgagcatttgttcaaggcattccagtactttgacaaagataacagcggcttcatcacaagggatgaactggaatctgctttgattgagcatgagatgggcgacacgagtacaataaaggagatcatatcagaagttgacacagataatgatgggaggattaactatgaggagttttgtgcaatgatgagaggagggatgcagcagccaatgaggctcaagtagcctgttcccttaatagaaacggtgtaccactagttactgttcacttttttttcttcatgtttggtacttggtagttggataaagcttacaatgggtgttgcttttgtattgttgagagatgattgtctatacctttttttcccttttgctcgtgtttgttgcattgtagtatcttgaacgtcccttcctttttttaagtttgtttatgcaagtacatctaataaaaagtgcattctgtcttactttgtactgttaaaatctagctttcagttaggtaattagtaagttaggtaa

SEQ ID NO: 141674 - DNA, 2294 bp, Zea Mays
agcttttactcaaaaacgcgctgtcgccgtttctccccctgtcaaccttttttctttgagaaaactcggccccccgcaggatcttttgttccggaccccgtgagtcgctgccacgatcgaggcagggcgccaattgcggtggccaccacttccaatccactccccgcgttcgcctcgccgagctgttcttgctctgtcctctctccaactccacgatttgttccacacccggttcccgagcctccgcagcgcttcttgctgaaaaagggaactccgagttctccagctctggatcggcagagagcggtggttccttttgcggactctgaggttggaatcttatcctttcgctgtccagttcttgtttttgatttgtctcatcaacccaccagtcgggctgcaggcttagagctggaaggaataatttgactagagaaatggggcagtgttgcagcagagctacggccccggactctggacggggaggtgccaatggttatggctattctaaccaggcaaagccggcgcaagcacctccgagttacaaccctcctcagcaggcggccgaggtgaggtacacaccatcggcgacgaactcttcggcagtcccacccgtggctgtgccgccgaagccaacggcggacacgattcttggcaagcagtacgaggacgtgcgctctgtctactccctcgggaaggagcttggccggggccagttcggggtgacatacctctgcacagagattgcctctggtaggcagtacgcctgcaagtccatctccaagcgcaagctcgtcagcaaggcagacagggaggacattcgaagggagatccagatcatgcagcacctgtctgggcagccaaacattgttgagttccggggagcatacgaggacaagagcaatgtccatgtggtgatggagctctgcgcaggtggggagctcttcgatcgcatcattgcaaaggggcactacacagaacgtgcggctgctacaatctgcagagcagttgtgaatgttgtcaacatttgccacttcatgggtgtgatgcatcgtgatctgaaacccgagaacttcttgcttgcgaccaaggaggagaatgcaatgctcaaggccactgattttgggctttctgtcttcattgaagaaggaaagatgtacagggacattgttggaagtgcttactatgttgctcctgaagtccttagacggagctatggaaaagagatagatgtttggagtgcgggtgttattttgtacattcttctcagtggcgtgcctccattttgggctgaaactgaaaaggggatatttgatgctattctgcatgaggagattgactttgaaagtcaaccttggccatcaatttctgagagtgctaaagacttggtgagaaagatgttgacacgagatccaaagaaaagactgacttcagcccaagttcttcaacatcagtggctcagagaaggtggggaggcatctgataagcctatcgacagtgctgttctttctagaatgaagcaattcagagcaatgaataagctgaaaaagatggccctaaaggttattgcttcaaaccttaacgaggaagagatcaaggggctaaagcaaatgttcatgaacatggacacagacaatagtggcacaatcacatacgaagaactcaaagcaggattagccaaacttggatcaaagctgtcagaagctgaagtaaagcagttgatggaggctgctgatgttgatgggaatggatctattgactatgttgagttcatcactgccacaatgcatagacacaagctcgaaagggacgagcatttgttcaaggcattccagtactttgacaaagataacagcggcttcatcacaagggatgaactggaatctgctttgattgagcatgagatgggcgacacgagtacaataaaggagatcatatcagaagttgacacagataatgatgggaggattaactatgaggagttttgtgcaatgatgagaggagggatgcagcagccaatgaggctcaagtagcctgttcccttaatagaaacggtgtaccactagttactgttcacttttttttcttcatgtttggtacttggtagttggataaagcttacaatgggtgttgcttttgtattgttgagagatgattgtctatacctttttttcccttttgctcgtgtttgttgcattgtagtatcttgaacgtcccttcctttttttaagtttgtttatgcaagtacatctaataaaaagtgcattctgtcttactttgtactgttaaaatct

SEQ ID NO: 141675 - DNA, 554 bp, Zea Mays
cttaaagcttcgacagcagtggcccagctacattcacttgagggtaacaatccaagacagactcgatcagcaacactctaattcaagtccagtaagaaagaaagatcagccgccattgtaattcatgtgttagaccaaaagatggaatttgcccagtacatactttgggtgcagtcacccggttatctccttcaagtataatacatcgatcctccactctgttgtcactaacattgcgccgaagagcctccagagcatgtggattccactcacatgcataaactagcttggcattagccctgcaagaaaatggaagaacaaaatatccaattccagcaaacaaatccacgaccacctcatctctgcagtttagctgtcccatgcgaagtttctctgaacgattaccagaagaaaacatgcattttgttgcatcaagtgaatagcagatgccattttcataatgggtaacccatccgttatcacccagaagaagttccagtgtactatctcttgtgccatttggcatgattttaccctgccaaaaaagacaggtt

SEQ ID NO: 141676 - DNA, 91 bp, Zea Mays
agggagataatgattatcttgatatggtgtttactcaagtgtccttggaaggttacctgtttatttgtcttatttgaatgtaaatgtgaag

SEQ ID NO: 141677 - DNA, 395 bp, Zea Mays
tttataatttggacatgagtagtccgtagtcgctaccactatagtggggcacaggcgatcgcatattcgcacccacccatcacacgacaaaatccctcaccctcgtgagtcctgacgtcctcgcccgtgctcgcagttggtagggttctagccatggcgtggagcgccgccgccgtctccaggttcgcagccgcctccccacccgcggcacccatctccgtcaggcttggagccgccgcttctcgctcgtccctgtccttctccagtgggcgccgacgccccgtggccgcgtccctctcgacctctgccaccggtacgcctcccgctactttggcgccaaacagacgcgcggattgctaccatttctttgcacttactgtttatctcgtcgtgtc

SEQ ID NO: 141678 - DNA, 1009 bp, Zea Mays
tttataatttggacatgagtagtccgtagtcgctaccactatagtggggcacaggcgatcgcatattcgcacccacccatcacacgacaaaatccctcaccctcgtgagtcctgacgtcctcgcccgtgctcgcagttggtagggttctagccatggcgtggagcgccgccgccgtctccaggttcgcagccgcctccccacccgcggcacccatctccgtcaggcttggagccgccgcttctcgctcgtccctgtccttctccagtgggcgccgacgccccgtggccgcgtccctctcgacctctgccaccgctgtaaaggaggctgttcagacagagaaggcaccaccagcactaggcccttattctcaggccatcaaagcaaataatcttgtgtttgtttctggagttcttggcttgaatcccgagaccaggaagtttatctctgaaaatgttgaggagcaaactgagcaggttatgaaaaacatgggcgagatattgaaagctagtggtgctaactattcttcagttgtgaagacaacgatcatgtgtgattctattattttacctgcaggttggctgatctgcaggatttcaataaagtaaacgagatctatggcaaatatttcccggtgccagcacctgcacgatcaacctaccaagtggcggcgctgccactgaatgcccggattgagattgagtgcatcgctgctctctaatcagatcatccaaccactcattaaatcatcaataagcacccaggaatttgtggtagaggtacctgtaccagttcagtgtctgaaaactgcgggtaacaaacctttgtgtcccggataagtgatgtgtgtgtgtgtgtgagtgaacagtgcatctagtaggagaattgttgcgtggtttgttacttggattcttcgctctttagacaagaagtaccatggcatcaacatcaatagcctactgttttcttcccaataagaatgaattggcttccccaacagatcatggatat

SEQ ID NO: 141679 - DNA, 983 bp, Zea Mays
tttataatttggacatgagtagtccgtagtcgctaccactatagtggggcacaggcgatcgcatattcgcacccacccatcacacgacaaaatccctcaccctcgtgagtcctgacgtcctcgcccgtgctcgcagttggtagggttctagccatggcgtggagcgccgccgccgtctccaggttcgcagccgcctccccacccgcggcacccatctccgtcaggcttggagccgccgcttctcgctcgtccctgtccttctccagtgggcgccgacgccccgtggccgcgtccctctcgacctctgccaccgctgtaaaggaggctgttcagacagagaaggcaccaccagcactaggcccttattctcaggccatcaaagcaaataatcttgtgtttgtttctggagttcttggcttgaatcccgagaccaggaagtttatctctgaaaatgttgaggagcaaactgagcaggttatgaaaaacatgggcgagatattgaaagctagtggtgctaactattcttcagttgtgaagacaacgatcatgttggctgatctgcaggatttcaataaagtaaacgagatctatggcaaatatttcccggtgccagcacctgcacgatcaacctaccaagtggcggcgctgccactgaatgcccggattgagattgagtgcatcgctgctctctaatcagatcatccaaccactcattaaatcatcaataagcacccaggaatttgtggtagaggtacctgtaccagttcagtgtctgaaaactgcgggtaacaaacctttgtgtcccggataagtgatgtgtgtgtgtgtgtgagtgaacagtgcatctagtaggagaattgttgcgtggtttgttacttggattcttcgctctttagacaagaagtaccatggcatcaacatcaatagcctactgttttcttcccaataagaatgaattggcttccccaacagatcatggatat

SEQ ID NO: 141680 - DNA, 811 bp, Zea Mays
cggccgccctcgtaaacgatctgcggtttcttccacgcaccaatcatttcggccacactgcacacggacgaaactcgctcgtccttcgcctccagcagcagccgatccgtatccagttcccgtgccgtgcccaccagggggaacccgatcgatgggaaactgctgtctcgagaggcctcgtcgcggtggcagcggcagtgcgggctccgtgcattacgccaggacgaaccccgtgtgggtggaggacaggagggaggaggcgtgcaagggcgagggcgagggcgccggccacgcgccggcggcggccacggaggtgaagatcaggatcactaggaagcagctggaggagctgctgcggcgcgtagaggacggcaagcacggcggtggctgcggagtgcccgtccaggacgtcatctcggagctcctgtgcgtggccagcactagctccaacttccggcacagggaggaggggcagtggcggccgtcgctgcagaccatacccgagtgagacggaccatggtctgattgacgatcagatcatgttacttgatattacttgctgttttagttatttagcacctccgtcaatccatgcatgcgtggcttagccatttgttgccatattcatactagtagcatagcattagataccagatagggtgtacatttgttaggtcttggatcaggagaccaatctatcttaataaagtatattgatagacatataagctatgaagagttatttatctttttttttgttgagtagatacatctctgcttacctgtttttgctttggacattggattgtgg

SEQ ID NO: 141681 - DNA, 652 bp, Zea Mays
ctaccaaaccgcggtctcggctcgctcgctcgcttgctgggcttgcagtcgcagcctcgcaggacgagataaatagtccacccgcgccgagcgccaccgtctcatcatcagtcatcacataccaccaagaccacatcggcacatcgacgtgagctcgtgcgtgagtgccctggtcgacgaccgctcgcgcgccatggactcaacgacgacggcgccgctgctgcagccgtccgccgcctcgagcaaggaggggccggggccggcgccggctcagcacggtgagggcagccgggagctggaggcgatcctggccgacgcgtccaagccgtgggcttggcgggcctgggaaggcgcccgcctggagctgccgctgctgctgcgggtggcgctgccggcggtggccgtctacatgatcaacttcgtcatgtccatgtccacgcagatcttctgcggccagctcggcaacctcgagctcgccgcctcctcgctcggcaacaccggcatccagcccttggcctacggcctcatggtgcgtgtcctctgtttcatttagctcacatggtccattcgcctacttgctagttcagagcaaatgattttttttctttgtgttcgtgattattcataagttctgctgttttcatctcaaaca

SEQ ID NO: 141682 - DNA, 1960 bp, Zea Mays
ctaccaaaccgcggtctcggctcgctcgctcgcttgctgggcttgcagtcgcagcctcgcaggacgagataaatagtccacccgcgccgagcgccaccgtctcatcatcagtcatcacataccaccaagaccacatcggcacatcgacgtgagctcgtgcgtgagtgccctggtcgacgaccgctcgcgcgccatggactcaacgacgacggcgccgctgctgcagccgtccgccgcctcgagcaaggaggggccggggccggcgccggctcagcacggtgagggcagccgggagctggaggcgatcctggccgacgcgtccaagccgtgggcttggcgggcctgggaaggcgcccgcctggagctgccgctgctgctgcgggtggcgctgccggcggtggccgtctacatgatcaacttcgtcatgtccatgtccacgcagatcttctgcggccagctcggcaacctcgagctcgccgcctcctcgctcggcaacaccggcatccagcccttggcctacggcctcatgctgggcatgggcagcgcggtggagacgctgtgcgggcaggcgtacggcgcgcacaagcaccgcatgctgggggtgtacctgcagcgctcgacggtgctgctcatggccaccgccgtgccgctgaccgtcgtctacgccttctcggagcgcatcctggtcctcctcggcgagtcggagcgcatctccagggccgccgccgtcttcgtctacgggctcatcccgcagatcttcgcgtacgcggccaacttccccatccagaagttcctgcaggcgcagagcatcgtggcgcccagcgcttacatctccgtggccacgctggcgctgcacctggggctcagctgggtcgccgtctacaggctgggcctgggcctgctggggggctcgctcgtgctcagcttcagctggtgggtcatcgtcgcggcccagttcgggtacatcgtcaccagcgcccggtgcagggacacctggacgggattcaccacgcaggccttctcgggcctcggcaccttcttcaagctctcggcagcgtccgccgtcatgctgtgcttggagacttggtacttccagatcatcgtgctcatcgccggcctgctcaagaacccggagctctccctcgactccctctccatatgcatgaacgtgaacgcatgggtgttcatgatctccgtcgggttcaacgccgcggcgagcgtgcgggtcgggaacgagctcggcgcaggcaacccgagggcggcggcgttctcggtgttcatggtgacgtcgctgtcgttcatcgcggcgacggtgtgtgccgtcgtcgtgctgtgcctccgcgaccagctgagctacttcttcactggcggcgaggccgtggcgcgcgccgtgtccgacctctgcccgctcctcgccgccacgctcgtcctcaacggcatacagccagtcctctccggcgtcgccgtgggctgcgggtggcaggcgtttgtggcgtacgtgaacgtgggttgctactacgtcgtcggcgtgccgctcggcgtcttcctcggcttctacctcgacctcggcgccaagggcgtttggagcggcatggtcatcgggggaaccttgacgcagacgctcatcctgctctgggtcaccgtcagaaccgactggaacaaggaggtggagaacgccaaggcgaggctggacaagtgggacgacaagaagcagcccctcctagtcgaagattgaaggaagaatctagtagatcacgcagtgtagcgcgtgctggtggattttttgtgtgtcgtgtgtgtgttttggagtggattgaatggaccatttggcatttgggttttagagagcatgcatgcactcctatcatgaatgctttggccagcaaatcatgcattgttagaaaattaatagggactaagattaatttgataatgcaacataaacgtaaaatccagaact

SEQ ID NO: 141683 - DNA, 2072 bp, Zea Mays
ctaccaaaccgcggtctcggctcgctcgctcgcttgctgggcttgcagtcgcagcctcgcaggacgagataaatagtccacccgcgccgagcgccaccgtctcatcatcagtcatcacataccaccaagaccacatcggcacatcgacgtgagctcgtgcgtgagtgccctggtcgacgaccgctcgcgcgccatggactcaacgacgacggcgccgctgctgcagccgtccgccgcctcgagcaaggaggggccggggccggcgccggctcagcacggtgagggcagccgggagctggaggcgatcctggccgacgcgtccaagccgtgggcttggcgggcctgggaaggcgcccgcctggagctgccgctgctgctgcgggtggcgctgccggcggtggccgtctacatgatcaacttcgtcatgtccatgtccacgcagatcttctgcggccagctcggcaacctcgagctcgccgcctcctcgctcggcaacaccggcatccagcccttggcctacggcctcatgctgggcatgggcagcgcggtggagacgctgtgcgggcaggcgtacggcgcgcacaagcaccgcatgctgggggtgtacctgcagcgctcgacggtgctgctcatggccaccgccgtgccgctgaccgtcgtctacgccttctcggagcgcatcctggtcctcctcggcgagtcggagcgcatctccagggccgccgccgtcttcgtctacgggctcatcccgcagatcttcgcgtacgcggccaacttccccatccagaagttcctgcaggcgcagagcatcgtggcgcccagcgcttacatctccgtggccacgctggcgctgcacctggggctcagctgggtcgccgtctacaggctgggcctgggcctgctggggggctcgctcgtgctcagcttcagctggtgggtcatcgtcgcggcccagttcgggtacatcgtcaccagcgcccggtgcagggacacctggacgggattcaccacgcaggccttctcgggcctcggcaccttcttcaagctctcggcagcgtccgccgtcatgctgtgcttggagacttggtacttccagatcatcgtgctcatcgccggcctgctcaagaacccggagctctccctcgactccctctccatatgcatgaacgtgaacgcatgggtgttcatgatctccgtcgggttcaacgccgcggcgagcgtgcgggtcgggaacgagctcggcgcaggcaacccgagggcggcggcgttctcggtgttcatggtgacgtcgctgtcgttcatcgcggcgacggtgtgtgccgtcgtcgtgctgtgcctccgcgaccagctgagctacttcttcactggcggcgaggccgtggcgcgcgccgtgtccgacctctgcccgctcctcgccgccacgctcgtcctcaacggcatacagccagtcctctccggtgagccatcgtgccacgtctcctctgcccgccagtcatcgacctcttgtcttcatgcatgctttgctttgtttacacattttgcaatgctatgctatgctatggacgacaggcgtcgccgtgggctgcgggtggcaggcgtttgtggcgtacgtgaacgtgggttgctactacgtcgtcggcgtgccgctcggcgtcttcctcggcttctacctcgacctcggcgccaagggcgtttggagcggcatggtcatcgggggaaccttgacgcagacgctcatcctgctctgggtcaccgtcagaaccgactggaacaaggaggtggagaacgccaaggcgaggctggacaagtgggacgacaagaagcagcccctcctagtcgaagattgaaggaagaatctagtagatcacgcagtgtagcgcgtgctggtggattttttgtgtgtcgtgtgtgtgttttggagtggattgaatggaccatttggcatttgggttttagagagcatgcatgcactcctatcatgaatgctttggccagcaaatcatgcattgttagaaaattaatagggactaagattaatttgataatgcaacataaacgtaaaatccagaact

SEQ ID NO: 141684 - DNA, 312 bp, Zea Mays
aaaaaagatggtggtctgctttaatgtggatctgggcccgagttgggctctcagtgcagccggcctgttatcctcccaccgttggaagcgggcagtgatcgctgctctgttaaaccagcctcacgccgtgcctaccgcttcaggcctagagaggtccaaggcttgccctgagccccgccagacactcccaacttgggatggacagtccagcctagtggcacatatgggcccaggcccagaagccgtcagaaagcatccgcaccacctttaatgcccccactagggttacaagctctcgtaactgagctcggc

SEQ ID NO: 141685 - DNA, 1129 bp, Zea Mays
atgggtgttaagctggatcggagcctcgtggccgttgttcgctctgctggaaactcttctcttctgcaagggcaaggctgcctgttccagctcgcttttgggaagctgaaatgggatggcaacaaattcccaggcctgggacggcaatgcaagcaggttcaggatcaggactcagagagctggaactgcaccaggttctctaggcttatccgtgtgtcccggcctaacgttctgattccttttgaatctgggcttgctgttgatcgtatggaatggaggttcctggaatggaagggcttaacaatcctcaaaggtcacactagcgccatggccagaggcagagccaggctgcagctgcaggagggttcagccggctgccggcagcagcctatatataacagtagaggcgcacacgtcccaggcggcaggaagctcacgccaagagaccccgctcccgatcccgtctcctcctcgcagtcgctgcttcgcgaggagccgaagatgctgctcctgcgggcgtcgacgccgttcgcgtacgccaaggtggacaaggtggacgcggaggaggcgcggcacctcagggcgcagttcctcatccacaaggtgctcgagaagaagagtccccggccgtcagcgctggcgcgggccaggcccaggatcggcgtccgcctcaagaagctcaggctcgccgtccgggccctcagggcgcgcgcgtgccgtgccctgcagaggcacctcgggaacctgaggcggctcgttgggcgcggaggagttcaggggtcgccgtgatgagttctcgactgaaatatctgagctttgggtgctgttgcgtgcccgtggccggtgggggcaaatcaaagaaacatctgagctttggtgagactgagagatcggtgtcagtttgtatgcgttttaattaggtgttggagtggaatcatatatacatacagaatgtgcaatatctagtagcagcaaaagaaatgctcccccctgcatttttatgcctccctctgttttggaatcctgccctgcgtgttctgcagatgtcatcggagatctcttcttccccagtactcctgtagtagttttttttttcttttcatttctagccttcgctagtttctctgtc

SEQ ID NO: 141686 - DNA, 1109 bp, Zea Mays
aattcccatcagggtccgtcacgaaccggtgggcggagtcttccagaggccaatattctgacacagcggaccccgtgggccgtggccgtctcgtttcccgtctcccgcatagaggttcccaaaccattctctttcgctttcgtctccgcaccctagggtttctgtgcctcgccagcgaagcgatgcagccgccgcaccaaccgccgatgaacgggcaacactcccagcctccgccgcaaggacccgtggtgcccatgcctccgcagcagcaggcgcccccgctgccgtactaccagcagcagcaggcgccgcagtactaccaacaggccctcccgcagccgtgggggcagcagcagcagtacgctgcaccgccgccgcagtacccgcctccgcctcagacgcagcattacgcgacaccaccgcagcagtacgcccctctgccgcagcagcagtacgctcctccaccgcagcagcagtacgctccttcgccatatggtaccacgccgggaagcggtgaagtcaggacgctgtggatcggagatcttcagcactggatggacgagaactacctccactacaacgcctttgcggccgtggcccagcagattgcttctgtgaaaattatacggaacaagcaaactgggcactcagaaggctatggttttattgagttttactctcgagctgctgcagaacatactctgatgaacttcaatgggcagatgatgccgaatgttgagatgacttttaagctgaactgggcttctgctagcactggtgataagcgtggagatagtggttctgatcgcacaatatttgttggtgatttggctcatgatgttactgactccatgttggaagatgtgttcagagctaagtacccttcagttagaggagctaatgttgttgttgataggatgactggatggcccaaaggatttggtttcgtgcgttttggagatctgaatgagcaggcacgtgctatgactgagatgaatggaatgttgttatctacaaggcaaatgaggattggtgctgcagctaacaagaagaatagggatgctcagcagacatatgcaactgacggatgtcatgccatctgcatttaa

SEQ ID NO: 141687 - DNA, 1843 bp, Zea Mays
aattcccatcagggtccgtcacgaaccggtgggcggagtcttccagaggccaatattctgacacagcggaccccgtgggccgtggccgtctcgtttcccgtctcccgcatagaggttcccaaaccattctctttcgctttcgtctccgcaccctagggtttctgtgcctcgccagcgaagcgatgcagccgccgcaccaaccgccgatgaacgggcaacactcccagcctccgccgcaaggacccgtggtgcccatgcctccgcagcagcaggcgcccccgctgccgtactaccagcagcagcaggcgccgcagtactaccaacaggccctcccgcagccgtgggggcagcagcagcagtacgctgcaccgccgccgcagtacccgcctccgcctcagacgcagcattacgcgacaccaccgcagcagtacgcccctctgccgcagcagcagtacgctcctccaccgcagcagcagtacgctccttcgccatatggtaccacgccgggaagcggtgaagtcaggacgctgtggatcggagatcttcagcactggatggacgagaactacctccactacaacgcctttgcggccgtggcccagcagattgcttctgtgaaaattatacggaacaagcaaactgggcactcagaaggctatggttttattgagttttactctcgagctgctgcagaacatactctgatgaacttcaatgggcagatgatgccgaatgttgagatgacttttaagctgaactgggcttctgctagcactggtgataagcgtggagatagtggttctgatcgcacaatatttgttggtgatttggctcatgatgttactgactccatgttggaagatgtgttcagagctaagtacccttcagttagaggagctaatgttgttgttgataggatgactggatggcccaaaggatttggtttcgtgcgttttggagatctgaatgagcaggcacgtgctatgactgagatgaatggaatgttgttatctacaaggcaaatgaggattggtgctgcagctaacaagaagaatagggatgctcagcagacatatgcaactgacggagcataccagagctctaaaggaaattcttcagagaatgatcctaacaatacaacagtctttgtaggtgggttagattccaatgtaaatgaggagtatctaaggcaaatttttactccgtatggagaaatttcctatgtgaagattcctgtaggcaaacattgtggatttgttcaatttaccagcaggtcatgtgcagaggaagccatccgaatgctgaatgggagtcaggttggtgggcagaaagttcggctttcatggggccgtagtcctcaaaacagacaggcttctcagcatgatgccaacaaccagtataatgggaacagctattatggataccaacagccgggttatgaaggttatggctatggtgcttccagtgcacaagacccaagcatgcaaaactactacggatactctggttgtggtaactatgagcagcagcagccaacacaggaacagcagctgcagcagcctccaccaccacagcactgacgattgcttgcacacctctggagtgctatcggattagagtgatggtggagtcacggggcgctgcaatgagacatcctatatagatatgaaggtcatatagtcgcataggagtggttagactttcttggggaccagtgttaatcgatgatggcactccggatgtttcttctgtttgtcgttgagatcttgactgttgaagtgtgctctgttgatattaatgtcttcgtcagattgttaatttgcttgtttcagatgtcccagaa

SEQ ID NO: 141688 - DNA, 793 bp, Zea Mays
accagcccccgcaacttggagcagcaagttgcatccaattgcagccagagtagcagctagtgtcaccgtcacactcacgcacactatttgaaggcagcaacccgacggccgaacaggttccgctcgctatggattattcttacccaatggaggagcagcattcaggattccggcagtggcaatggcagtggcgcctcttctccctcctctcatcccagccggagctgctcccgccgccgcggccggccaaccatgtcaggtgggaggagaccgccgccgcgcacctcttctccgcaagcctcccgggagtgcgcaaggaggagatcagggtggaggtggaggacgccaggtacctcgtcatccgcaccgagctggacgccggcaccggcaccggcggcgccgtcgcggacgcgaggagcttcgaccggaagtttcggctgccggggatggtggacgtggacggcatctcggcggcgtacacccacggcgtgctgaccgtgaaggtcccgcggatgcacacccgggccaggcctgtagttgacatcctcggtgcgggggcggggccggccagcgaccacgcggcccgggcggcctgattcgtgatttatagcatcaagcatgtactcgctctatcctataaaaaaattatatttagagttcaaattttatttcaaaataaatacacatttagaaataagatcatatggctttagttgtttttcctacttcctctcatctcgaagtgtaattatatttttatagaaaaatagatggaaataatttctcgctaaca

SEQ ID NO: 141689 - DNA, 107 bp, Zea Mays
gttagaatgagtagtaatgaaattgaagcgcgaaagatagttcttcttgccacgagttgcttaatcaatgcggataactttgggagctaactcaaaacgattgcaag

SEQ ID NO: 141690 - DNA, 2498 bp, Zea Mays
cgactcccgctgatccaaatccattgagcgggagaacccgacatccaaaattccccaaaccccctcccaagtcccaaccctagccggctagcctccttccccttcagccttcacacctccgatttctcgcgccttcgtctcccgcccaatttccagaagcttctagaaccaggtttctaaccctaccgcagaatgatgctttcttgcgcctagtagcctggggcggaggcatggacggcggcggggaggggggctcgagcggcgggaggttccctattctgcaggcgaacagggaccccgagtcgaattgggaggtggacgttgccaagagcctcgaggattacctgctcaagatctgctcaggggaggtctccggcgaggacggggcccactctgtcaactttgccgaagcggcgttattactccaaggatcggttcaagtgtacagtaggaaggtggagtacttgtactcgttggtgcttcacgcgttagagttcctctcgcaaaagaaacaggaacaactggaaaatggctcagctcaagctaatcaaaacaaccctagcattattcccagtgaagaagatgatatatttattgggctagatgatgtcccagtggaaacaagaatatctctggataacaatgtcgatcgagatgatttacaaagaaaaattgtgaggccaccagcaaacctactggtgtttgaaggggactgtctggatagtgaagcaagcgagctagattcatatttgttagcaacatgtgatttttatggagatttccttctgctggatccttgtgatgcaccagctgtttttgactttctgcaaggaaaacattctggtaaagaaaatagtgtggctcatcaaggcagtgcagcaccttctaaaagccaagccaatattttcacttccccgaatgcaagatcagtgggcacaggtcgtaaatcagcccctggaaaagtcctaggaggtctagatccaactcaggagaaccaatcttcaactcaagaaaccagtccagataacaaacattggtctgatcctgttgaacctagctttgctgatgatgttgaaatgcatcccccagatgatatagaggaccctgttggagattattctgatgacgaggatccatggaaacctttgaatccacatgaacctggcaatttaaagattcggccttacaggagagtgaaaggttctccacggggtgttattggcatttcgaaaaagaaaactctcaaatcactgtttcctattgcaaagatggttggtgtcgtcatacctgaacatgctaaatcttttgaagcacagcagtctcaggaggaacattatggttcccaatcaccccctcgttttgaaaagtttttgagatcatttgaattaggagaagaaaatcccaatgtgtttggagatttgaaagatgacaatgcatccaatactggcattaattttgattatgatgacccagacatgccaaacgacatagatattgatcttgatgttccaacatgtcctgatgagattattgctataactcccaaaggtacacaggatgacatagatacacatgaaaacctcgacgacttgtgtcggtcacatctgaatgctctccttgccagcattgctgaggttgaaaagcagagtgagatggacgctcgtgtttcaacatggaaagaaagaattgagattgccttggaagagcaggatagaaacccaccttttgatatcggttcatatggggagcaaatacttgacacactttcatcaagaactaacaatacaggaactgcatcttttagtgagattgttagcggcagaccaaagtttgagattgccagaacgttctctgcccttctccagctggtgaacggcagaagtgttgatctggataaaggaaaagccacgaatgagttggtgtgttacacagcagagaatccatttcatgtaaggcttattggtcccaaccggaggccagaaatggaggcacgctttgctcggaagagagtcaagtccccactgcaaaatgcaggcaaagacggtgagtcctccctggcacaacatgagtgtcccaacaagccgttgcgtaaaaatggcaagattccagtcaagacagcgaccaggctgaccccagatgggaaacgaaggcgaaggtcatctgctcacctaatgcagccgatcaatctggaatccagcggatgaacgccagtgcacactgattcttctaattattgtaacttcagtggcggcttcataggcaggatgagcctgtaagttatgacataggcgtagctagcgggtgtatatgtacagttcaactgtaatgctgacagggcaagatttgttcaacggaattgcccttttatagcatttgccattgtttcatttttaatccaataagctaacacgatgccaagtctgttgttgtaaactggtgcctagctgtatcgatgttgccttccgcgatttgagatttatatattacgcaaaaaaaaa

SEQ ID NO: 141691 - DNA, 2398 bp, Zea Mays
cgactcccgctgatccaaatccattgagcgggagaacccgacatccaaaattccccaaaccccctcccaagtcccaaccctagccggctagcctccttccccttcagccttcacacctccgatttctcgcgccttcgtctcccgcccaatttccagaagcttctagaaccaggtttctaaccctaccgcagaatgatgctttcttgcgcctagtagcctggggcggaggcatggacggcggcggggaggggggctcgagcggcgggaggttccctattctgcaggcgaacagggaccccgagtcgaattgggaggtggacgttgccaagagcctcgaggattacctgctcaagatctgctcaggggaggtctccggcgaggacggggcccactctgtcaactttgccgaagacaggaacaactggaaaatggctcagctcaagctaatcaaaacaaccctagcattattcccagtgaagaagatgatatatttattgggctagatgatgtcccagtggaaacaagaatatctctggataacaatgtcgatcgagatgatttacaaagaaaaattgtgaggccaccagcaaacctactggtgtttgaaggggactgtctggatagtgaagcaagcgagctagattcatatttgttagcaacatgtgatttttatggagatttccttctgctggatccttgtgatgcaccagctgtttttgactttctgcaaggaaaacattctggtaaagaaaatagtgtggctcatcaaggcagtgcagcaccttctaaaagccaagccaatattttcacttccccgaatgcaagatcagtgggcacaggtcgtaaatcagcccctggaaaagtcctaggaggtctagatccaactcaggagaaccaatcttcaactcaagaaaccagtccagataacaaacattggtctgatcctgttgaacctagctttgctgatgatgttgaaatgcatcccccagatgatatagaggaccctgttggagattattctgatgacgaggatccatggaaacctttgaatccacatgaacctggcaatttaaagattcggccttacaggagagtgaaaggttctccacggggtgttattggcatttcgaaaaagaaaactctcaaatcactgtttcctattgcaaagatggttggtgtcgtcatacctgaacatgctaaatcttttgaagcacagcagtctcaggaggaacattatggttcccaatcaccccctcgttttgaaaagtttttgagatcatttgaattaggagaagaaaatcccaatgtgtttggagatttgaaagatgacaatgcatccaatactggcattaattttgattatgatgacccagacatgccaaacgacatagatattgatcttgatgttccaacatgtcctgatgagattattgctataactcccaaaggtacacaggatgacatagatacacatgaaaacctcgacgacttgtgtcggtcacatctgaatgctctccttgccagcattgctgaggttgaaaagcagagtgagatggacgctcgtgtttcaacatggaaagaaagaattgagattgccttggaagagcaggatagaaacccaccttttgatatcggttcatatggggagcaaatacttgacacactttcatcaagaactaacaatacaggaactgcatcttttagtgagattgttagcggcagaccaaagtttgagattgccagaacgttctctgcccttctccagctggtgaacggcagaagtgttgatctggataaaggaaaagccacgaatgagttggtgtgttacacagcagagaatccatttcatgtaaggcttattggtcccaaccggaggccagaaatggaggcacgctttgctcggaagagagtcaagtccccactgcaaaatgcaggcaaagacggtgagtcctccctggcacaacatgagtgtcccaacaagccgttgcgtaaaaatggcaagattccagtcaagacagcgaccaggctgaccccagatgggaaacgaaggcgaaggtcatctgctcacctaatgcagccgatcaatctggaatccagcggatgaacgccagtgcacactgattcttctaattattgtaacttcagtggcggcttcataggcaggatgagcctgtaagttatgacataggcgtagctagcgggtgtatatgtacagttcaactgtaatgctgacagggcaagatttgttcaacggaattgcccttttatagcatttgccattgtttcatttttaatccaataagctaacacgatgccaagtctgttgttgtaaactggtgcctagctgtatcgatgttgccttccgcgatttgagatttatatattacgcaaaaaaaaa

SEQ ID NO: 141692 - DNA, 306 bp, Zea Mays
atgaacctccttgtcccgttttccttgtccagtctgcagcaaggaatcaccaccgagaacaatatgcaagccaatcctgagccaatatggattgtaggacatgaaaaccctagttgctttctctttgagcctaaggtcagtaacaagggggcaccgtgctttcatcttcaatctgccttcatcgatgttcttacaaatttgaaacatcataaagagcacctcctcacacgcgcccttactcatgtgtttctccatcctctccgtgacatcctccaggctgcacgcatccttaagagattcccttaa

SEQ ID NO: 141693 - DNA, 114 bp, Zea Mays
acaatcggtaaccatatcaatatgaaaatatgtcaatataacacattcacaatacaacaaagtttacaaatatcacaaagaccacaagttcacaattcacaatataaaaagttg

SEQ ID NO: 141694 - DNA, 1058 bp, Zea Mays
gattaaaaagcagctgagagattcataattcaggcagtgatcatcacctagttttgccatactcttgaggcgtccatataaaacaagtgcaggacccaaacagttgagttcagcagcggcgtgttaacttatccactccctcggcactgcagctcagtgcccttcccagcctctcgctctcccgccgacgcgcacgtcctccgcgccgagcccagaggcagacagaggacgcggccatggcgtccatcccgtgcaccttccagctgagcacggcggcgtcgaggagggtgtcgccgcgggtggcggcgcaggggagaggccaaggaggagggggagcggtgctgaggacgccgctgctgggcgcggggaggcggggcctggggtggctgcggccgtcgcggttgagccgcgtggtgccggcgagcgagagcgggcgggcgggtcccacctgctggttcaagttcggcaacaaggacgccgagggtgccggcatctacggcagccaggccagggacgacttcgaccgcgacgacgtcgagcagtacttcaactacatggggatgctggcggtggagggcacctacgacaagatggaggcgctgctgaaccaggacatccaccccgtggacatcctcctcatgctggcagcctccgagggcgaccgccccaagatcgaggagctgctccgcgccggcgccaggttcgacgtcaaggacgtcgacggccggacggcgctcgaccgggccaccgacgagaccagagagttcatcctcggcttcgccgccaagaaggcctgaacgaccatgtgcaggtcaatcgtgcccggttcttctggacatttggctgcatgtaactaaattcttcgttttctggaatcggtggagtgttcaaccgggggtgaacaagctgtttgcagaggtagctttccgtagtcagctgtattcttactgaagactgaggggtgtactgcgacctgccaaattgctcaataaggtcatgcttcgttaagagctgccaattactgaaaatcagagccgccgctcaatcgccagcttagc

SEQ ID NO: 141695 - DNA, 864 bp, Zea Mays
gatccttctatacgggagagaaccaacgggccctgaatgggacaggacttccccttcacttcacctcgctcttcatcttcgtttctgctcgcaacctagctgcccctccggtcctccacctcccgtccccgtgcgcagaccatgcctcgcgcagccaccgaggccgtcgtccacggcgagggaggcacgatcaaagtaggcacaacgggcaccatcggctccctcatgacaagagaactggacgccgtcaaggtcgcgccgccgccaccggcagccgcgggcaacccgcgcctgaggcgccaccaaggctgtcctgtctcggtgccgtgcggagccgctactcctcggaagaccgtgctgaggaaaagctcctcggacatctccggcggcagcagggccgaccgcgtgagcgccgaagatgcctgctgcaagcccaggagggtctcccggaggaacacgttcgactcgccgatgctgcgctcggacggcgcgctcgtggacgtccggaccccgagtggaggcagggcgaagaagaaggggggcgtgtacggcgtcgagttggtggacgtcaagtgcggtaaccccatgaccagcaggctcaggaagctcggcttctgcaagctgtcggagacgtttgcgtaggtggagcctggcaaggaccatggccagcatctgaataccgtgtgcctgatttagtgcagcaattatctacgagttattcctatgtctcatagattagaagggattagaaaaaaattataaaataattttaattgctatggattgaaactcactcaatcaccttcaattcatatgtattttgatgaaacaggtcctaacactgttcggccttaggctgcgatc

SEQ ID NO: 141696 - DNA, 1052 bp, Zea Mays
gttttatatcaaacagcaatcatggcagacaattgcctgcaatttcaccccttctcatcatcctgcacactacttacagaaaattgccatgatttcattccctcttgttacgcaaccttttttcccttgcttttaaccacagcagcagtacactgccagcctctcaccactcaccagctctcgcatgctcgatccaagtccagctgttgcttcaagctttgctcagccgctgcttgtattgtatgtattgtattgtacgaaagctaacccgtcgctggtggtctcctgcctggctgaaacagaccatgcctcgcgcagccaccgaggccgtcgtccacggcgagggaggcacgatcaaagtaggcacaacgggcaccatcggctccctcatgacaagagaactggacgccgtcaaggtcgcgccgccgccaccggcagccgcgggcaacccgcgcctgaggcgccaccaaggctgtcctgtctcggtgccgtgcggagccgctactcctcggaagaccgtgctgaggaaaagctcctcggacatctccggcggcagcagggccgaccgcgtgagcgccgaagatgcctgctgcaagcccaggagggtctcccggaggaacacgttcgactcgccgatgctgcgctcggacggcgcgctcgtggacgtccggaccccgagtggaggcagggcgaagaagaaggggggcgtgtacggcgtcgagttggtggacgtcaagtgcggtaaccccatgaccagcaggctcaggaagctcggcttctgcaagctgtcggagacgtttgcgtaggtggagcctggcaaggaccatggccagcatctgaataccgtgtgcctgatttagtgcagcaattatctacgagttattcctatgtctcatagattagaagggattagaaaaaaattataaaataattttaattgctatggattgaaactcactcaatcaccttcaattcatatgtattttgatgaaacaggtcctaacactgttcggccttaggctgcgatccagtttgcatatctagttcttgtc

SEQ ID NO: 141697 - DNA, 384 bp, Zea Mays
accaacgacgtgggtctagggtttgagcactccccatttcattgccatctcctctcctctgcattcttcctctactcacacatgcgtttgtttggtctttcatgtcgtcgtgttgtttctaatcatctctctctatcgatttctttacttgcagaaagcgtgcatccagatctagtgtccccgttctgttgtccccatccccgttcttctttgtttctttatctccacgatctagtaggtcatctatcctccaagatccgctccagtgttagcagtgagagatcttggtggaagcaatgaatactttgagaagaaaaatgtagctgcagtgcctatgtgataagcttatggattgtagttttgttctctctcaaacactatttt

SEQ ID NO: 141698 - DNA, 1341 bp, Zea Mays
atgaccaccaccaccacggcggcggcggcggccgtgaacgtggccgcggtcgcgcagctctgcgccgggccacggcggcgcaagccggcggcaggggctcgggtcgacctgcgctgggcgcgcctgctccgcctcgccgtcgtcaccagggtgctcggcgtcgtgcgcgaccagctgctcgcctgctcctcctgcggcggcgggggcggtggcgccgcccgccgccggtacctccgccttggcccgcccgccggagccaacgccggtcccgtgctgtcaccggtcgacagggacgacgactgcgccgccgacgccgaagccgcggcccctcgcgacgcggccgacgacgttgacaacgtcgtcagcctcaaggtcagcctgctcggcgactgccagattggcaagaccagcttcatggttaagtatgtgggagatgacggggaggaccagaacggcttgcagatgacgggcctgaatctcatggacaagatgatggccgtcaggggagctaagattgcctacagcatctgggatgtggcaggagaccaccagtccgtcgaccacatcccaatcgcgtgcaaggacgccgtggcgatcctgtacatgttcgatctcacgagccgctgcacgcttaataacatcgtagattggtacgagagggcgaggaaatggaataagacggctattccaatcctaatcgggacaaagttcgatgactttgcccagcttcctcttgaaatgcaatggaccattgttaaccaggccagagcatacgcaagagcgatgaaggcgaccctcttcttctcgagcgcgacgcacaacatcaacgtgaacaagatcttcaagttcatcacggccaagctcttcgacctgccgtggacggtggagcgcaacctcaccatcggcgagcccatcatagacttctgacgacctcctccgctagctaagtaattagacagcacacacgacgatccttgttggtatcacgggttgacagggtcgtcgcctcctcttgccctgtgcgagtcgccggaggcatgaagttgaagtgaccgagcatgcccgtcgtcctcttcctcctgattgccgacagcagcaggcaggatgtcctctgtacataggtgacgtttccgcatgagggagcatcgtcaaaatggcaagaccgcgaggtgtgactgtagtagtgtaacacccgtctgtaacattcgccagactgtataggaatccatgttaattagagctagtttggcagccacatttttaaaagggatttccattttcctttcccttggaaaaatgtttgtcaaactaatccttaatataccctccgtttccgttgac

SEQ ID NO: 141699 - DNA, 958 bp, Zea Mays
tagacagcggcgggcgccttgccataaaagcacagcgcttctacacccgccgccgccactcgttgcagcctctctacctctacctactggagtagggagcacgccgcacgagccctttccgccgccgccaaaatggtgaacgttcctaagaccaagaagacctactgcaagaacaaggagtgcaagaagcacactctccacaaggttactcagtacaagaagggtaaggatagcctgtctgcccagggaaagcgccgttatgaccgcaagcagtcaggatatggtggccagaccaagcctgtcttccacaagaaggtaatgaagtatacctatgtgattgtactattgctccatcaatccttcatctttgtccgttttgatgctagcatgaaagactgaaaataactaccatttctaaatgtctgttgggtgcacagattgggatatgacaaatgttgtgattttcaggccaagaccaccaagaaaatcgtattgaagctgcagtgccagagctgcaagcactactcacagcacgcaattaagaggtgcaagcattttgagattggtggagacaagaagggcaagggaacatctctcttctaagtttctcatcgcccatctcgatgttggatcgaacctgtgggtctactactgttctaaaaactcgtcaaatttcaatgttactagtagttctgaaagcaggtcatgctgtgtatcaaattccaatgcctgacatttgcgctgagtgtgggttgtcttttggctaaatgaagttttgcaccctgaatcttcattgaatgtgttgtgtgtttgtttgattttgttctgcgattgccttagtctaaagcttgatcacaccgaggatggtttatgtaatgtaactggctgaatggaatcccacagttcgctcactgaattgttggagatgatattgcatatgaaataaatccatcgattt

SEQ ID NO: 141700 - DNA, 911 bp, Zea Mays
tagacagcggcgggcgccttgccataaaagcacagcgcttctacacccgccgccgccactcgttgcagcctctctacctctacctactggagtagggagcacgccgcacgagccctttccgccgccgccaaaatggtgaacgttcctaagaccaagaagacctactgcaagaacaaggagtgcaagaagcacactctccacaaggttactcagtacaagaagggtaaggatagcctgtctgcccagggaaagcgccgttatgaccgcaagcagtcaggatatggtggccagaccaagcctgtcttccacaagaaggccaagaccaccaagaaaatcgtattgaagctgcagtgccagagctgcaagcactactcacagcacgcaattaaggtgcagtgtctcattttcctgtgttaggcttgctgttgcacaaagtattgtctcactttgatttagctcactctttcctgactgactcacctgtgtcacagaggtgcaagcattttgagattggtggagacaagaagggcaagggaacatctctcttctaagtttctcatcgcccatctcgatgttggatcgaacctgtgggtctactactgttctaaaaactcgtcaaatttcaatgttactagtagttctgaaagcaggtcatgctgtgtatcaaattccaatgcctgacatttgcgctgagtgtgggttgtcttttggctaaatgaagttttgcaccctgaatcttcattgaatgtgttgtgtgtttgtttgattttgttctgcgattgccttagtctaaagcttgatcacaccgaggatggtttatgtaatgtaactggctgaatggaatcccacagttcgctcactgaattgttggagatgatattgcatatgaaataaatccatcgattttgtaa

SEQ ID NO: 141701 - DNA, 810 bp, Zea Mays
tagacagcggcgggcgccttgccataaaagcacagcgcttctacacccgccgccgccactcgttgcagcctctctacctctacctactggagtagggagcacgccgcacgagccctttccgccgccgccaaaatggtgaacgttcctaagaccaagaagacctactgcaagaacaaggagtgcaagaagcacactctccacaaggttactcagtacaagaagggtaaggatagcctgtctgcccagggaaagcgccgttatgaccgcaagcagtcaggatatggtggccagaccaagcctgtcttccacaagaaggccaagaccaccaagaaaatcgtattgaagctgcagtgccagagctgcaagcactactcacagcacgcaattaagaggtgcaagcattttgagattggtggagacaagaagggcaagggaacatctctcttctaagtttctcatcgcccatctcgatgttggatcgaacctgtgggtctactactgttctaaaaactcgtcaaatttcaatgttactagtagttctgaaagcaggtcatgctgtgtatcaaattccaatgcctgacatttgcgctgagtgtgggttgtcttttggctaaatgaagttttgcaccctgaatcttcattgaatgtgttgtgtgtttgtttgattttgttctgcgattgccttagtctaaagcttgatcacaccgaggatggtttatgtaatgtaactggctgaatggaatcccacagttcgctcactgaattgttggagatgatattgcatatgaaataaatccatcgattttgtaa

SEQ ID NO: 141702 - DNA, 735 bp, Zea Mays
gggtcctatgatggcatgaatctttgaggcctgattattctcatgaagacaactataagcataactgagctcctatgagctccgatttaagttttcaatttcctttcccagcttatggtgagcttgtttatacagccccatatggagaacttgcttatgctttggtcttcagttgctaaggatatgcaattttgttttaacctttgcaatttctttcacatgttatataggtgaacgttcctaagaccaagaagacctactgcaagaacaaggagtgcaagaagcacactctccacaaggttactcagtacaagaagggtaaggatagcctgtctgcccagggaaagcgccgttatgaccgcaagcagtcaggatatggtggccagaccaagcctgtcttccacaagaaggccaagaccaccaagaaaatcgtattgaagctgcagtgccagagctgcaagcactactcacagcacgcaattaagaggtgcaagcattttgagattggtggagacaagaagggcaagggaacatctctcttctaagtttctcatcgcccatctcgatgttggatcgaacctgtgggtctactactgttctaaaaactcgtcaaatttcaatgttactagtagttctgaaagcaggtcatgctgtgtatcaaattccaatgcctgacatttgcgctgagtgtgggttgtcttttggctaaatgaagttttgcaccctgaatcttca

SEQ ID NO: 141703 - DNA, 198 bp, Zea Mays
atgtcggattgttctttggaccgcctcgacggctttaaccaggtggatgagcaacagacgccgtccgacaacggccagaagaaatgcgtcgatccggcccaagagaaggcatctaggtacttgtgcaggctgaggtgtcgccgtgtcgcagtcgcagcctcgcaggctcgtagtcgtagctacgtcgccgattcctga

SEQ ID NO: 141704 - DNA, 330 bp, Zea Mays
atgacgaaagttcgccgcagcgcgcgccttgccaatcgtccggcaatgccggccctaaagcgggcccaaatcatcctctgccaacggcttgggctcactgcagaggagactaatcacaactcggtagagcaggctctgaagaagtacgtcgccatgttcaacactgctctgcccgaacctgtcaccgccgctcttaccagcttgctgggaatcgacgacgagcatacggaacaacttgatgaggcattgatcggcttggtggggcaggggatcgacggcatcaatccaatggaaggcgtcccagccgcagggggggcggtggatgagtga

SEQ ID NO: 141705 - DNA, 982 bp, Zea Mays
gcaaaaggcattcgttcgttcataaacatcgcctgaacaccaaagtcaccctccagcagtttcgctttcttgcttcaccctgcgatcgagatcgagctcaacaaccatggaggatttagtgagtagcccatctttcaggagcgtcctcagcagcagtagcgaagggcaggctcagtcaggagagagttcttggacggattacttcgtggatttcatgttatccgaggaggagaggaagagacaggcagatgctagctcatactcatactgcgctaccgaagacgaaggcggcagcaaatacggtggcgatggaagcaaccgcgatgaggaggaggaggaggaagaagaggagtccatggtctccgatgccgcctctcatgcccctacgactgcaggcgccaccgcactgataccagctggcaggtacaaggagctgaagaagctcaagaaaaagcctttcggcaaagccctggatcatgacggttccctggaggataccgcaagctctccggtgaatagcccaaaggtcagtgttgtgtcacagctggaattgagtgctaaaaggaggtgcaacatcagggacctcaccaagggagtcgttggaattggcgatgatcacggcggggaggggatggacgtctgtacagatgcaacgaccacggaaggagcgaggcttggtgatcagtaccacacgagcatagctccatgtgcggagctgaaggacaaggggatttgtttgttccccttttccgtgctgctgcactaccatgggccaaactgaggaaaaaagcaatgtgcgaatgaacagcatatgtagtgtttcgcaacttacactctatgcgcgcatgcatgtgtggtatgaacgaataccagaagaatgtgatactgtggatatatatatgtttttccttaattaatatatgtgaatactactatgaaattgttactcgtacacgtgtgttcctgctggtggtttcatttc

SEQ ID NO: 141706 - DNA, 2247 bp, Zea Mays
ctcgtaccgtccaagacggggcaaagaatgcccggggaagccggcgagctggagcgtggcggcagcttggaaccggtcgtcctcctccctccccgtcgctcccgacctcttcctcctcctaatttaatcccacccggcctccccgttctccccgaccgcatccccccttaacctcccttcctcctcctcctcctgcggtcccaactcccatacttcggttcaggaggcaggcaggcaggaaggcaggttcgaggggggattggctccgctcctgctccattgcgcgcgatcgggctcgttcttgtgatctatctagccgtttcttgggtcagtgctggaaggtcaaactgttggtggaaacctcaccggggtgcttcaacgaacgcgaaggtgtcgctgtcatttagcgcgtcttgattggatttgacctgttggcctggtggcgtgttgtcgttgattgagctcgaggatgatgaaatgggggctcagcagcggcacgcccgcggattcctactacgaggtacggtcagattgcacggacggtgtgcccaagagcaagttcaagatcaaggctggcaaaacattaagtgctcggaaatggcaggctgcatttagtcccgatggctgtcttgatattgcctcagtcctaagccggatacaaagaggaggtgtccatccgacagtcagaggagaggtctgggaattcttacttggttgtttcgatcccagaagtacctttgatgaaagggaagagatcaggcaaatacggaggatacaatatgacagatggaaggaagattgtcgacagatggattcgcatgttggtagcggtaaagttatcacagcaccacttatcactgaggatggcagacctattaaggatcctctggttttacttgaggctactgccgacaaggacacttcagaagttgctccatctaccagtataaatggaaatgaaattgatgaatctgcagaacgcattaccgataaacaaattatcgagtggaagctgacattgcatcaaattgggcttgacgttttacgcactgatcgtaccatggtattttatgagaacaaagaaaatctttccaaattatgggatattctagccgtgtatgcatggattgacaaagatgttggttactgccaaggaatgagtgatttatgctcaccaatgatagttctactaaaggatgaagcagatgccttttggtgctttgagaaattgatgcgtagattgcgaggaaatttcaaatgcacagatcaatctgtgggagtatccaaccaacttcaacatcttgcatctattattcaggttcttgacccaaagctacatgaccacctagaaactcttggcggaggtgactacctttttgcgttccgaatgttcatggtgctatttaggcgtgaagtatcatttggagactccttatacctctgggagatgatgtgggctctagaatacgaccctgacattttcttcgcaacatgcgaagaacaaggtgcagtacataaaaataaagtttctaaatccaaactgaaaggactgcgccattttggcaagtgggataaggacaaggataaggaagatgataagaatggggctgaggacggtgaagatggtccggttccgatttcagtcttcatggttgcaagtgtcctcaaggagaagagagaaaagctgttacaagaagccagaggactggatgatcttatcaggatattgaacgatgtaaatgggaacttagatgctaagaaagcttgcgctggagcattgaaacttcacaaaaaatacctgaaaaaggtacaagcaaagaaaccttaaacgtgccatggaacacacgtccccaatggggctatcgttaccatttcaacatacacgaccattttctacacacaactttgagtgaagatttatcggacacaggtggtaatcgtctgacatgtcctgagatacacggagactgatggtgccaggctagtgggttgagtacaggatgagcgcaaccggtagtgtgtatatcacgttctttgtactcaagaattttgtacagacagaaggcggtgcggatagcatgccttgcatacataataatttcaatacaggttgaaaacttgaaatcaacacaccttgcgacagaattcagcttcaagaaagttcttctgcacatattgtaaagctgtaaaagtgtacgatctaatgttttcattaatgtacacataccaagagaactaataagatga

SEQ ID NO: 141707 - DNA, 2135 bp, Zea Mays
cacgatggcctcgctggaggcggcggagacatcaccgccgtctacgcccaccaccagcgcgtccccctgcccgaccccgcgcccgctggctaccgcaccgccgaccatgggtgcggcgcttctccgcgccgcgcgcagcggcgacgagagacagctcgtgaaagcgcttctggcggaccctgcggccccagaccttgagaccgccgccacagccggagggaacacgctcctccacgtggcggccgcgggcgggcacgtggacctcgcgttgctcctcctccgccgcgccccgcgcctcctcacggcgcgtaacgcggcgctcgacaccccgctccacctcgccgcacgcgcgggggcgcacaaggtcgtcgcgctcctcgccgcctcctcgtcctcgtcatcgtcctcaccagcttgctccctgcgcgccctgacccgggccacgaaccggcgcggggagacggcgctgcacgacgccgtgcggggcggccacgaggccgcggcgcgtgcgctggccaccgcggaccctggtctcgtggggatgtgcggcggcgctggggagtcgccgttttacatggcgtcggcggctgggtccctggggatgctgcgcatgctcttaaaggcatataaggacgcggaggaggaggtgcccgacctcgggtcgagcataggtccgggtggccgcacggtgatgcacgccgctgtgctcacgagcaatgaaatgatacaggaattgctgcagtggaaccccactcttgtgaaagaagttgatgactcgggcagtactccttttcactacatcgcttctgttggaaatatttccgcaatgaagctcttattgcgccgtgacagttctccagcatatagctcagattcaaacggtttatttcctgtacatattgctgctaagatgggctacggtcaattcatctacgagctctgtagattttgcccagattgtgacgaattgcttgacagtagaggaagaaatttccttcatactgctattgagcataagaaatggaaagttgtctggcgtttctctggtactgcagatcttggaaggatggcaaatgtcatggattcagaaggcaacacacctctgcatcttgcaatcaagaatgcagaccagatgatagtgagccttcttatggcaacaaatagtgtgctgccgaatatagtgaacaaccagggcctcaccgccttagatcttgctgtactggcaactgacaaaggcataagttatacactgaatcctcaggtcatcatactccgctgtttggcatggactggagctgtccttagtcctcgtcgccttgatcatttcatcgatgattttggcattggcaaaacttcaggaaacgagctcaagaaattcaccaacattgcacagaacttaattgttggttccgtccttgtttcaacggtcacgtttgcagcagttttcactcttcctggcggctacatatcggaggggcatccacacgccggtgcaccaattctgtcacacaggtacaccttcaaggcgttcgtgatggcaaacaccctcgcatttgtcggctccaccttgtccaccatctggctcacctatgctgggtcggaacacgtccacccactgcttcgtgcaatctacatgttcctctccgtaatttcgatggagcaggcaacaagaagtatggttataggattcgcattgggtgcgtatgtcgttctgagcccagtcagcgagcggattgccattgtggtctgcatgtccaccttcatgacgctcttgcttcgcaacccttctagctggcagctgtggttcctgttcatgccgattaagaggcgattgggatggaaaggagcttttaagacccacttgcctccggaaacaaggagccgccttacaattggtgttggctccaattttgcttgccagttccttcggaggatgctcggtatgttatttacgtacagctttatctttctgttagcattgctatgatgagaaacaatatagtgtgcctcggtgtaatattcatgttccttggagctgtatgttttgtacttttgtatataaatagttcaagttccacgaatggttgctttattcctgaactcagatattttaatcatctaatgcgatggtggaa

SEQ ID NO: 141708 - DNA, 774 bp, Zea Mays
gattcctttgagagggatgagaagccagaaagcgagagggacatcgagatggggaatcgaaatcccaaggacaactccgactacggtctcaaagacttctttgaacaggtcaaggagattgaggtgctgttggataagatgtccaacatagttcacaaacttcaggaagctaatgaggaatccaagtcagtcaccaaggcttctgcaatgaaagtgataaaggagcgcatggagaaggacatcgatggagtactgaagatcgcacgcaacaatctcgagaacagacagaagccggggtgtgggaagggcaccagcgtagaccgatcaaggatgtccatgaccattgcattgaagaagaagctgaaagaaaggatgaacgatttccaggtgattgatcgtctcatcgagaccggaagcagcgagcagatctttgagagagcaatccaagggacaggtagaggacagatccttgacacggttgaagaaattcaggaacggcatgatgcagtcatggagatagagaaaaggctccttgaactgcagatgatttttgcagacatggcggcactcgttgatgcacaaagagaggatctagacaacatagagaacctggttcaaaatgctgtaaaccatgtggtgtctggtaccgaggcgctacgcaccgcgaagagcctgcagaagaagtcgagaaagtgcatgttgattgcgattatcattctgctggtaattgccgccatagtcgtgctttcgatcttaaagccttgggctaagtaa

SEQ ID NO: 141709 - DNA, 957 bp, Zea Mays
ttgttgaaacatatagaaatgtgtatattgatgaacagacgaagaggatcacacgctgatgacttgttacacggaggaaccctacactggctaactagtaactagtactatctacttgcacatcacagtacagagtagtgtattacagctgctatcattctacaccgccgtcgcggtgggatcccatggccgccgcgtgcctcgccgccgaccacacaataaaactgagccggaagcctcgccgcggcagcgtgggacccataccaggagagcagccagaaccaacgtgcagctcgatcgatgatgcgtcgacaaggactaggagtaggagctaataaagaaggaagaattaagaagagaaatcgaagccagcgttagagccagcagacgagctatgtgtcctgatggctactccagccgcaggataagcctgaggtcgcgcgtcgcggcggcggcggcgtcgacggcggtcgtcatggccacggccacggccttcctggcagggaactgcggtagcggcagcaagctcgggtcgggggacgtcgagaacgatgggccggcgtacacctccgccgcaggcctcgcccttctgccgccggggtgtcttcgccccgccgcgggggacgatgtcccggccggcggcgacctcctcctggtggcggtggcgccggggtggtggctgtcgctaccagctgccctccggcgcgccgccgccgccgcccggatcctctgcggcggcgccggcaagaggacgttgcgcgcgcgcagcacgtcggtggccatgccgacgacgggagagggggaggtgaggggggaaatttggtcgggcgctgacgctgacgctgaccgccgctggcgctgctagcagtttggtgggtgtggaattgaggggcgcaggcatattataggagcggagacgcggaagagggagggatgctagtggattcggtcgacgcg

SEQ ID NO: 141710 - DNA, 1419 bp, Zea Mays
gtgtgattcctcgggtagataataagacacaagacgcgctgctccaccttgtgcttcaccccgcccccgcccgaaggcagcatctgccagcagcaaccgtatacagagagagagagagagagagcttcacgactccggtcggccgtcagctcgattcgccttcccccccacctcccccgccctccgatgacggggcgtccgtgggcgggcgcgccgccgccgcctcttcctctcgccgtcgccgtgggcgtcgcggcgctgctgtcctgctgctgctgctgctgctgccagggcgcgtcggcgacggcggcggcgtcgttcggcgacaacttcgagatcacgggcgccgaggaccacgtgaagacctccgccgacgggcagacctggtacctatacctcgacaacaagacaggcgtcgggttccagacgaagcagcgctacctgttcggctggttcagcatgaagctgaagctggtgggcaacgactccgcgggcgtcgtcaccgcctactacatgtgctccgacctggacgcggcgcccctgcgcgacgagctggacttcgagttcctgggcaaccgcagcggggagccctacatcatccagaccaacgtgtaccacagcggcgtcggcggccgggagatgcgccactcgctctggttcgaccccaccgccgacttccacacctacgccatcctctggaaccccaagcagatcgtgttcttcgtggacaaggtggcgatccgggtgtacccgaacgacgcgtccaaaccgccgggcggaggaggcggcggcgacggcttcttcccgatcgccaagcccatgtacatcttttccagcatctggaacgcggacgactgggcgacgcgcggcgggctggagaagacggactgggccaaggcgcccttcgtgtcgtcctaccgcgacttcgccgccgacgcctgcgcctggccgccgccggccgcgggggtcgccccgtccccgccgacgcccgcgtgcgccgcggccacgggggacagctggtgggaccagccccccgcgtgggcgctggacgccggccagcgcctggacaacgcctgggtggcaaggaacctcctcgtctacgactactgcgacgaccgcaagcgcttcccgacgccgcccgaggagtgcaagctccggcccgccgcgaccgcatcgtgatcatactatactgttggattggttcgtgcatgatgatgagatggttttttttttggggtttgtttcttggtgcgtaaaaccgggctgattgttgggggtgggggatggagaaaggccgtattatgcgtacattgtgtgtgggcgcatggacagtccggaccgatggttgtggcgttggaacggaccatgtcggccattcttttgttacgaggaaacgaggaatggattcagttttgtacc

SEQ ID NO: 141711 - DNA, 847 bp, Zea Mays
ccgcccgaaggcagcatctgccagcagcaaccgtatacagagagagagagagagagagcttcacgactccggtcggccgtcagctcgattcgccttcccccccacctcccccgccctccgatgacggggcgtccgtgggcgggcgcgccgccgccgcctcttcctctcgccgtcgccgtgggcgtcgcggcgctgctgtcctgctgctgctgctgctgctgccagggcgcgtcggcgacggcggcggcgtcgttcggcgacaacttcgagatcacgggcgccgaggaccacgtgaagacctccgccgacgggcagacctggtacctatacctcgacaacaagacaggcgtcgggttccagacgaagcagcgctacctgttcggctggttcagcatgaagctgaagctggtgggcaacgactccgcgggcgtcgtcaccgcctactacgtacgaagcagcggtatccttccttccttcggaccgatcgcgtcgtgtcatctcacctgacgacgacgacgacgatcatctccaattcgcagatgtgctccgacctggacgcggcgcccctgcgcgacgagctggacttcgagttcctgggcaaccgcagcggggagccctacatcatccagaccaacgtgtaccacagcggcgtcggcggccgggagatgcgccactcgctctggttcgaccccaccgccgacttccacacctacgccatcctctggaaccccaagcagatcgtgtaagtaaataaaactactctccgtttcattcatccctctccacttgttgcctgctgctcctgctggctgctgctgctgctctgggtactgagagagagctgacc

SEQ ID NO: 141712 - DNA, 1376 bp, Zea Mays
ccgcccgaaggcagcatctgccagcagcaaccgtatacagagagagagagagagagagcttcacgactccggtcggccgtcagctcgattcgccttcccccccacctcccccgccctccgatgacggggcgtccgtgggcgggcgcgccgccgccgcctcttcctctcgccgtcgccgtgggcgtcgcggcgctgctgtcctgctgctgctgctgctgctgccagggcgcgtcggcgacggcggcggcgtcgttcggcgacaacttcgagatcacgggcgccgaggaccacgtgaagacctccgccgacgggcagacctggtacctatacctcgacaacaagacaggcgtcgggttccagacgaagcagcgctacctgttcggctggttcagcatgaagctgaagctggtgggcaacgactccgcgggcgtcgtcaccgcctactacgtacgaagcagcgatgtgctccgacctggacgcggcgcccctgcgcgacgagctggacttcgagttcctgggcaaccgcagcggggagccctacatcatccagaccaacgtgtaccacagcggcgtcggcggccgggagatgcgccactcgctctggttcgaccccaccgccgacttccacacctacgccatcctctggaaccccaagcagatcgtgttcttcgtggacaaggtggcgatccgggtgtacccgaacgacgcgtccaaaccgccgggcggaggaggcggcggcgacggcttcttcccgatcgccaagcccatgtacatcttttccagcatctggaacgcggacgactgggcgacgcgcggcgggctggagaagacggactgggccaaggcgcccttcgtgtcgtcctaccgcgacttcgccgccgacgcctgcgcctggccgccgccggccgcgggggtcgccccgtccccgccgacgcccgcgtgcgccgcggccacgggggacagctggtgggaccagccccccgcgtgggcgctggacgccggccagcgcctggacaacgcctgggtggcaaggaacctcctcgtctacgactactgcgacgaccgcaagcgcttcccgacgccgcccgaggagtgcaagctccggcccgccgcgaccgcatcgtgatcatactatactgttggattggttcgtgcatgatgatgagatggttttttttttggggtttgtttcttggtgcgtaaaaccgggctgattgttgggggtgggggatggagaaaggccgtattatgcgtacattgtgtgtgggcgcatggacagtccggaccgatggttgtggcgttggaacggaccatgtcggccattcttttgttacgaggaaacgaggaatggattcagttttgtaccaccaaagcaa

SEQ ID NO: 141713 - DNA, 199 bp, Zea Mays
agggatatgctgtttgtttagtttgatagataagacgagctatttttctatttagtgattagatgcatggagagtgaatggtacgagaatccttgcatgagatggagcgcggtaaaagagttaaattcaacagtacggtaacgccattatcatcaggattaggtcagagtcaaaagtgatgctaatcacgaaaaaaaaa

SEQ ID NO: 141714 - DNA, 366 bp, Zea Mays
atgaagtgtactagagttccagaactggtttcaagggagatgcatgctgatatgaaaaggaacttgaaggttgtggtccttgatgctgatggtgaaggtggtgaacagggaggacagcaagatgttgaaggtccagaatcaagttctgggacaaagtataagcaagcaaagaggaaagttgtgcaagctgcgatgacctcatttgtggtttctgctcctctgaaaccaagcactcaaaaggcaagcaaatcagtcagtgcaatgttttgcaaaacaccagaagaagtttcagagaggcacaagaacaaaatatctcaatccattcttgagcactgcaccaagaaaggaagcaaagcaaattgttga

SEQ ID NO: 141715 - DNA, 2475 bp, Zea Mays
gattttgtaagtttgaggctaaatgtatattttacctttttttttttccgaaaacgccaccgctggaacgtggtgctgtttcgcagacattgcacggtatcttgttctgaccagtcaccacagcacagacacagcagccgtggccacgcacgctatcttgaagtgcacccgaataggccctttttatcgctgcgaaagcaacgcgaaatcgtttcctctgtaaccactaccgtccgtcgtccagtccacccacgcgggcgaacagtgaaaggcatcgtctccgtctcgtgactcgtgatcgctggactgccgccgcccgccgccctcagcttagctcaatgattgggagcaccaagccgctcgcggcgccgctgcacccgccgtacccctccggtcgccgcctcgcccccccgtcctgcgcccctgattcctccccagctctcacccccgccgtcgagaggccaggtcagtctcagtctgacggcgccccgccgccaccacgcccggatgaggtcgcctcgtccctcgcgctgcgcgctagcccgcaactcaatcggtggtcccgctcgcgggcgctgcggtcgaaccgccggcctgggctggaaagcgcgctctcctcgtcctcggcggcgtcggtgaccaagacgtcgcggcccgaggacgctgcggtggcggtggaggatggcgaggacgacgacgtgtgcgtagagacggacgccgcgggcgggaaggccatctacatagtatcggacgggaccgggtggaccgcggagcactcggtgaacgccgcgctcggacagtttgagcactgcttcgtcgaccgcggctgcgctgtcaatacccacctcttctccatgattgataacatggatcgacttcttgaggtaataaagcaagcagcaaaggaaggggcactggttctatatacccttgctgatccttcaatggctgagtcaactaagaaggcctgcgatttctggggtgttccatcgactgatgttctacggcctactgttgaagcaattgcttctcatatgggtgttgctccatctggaattccacgaagttctcctagtcgacagggtcagttaacagaggattactttcgacggattgatgctatcgattttaccatcaaacaagatgatggggctctgccacagaacctcaaccgtgcagacattgtacttgtcggcgtttcacgtacagggaagacaccattgtcaatatatctagctcaaaagggatacaaagtggcaaatgtcccagttgtgatgggagtggatcttccaaagactctttttgagatcaaccaagacaaggtttttggattgacaataaacccagtggttcttcaagcaattagaaagactagggccaaagctctaggttttggtgatgggtatcagagcaattatgctgaaatggaccatgtgaggcaggaactgctccatgcaaatcaaattttcgcccaacatccaatgtggccagtcattgcggtcactggaagagctatagaggaaacagctgctgtcgttgtgaggattctccaagacaggatacagaagtactccatgccacgcatatcaaaacggtactaagggcacgtttggtttcattagtctctgtttggtttcagggactaaaagtgttaagaactcattaaattactcataagaatactaaaatgtcctttaccattcttccgccattactcttcttccactgcaatagaaataaataaggggcaaaatgtggaattaatatggtttagtcccttttagtcatcccttgagggactagatactaaagcagtttagtctctattttagtcctactgtttagcaatttggggactaaatgagactaaaatgcaggaaataatctttagtctctgaaaccaaacaaatcctaacattgtgttctatctcttctacaacttgtaatgtgtgcatgttttgttgagctctgtgtcaagcaccatagcctttatgtttttttgtcagaccaccttctaggtggcgtttgtatcttaaaggcaacttgagatttagcacaacagaaacatatgtatattgtatttacgacattctattggccttactttatttggtcgttagtgaattgtatatcaggtgaaatagtagggtgagctgcctttgtacaaattaccagaaaatcagagtaatatatctcttgcaggaaactcaaccccatgaccacaaaaacttctagttgtctggggtgcagggacaaatcattacatgtggacctgaatattctaactttcctcctgaacaaggatttttcaatgcagtgtgcttggacactcacctttgttttttgaagtatttgatcatagtattgtttgattttttttgttaaaaatacacgcttctgaattaaataggcaaatctttcctgaaaggagttcaaaatgtgttcttacccaacccgaagatcggatgccttcag

SEQ ID NO: 141716 - DNA, 2554 bp, Zea Mays
atggcgccgccggccagcaccgacgagaccgcacgccacaagaaggccaggaaatccaagatcgatatagaagagaagaagcacaagaaaacaaataaggcgcgcgccgccgcagaggacgccccgatacccgacgccgccgagcgcaagaagcgtaagcacaaggacgggcgcgaggagaagcgggacggccagaagtccaagaaggagcgcaagtccgagggaaagggagaggaagccgaggcggccgtggggagggacgagaagatgaggcgtgcgatggaggacgagcggttcgcggcggcgcggactgacccgcggttccggccgatgcggaggaaggaatccaaggtggcgctggactcgaggttcagcagcatgatgacggacccgaggttcgcctcgtcggcggcgcccgtggacaagcgcgggaggcgccgcaagaaacgcgagaaccccatgctgcattactatctcaaccaagaggacttggaggatgatgggaaggggaaggaaaaggggaagaaggagaaaccagtgcttgttcaagaagaggaggaagatgaagaggaactagaggaacaggaggaagaagagagctctagcagcgatgacgacgaagatgaagatttggatgacgacgacgaagagtgctctgttggcagtgacattgctcattacttaatgggaaggcatgatgatacacctatgattgacaaggaaactcacaggcttgctgttgttaatatggactgggatcatattaaggcagttgacctgtatatggtgatgacttcttgcctcccaaagggtgggcgagttttgtcggtctcaatctatccatcagaatttggactgaagtgcatggaaattgagtcaacacagggcccagctgctctggtcaatgccaatgttgataaaaaagacagtgatgaagatgaggatgacacggatgatgatgaagagagcactgatgatgatgttgatgaagaagaagaggaagttgactctgataaagagaataacaaactgcgtgcttacgagctaaacagattgaggtattactatgcagttgtggtgtgtgattccagcgcaacagcaaatcacctgtacatgactcttgatgggactgagttcttgaaaacagcaaatgtgtttgatttgcagttcattcctgactctagggagttcaaacatcctgctcgagacgccgctacagaggcacctccgagttacaaggaacctgattttgagactcgtgctttgcaacatagcagagttaagctcacctgggatgatgatgaacctgaacgtaagaaagtcttgaggcgaaagttcaatgatgatcagctagatgagcttaacatgtatttagcaagtgatgacagcgcgtcagataatgaaggtgtagacgattctgaggatgaatctctgccaaatgggggatccaaacggaagctaacaaaagaggagaggttggctcttctgctgcaaggagacaaatctgatgaggagcaaactgatgaccaggatatggagattacattcaacacggagcttgaggatcttagtaaacggatcctagagagaaagaacaatgaggagaagaccatctgggagaagcaccaagagaaaatgaaagagaaaaggaagggtaggaagaggggactaaaggacgaagatgatgataaccactacatcagcgatgatgagcctgagaatgatgatgatttctttgcagatgaacagtctgatgaagaacctaagccgagcaaaagcaagaaacacaaggcaaaggcaaaaggcgaagcaaagaggaaaggaaatgatgggaccacagatgagcatttggaacaagaagcaaccaaagatgagttggagctcttggttgctggtgaccaggatactgccaatggtgcaaagggttataacttgaagcgtaaaaagggcaagaagggcaaagaggaatctgctgatgacaaacttcctgacattgaccttagcaaggatgagaggttctcagcaatgtttacttcccacttgttcgcattggatccaactgatccccagtacaagaggagtgccgccttcatgcgaaagcaagctgggaagccaggggtacatgggggcaaatcaagcagagaacctccgctggagggttcgtctctgggaggtacagtaccacctgacgatgctgttactaacaatgatggtcagaaacctgatggttcagccacagagaagctgcaaattttgtctgctgttaagtctctcaagagaaaccttggtgcattcaaaaactcaaagacaggtgaccgataaaaagagcatcatttttgttccggctattacacttaatcagtgaaatccctttgttggaaaatggtctcagttatatagtcttcgagatagtttcatggttatgtatgcttatctctgattctgtagacacgcgtccaatctttggattttcagttttgacactatccagattccagaatccaatagaacgattctgttcatttctagtgagataattggtttaatttatcaa

SEQ ID NO: 141717 - DNA, 116 bp, Zea Mays
tagtaaaaactataatagcaagcaagcaacactctcaccgactactaatacattcaccaattgataaaaattatgaagtaaataaggaataacaagtttgttattcgtttataaaa

SEQ ID NO: 141718 - DNA, 2038 bp, Zea Mays
aaggtttttttttgcaagatgttcaccagcagctgagcgagcgttggcaggccacgggggctgtgctgtgctgaaggtcgtccgtagcgtgatctgctagcgctcgcaattctcctctccaccacgccggcgacggcagccggtgaccagtacctacatgtccagcctgaggtcgctagccagcgcactgatcggggacgccgcgaggcttcactcggccactggctctgccggggaggagcctgacagggtctacggcgccgtgctctgccgggcggactccgctggtgctaactacaggcgccgccggggtgcccttggcgccatcgacggcgacggccactcaccttgcgcgctccacagcgacgtgaccgtctactccgagctgtaccatctccgtttctctgacaggaacttcctcgccaacttcaagaacgcgccgaaatgggccgacgtcaaattatggtttctctcagactgctaatggtacatagcagatttacaagggagtatttactgatggacaagaggtagcaataaaaagactgtctgctcacaacaagacgggtgtttgttatggcttaaaattagattctaaccgtcagaatccgattcttgtagccaaaggcttcacttcttagcttgtttctatgagaatcgtttccatgaaaatcactcaaataatccgcaaataatccgtcaagttttgtcacgatgagaaaaattcgttgctttctagatcctaaactctataaactattctagcttcctctatagtctgcaagtaatcccgcgatatttagattatcttgacaactagactatacaagaatccagattctcagaaaagctctttagaaaaaagctataccaaacatacccctttagatatcgcgatattcaggttttagcaaaacttaagcacaaaatccttgttagactccttggtcgttgcatccatgaagagaagatgctgatatacgaataactgacgaaccaaagcttggaccacttcatttttggtatgcccgtactataaaatgcttattatttcataattgtatgcgttctcgtgtgcagaattaacatttaatgttgtgttacattgcttgtagatccaatcatgcatgcatcacttaaatagaagagaggagtcaaaatagctgatggtatagcccagggactcctgtaccttcacaacctctcctgaatacgcatcgtccatagggtcttgaaagcaagtaaaatcctgttagatttctgatctaaaccctaagatttctgatgttgggatggcaaggatatttccatcggatgccactcaagcaacagccagcagacttgtgggcacatagtaagggtattgttatactagttctgttacttactaatatttctatctaaggaattgtattctgactagccccattctcttcttttctagtggatacatggctaatgaattgcatctgatggccttctctcgatcaagtcagatgttttcagtttagtattaatggtgtatctgtatggtgttctacattatttccttccataaagtattgaactcaaagtacagggggtttcctgtacctccctgttttattgctgttgtctagcattttagctacttctaacagctaaagatacaccatcatacgcatgtaaaaaatcatttctcttttcagacctgggaactgtggaaagacaggagatggaataagttcaatgatcaatcatttggtgatgactacgaactggaagagctgatgaaataccttgctgagttgctgtggtattgttgtgtgttatgagaaaaaaaacaatagatcatcctacaatgcctgatgttgttgcaactcttagcagtgatggcatcacattgccagaaccaaagcagccagcttactcctatgcgaaattaaatgtgtcagtcactgtattgagtagcagaaatgatgtcaccatcactactacaaatggcatataacagaatgtgaatatactgttaatcaagtgtgagctacaggtcttggtc

SEQ ID NO: 141719 - DNA, 962 bp, Zea Mays
gtaagtgctagctcgtccagaacagttattttcttctcaatttttttcttccttttcctttcagctttgcccttttaggaattctttagcgctgtggtcaacattttaattattaaagttaacctaggaaaaaaaactactggtgctactggtgtcagatctgctagcgctcgcaattctcctctccaccacgccggcgacggcagccggtgaccagtacctacatgtccagcctgaggtcgctagccagcgcactgatcggggacgccgcgaggcttcactcggccactggctctgccggggaggagcctgacagggtctacggcgccgtgctctgccgggcggactccgctggtgctaactacaggcgccgccggggtgcccttggcgccatcgacggcgacggccactcaccttgcgcgctccacagcgacgtgaccgtctactccgagctgtaccatctccgtttctctgacaggaacttcctcgccaacttcaagaacgcgccgaaatgggccgacgtcaaattatggtttctctcagactgctaatggtacatagcagatttacaaggtatttccgtgctataacgttattagtatatcacgcatcaaattatgtaaaagctccatatgtgatgaattttgcagggagtatttactgatggacaagaggtagcaataaaaagactgtctgctcacaacaagacgggtgtttgttatggcttaaaattagattctaaccgtcagaatccgattcttgtagccaaaggcttcacttcttagcttgtttctatgagaatcgtttccatgaaaatcactcaaataatccgcaaataatccgtcaagttttgtcacgatgagaaaaattcgttgctttctagatcctaaactctataaactattctagcttcctctatagtctgcaagtaatcccgcgatatttagattatcttgacaact

SEQ ID NO: 141720 - DNA, 1103 bp, Zea Mays
aacctatggagcatggaaggtggcaacttgggattttcacagtacgattactctcatataaaagaagctacaaataacttttcggttgataataaactgggagaaggtggcttcggccctgtatacaagggccaattgagaagtggaattaaaatagcagccaagaaacttgaagcatgttctttacaaggactattggaattccaaaacgaaatccagcttatagcaaagcttcaacacaaaaatctcgttaagctgctgggttgctgcactaaaggagatcaagaaaagatgcttatatatgaatacatggaaaataaaagtctagattacttcatatttggcaaggaccatctcttctacatgtgtaagttgcttacagtatgtcaacagttttgataaattgtacatcttttgcagataatgtgaagggagcagatctaaactggtcaaaacgcctgcacataattaatgggatagctcaagggcttctttaccttcacaattattcacggttatgcgttgtccatagggatttgaaagcaagtaacattctcttggatagtgaaatgaatccaaaaatatcagattttgggatggccagaatattctgttcaaacgcgaaagaatcaaatactacaagaatagtgggcacacatggctacatacctcctgaatatgcttttcatggggtttgctccatcaaatcagatgtttttagctacggggtattgacattggaaattctaagctcaaagaggacggtccaattctatgagtacaaccaaaagctatataatctcatctcatatgcttggcaactttggacggacggaaaatcagatgagctgatttattctcctccaggcaatgtacgtgaagagatagaaaggcacattcaggtggcactcttatgtgttcaagaaaatgcggagcatcgacctgatatggagcgagttgtcacaatgctaaacagtaaggatgtggacttacccaagcctatgcagccagcttacttccatgtaaatcctagtgaggaagaagtttcatcacgaagcattaatatgactatgagtatcacgctggaaaggtagaagcacatt

SEQ ID NO: 141721 - DNA, 945 bp, Zea Mays
cgcagccgccgacgccaaaagcccgctcttctgccccaagccgcgacgccccgcgacgccgctgcggtgccaccagagcggtggcttctccgacgccggtacggaactgctcgacctcctcctcttgaagggcgacgagagcggcctgtcgtcggcgtccccgcagccgccgctgttctacggctcgccgccgcggcgagcgtcaaatccggtggtccacgacagcaggttcggcgcggactgcccgcccgtgcccgtgccggggctgtccgtgcaccggcctagcccgcggccgtcgtcggcggcgccgtccatgtcgccgcgcgggtgcgcccgcgcgcggttcgcgttccagcccgcgaatagttaggtggtatgtcctagttcgtcaattaatgatgctttcttttttggtttttgatggggaattgtttttttctttgttgtccgtccgtccatgcaaccaagaaatttcatggagaatctgtacaaaagagtggctagctactacacgagagtccgttctgagagaagcaacacgaggtcagtcagtggatgagcttagagagagacattcacacgctgagagggttgataatttgtgatattttcctcctttttttcttcttcctgattttgtatattgtatatcctgctggattaacaaatactagcaaccacttatagtcagtcaacataggccatctactgctagtacctcttttcttctcatgagttgtagcagtttctgtttaattcatatgattgtaattacaatcatattttaagttactactataatttctgtttaattacaatcatagtttctatttaattaaaattcatatgattgtaattacaatcatagtttctgtttttgttatccatattttaagttgctactatagttcatatgattgtaattcaaatgattgtaattagttc

SEQ ID NO: 141722 - DNA, 2840 bp, Zea Mays
actagaattatgtctaccttttgcatacattcaacaaactactaccggccccggcccattcctattggctattagtacatacaagtgcagctagcttctgttccactcacacgtcacacgacaccacaccacaccagcatcgcgatccccagccctgtcctctctctcaacgcttagctagtttagctaccaataccatgcttgtcctcttgcccctcctcctcctcgcggtggcgtcctctccggcgccgacgacggcgggcgacggaggcggggccgttccagtggggaacatcttctccttcttctgcagccccaccaactcgagcgtcctgcggacgtaccagcccaacagcacgttcgcgggcaacctccagaagctcgtgtccgagctcccgtcgaacgcgtcggcggcgtcgggcttcgcggcggggaggttcggcgccggcgcgggccccggcgcggcgtacgggaccgcgctgtgccggggcgacttcctcggcggccagtgcgccgactgcctcgccgaggggttctcgcaggcggccagccggtgccccggcagcgtggacgccaccatgtactacgaccagtgccagctccgcttctccgaccaggacttcctcctcgccgccgcctccgccaacaacatgccggagagcaccgcctggaacatgaacagggtgtccgcggggaacgtggccgcgttcgacgccctggtcaaggggctcgtggccgcggcgtccgacgccgccagcgacaggagcagccggtacgccacgggccaggccgggttcccgccggagagcatcaacgtgtacgcgctggtgcagtgcgcgcaggacctcacggcgcggcggtgccgggagtgcctggccggcctcatgggccagatgggcaattttttcgccgggagagtgggcgggaggattctcggcgtgcgctgcgtcatcaggtacgagaaggatgtcttcttcgcgcaaaccccagatatgctcacggtcgcgccgctgctgggttcgacttcgaccaaaggtagtagcagcaccacgctgtgggtcgtcgccgtcgccgtccccgtgtccgtgctcctggcctgcttcctggcgtgcgtcctgtggatcagaaagcggaggaggagagtgaccaatgtgtcaggcacggtgagcgtgcccacaatgtccatggagatggagcaggtgctcaagctgtggcgggtcgaggagagcgactccgagttctccctcttcgacttcgaccagatcgccgacgccaccgacaacttctccgacgaccacaagctaggccagggcggctttgggcccgtgtacaagggtgagctgcccggcggcctggaggtcgcgatcaagcggctgtcgtccgtgtcggtgcagggcctgatggagttcaagacggagatccagctgatcgccaagctgcagcacaccaacctggtgcgcctgctgggctgctgcgtgcaggccgacgagaagatgctggtgtacgagtacatgcacaacaagagcctcgacttcttcatcttcgacggcggcgacagagggagggcgctgacctggggccgccggttccgcgtcgtcgacggcgtcgcgcagggcctgctctacctgcacaagcactcgcgcctgcgggtcgtccaccgcgacctcaaggccagcaacatcctcctggaccgcgacatgaaccccaagatctccgacttcggcatggccaggatcttctgctccaacgtcaccgaggccaacaccacgagggtcgtcggcacgcatggctacatcgctccggaatacgcgtcggagggtctcttctccgtcaaatccgacgtcttcagcttcggcgtcctgctcctggagatcgtgagcgggaagaggaccgccgggttctaccagtacggcaagttcttcaatctcacaggatatgcgtaccagctgtggcaggacgggaaatggcacgagctggtggacccggcgctgggcgacgacctccccgtgggcgaggtgatgaagtgcgtgcaggtggcgctgctgtgcgtgcaggacagcgccgacgaccggcccagcatgtcggaggtggtggccatgctggggagcgagggggtcaccatgccggagccccgccagccggcctactacaacgtccggatcagcagcctcgccgtgtcttcggactcgttcgccgagtcgtcctgcaggatgatcagcaacatcaccctcacggaccacgaggaaggcaggtagagacgtagcggtgcctgctgtagctcgctgacggtaaactgtacaggacggccgttcatatgatctgaaattctgaatacagagacacgagaagaaaaaaacacacggatcgggagatagtaggttaacatagttggtgcaagatatgcccgtgcccatcgacgtgttaacgaacgcttttaggctccagcaattttttggtccacagttgacttggtttgctgaactgcacacctgtggtatttgtatgtgcgcactttagtaggcgacagttagttttacacttgtatgtgcttccgaatttttgtgttatacacccatttttgtcaaaacagttttccactgcaataagaaaaaaaactgatttttttgtgggccaaaataatttccaccgacttcaaaaattggctaatttttatcggtcaacagccgcccgatggaaattagctaattttcatcgattttcgtcacatgccgcgaattctgataggtcatctatgcacagatcatgataatcgtagcagatatatggcgtcgttgattgcttcagtagaaggaacggtaacgtcgctcttttttttattg

SEQ ID NO: 141723 - DNA, 205 bp, Zea Mays
gactcagactcaaactcttcaccctcgggatttctcggaagccggcgcgctataattcaccggactgtccggtgtgcaccggacatgtccggtgctccaaggaagcgcggtctccggaactcgccagcctcgggttcgcgtggcagccgctccgctaaaattcaccggactgtccggtgtgcaccggactgtccggtgtaccagc

SEQ ID NO: 141724 - DNA, 843 bp, Zea Mays
gcttcttttctttctcacttgttcttgagatcacaactccattgtaatcaaggcaagaggcaccaattgtgtggtggcccttgcggggaagttttgtccccgactttgatttgagaagagaaactcactcggtccgagggaccgtttgagagagggaagggttgaaagagacccggcctttgtggcctcctcaacggggagtaggtttgcaagaaccgaacctcggtaaaacaaatctccgtgtctcacttgcctattcgcttgggatttgtttttgcaccctctctctcggaatcgcttatatctctaacgctaacccggcttgtagttgtgtttatatttgtaaatttcagtttcgccctattcaccccccctctaggcgactatcaattggtatcaaagcccggtgcttcattagagcctaaccgctcgaagtgatgtcgggagatcacgccaagaaggagatggagaccggcgaaaagcccactacaagccacgggagcacttcgtcggaagagtcccgcaccaaaaggagggagaagaagaagagctcctccaacaaagggaaggagaagaaatcttcttctcaccacaaagagaagaaggaaaaatcttcttcccacaagccgcatcggaaaggcgacaagcacaagaggatgaggaaggtggtctactacgagaccgacacttcatcaacttctacctccgactccaatgcgccctccgtcacttctaagcgccaagagcgcaagaagtatagtaagatccccctacgctaccctcgcatttccaaacatacacctttactttccgtcccattaggcaaaccaccaacttttgatg

SEQ ID NO: 141725 - DNA, 1132 bp, Zea Mays
atcgaaggctcgaggaagatcaacgagcttgatgatgccaccacatccgaagctcaacccgttgcattcaaagcaacggaggagaagaaggagaagtctacaccaagtcgacaaccaatcgacgcctccaagcttgacaatgaggagatggcgctcgtcatcaagagcttccgccaaatcctcaaacaaaggagggggaaagactacaaatcccgctccaagaaggtttgctacaaatgtggtaagcccggtcattttattgctaaatgtcctatatctagtgacagtgaccgaggcgacgacaagaaagggagaagaaaggagaagaagaggtactacaagaagaagggcggcgatgcccatgtttgtcgggaatgggattccgacgagagctcaagcgactcctccgacgacgaggacgccgccaacatcgccgtcaccaagggactcctcttcccaaacgtcggccacaagtgcctcatggcaaaggacggcaaaaagaaggttaaatctaaatcctccactaaatatgaatcctctagtgatgacaatgctagtgatgaggaagataatttgtgttccctctttgccaaccttaacgtagctcaaaaggaaaaattgaatgaattggttagtgctattcatgaaaaggatgaccttttggattcccaagaggattgtctaattaaagaaaacaaaaaacatgttaaggttaagaaggcttatgctcttgagatagagaaatgtgaaaaattatctagtgagctaagcacttgccgtgagatgattgacaaccttagacatgaaaatgctagtttaaatgctaaggttgattcacatgtttgtaatgtttcaattcccaattctagagataatgatgatgatttgcttgctaggattgaagaattgaacatttctcttactagccttagaactgagaatgaaaagttgcttgctaaggctaaggactttgatgtttgcaatactaccattgccgatcttagagataagaatgatatacttcgtgctaagattgttgaacttaattcttgcaaaccatctacatctaccattgagcatgtcactatttgtactagatgtagaaatgttgatattgatgctattcatgatc

SEQ ID NO: 141726 - DNA, 2266 bp, Zea Mays
atgggcactctcccctacctcttacttgtcgtgctgtcctctctgtcgctcgtcccccgcgccgccgcgtactcggagtactcgtgcaacggtaccacgggcaacttcacggcggccagcgcgttcggcgccaacctggcccgcctcgtcgcggcgctgcccgccaacgcctcctcctctccgtcgctcttcgcctcggcggccgtcggcgcggctccggacacggcctacggcctcgcgctgtgccgcggcgacgtcacggacgccggggtctgctcggcgtgcctagccgacgcgttcggcaggctgcggcggctctgcggcgcggacagggacgccacgttctacgccgacctgtgcacggcgcggtactccggcggggacttcctggcgcggcccgacgacaactcccccgtgatcaacgcgctggacgtgaacgggtcgacgtactacgggtgggacgcccggaacgcgacgagccggaccctgttcctgtcgctggtgggcacgctgttcggggagatggccatgtacgccgcctacaactcctcggccgcgcgcatgttcgcgagcgccgccatgtacgtcaacccgcagctgcccacggtgtacgggttcgtgcagtgcacgccggacctgtcgcgggcgcagtgctgggactgcttccaggtgctccaggaccagaaccggcggtggtacgacggccgcgagggcggccgcatcctcggcgtccgctgcagcttccggtacgaggcgtaccatttcttcggcggcatgccggaggtcagaatcggcctcaagggcgacccatcttcaccagctgcggaaacggaaatccatggtaaacataaaaaaaaatgcatagtctgttactattggtcatttctgttctaaacgatatactgtaggtagcaatcacagggtggtcttaattgtcgctgtcatcgtatcaatcacggcgttctccgctatgatggctgccggccttgtgataatcagagcacgacgacgaaaaggagccgagaagaagagaaagctgcagctggaggcgcaatcccggaacagctctaccacagaggatgcgctgaagctgtggcggatcgaggagagcagctcggagttcacgctgtacgacttcgccgagctggcggccgccacgggcggtttctccgacgagaatctgctcggcagaggcggcttcggccccgtctacaaggggaagctgccggacggcgccgagatcgcggtgaagcggctggcggcgcattctggacagggcctggaggagttcaagaacgagatccagctgatcgccaagctgcagcacaccaacctggtgcggctcgtcggctgctgcgtccaggaggaggagaagctgctggtgtacgagtacatgcccaaccgcagcctcaactgcttcatcttcgaccagcagcgggggccgttgctggactgggagaaacggcgccgtatcatcgagggcgtcgcgcaggggctgctctacctgcacaagcactcgcgggtgcgcatcatccaccgcgacctcaaggctagcaacatcctgctggacaaggacctcaaccccaagatctccgacttcggcatggccaggatctttggatccaacatgacggaggccaacaccaacagggtcgtcgggacatatggctacatggctcctgagtatgcttcggagggcatcttctcggtgaagtcggacgtgtacagcttcggcgtgctgctgctagagatcgtcagcggcaagaggaacactggccaccacaactacggcgacttcgtcaacctgctcggatatgcatggcagctgtggagagacgggagggtgttcgagctgattgacccgacgctgggcgagcgcggcgacgtggcgaccatcgtgcggtgcgtcaaggtggcgctgctgtgcgtgcaggaaagcgccaccgaccggccgaccatggcggacgtcacggcgatgctggccaccgccggcgacgccgcgtccgccgggccgctcccggacccgaagcggccgccgcacttctccctcagggtggcgacgaccagcggcagcgacgacgactgtgggtcgcggacgcggttcaccacgtcgtgcagcaccaacgacctcaccatcacctccatccacgagggcaggtgatttaagcagcggaggcgtcttttgatggtcggtcgatcgagctttcgtgtgaatgagttgacaatccgttggccgttgtcggctgaagacgagacgagtagtgtt

SEQ ID NO: 141727 - DNA, 2787 bp, Zea Mays
atggcatcactatttttatttcacttgacaacagccttgaaaaatggtggtcttcgccatgatatccattactggattggtaaagacactagtcaggacgaagttggaactgctgcgattttaacagtagagcttgatgctgctcttggtgggcgtgctgttcagtaccgagaaatacatggcaatgaaacagaaagattcctgtcctattttagaccatgcatcatgccacagccaggaggagtggcatctggattcaaccatgttgaggtcaatgagcaggactacaagacccgcttatatgtctgccatggaaagcatgttgttcatgttaaagaggcaagttatctgcgtgactgtctttttattcaaatatgggttccctttgctcgatcatcccttaatcatgatgacatatttattctggatacgaagtccaaaattttccagttcagtggctcaaactcatccatccaagagcgagcaaaagctcttgaagttgtgcagtacatcaaagacacatttcatgagggcaagtgtgaaattgcatctgttgaggacggtagaatgatgtctgatgcggaagctggtgaattctggggtttttttggcggctttgccccactccctaggagggcacctgcagaaggcaatgagaaacaagaggaaactgctttcaaattgctatgttttgaccaaggaaagctggagcctgtcaactgcaaatctttagcacatgaattacttgagacaaacaagtgttacttcttagactatggtgctgaattgtatgtttggatgggcagaattacatccttgcaggagagaaagggtgctagtgaagctgctgagaaattgctctctgattcaagccgaacaagaacacctatgatcaaagtgattgaagggtttgagactgttgcattcaagtcaaagtttaaagagtggccacaaacgcctgggttgaagatgtcatcggaggatggaagaggccaagttgcagctcttctcaaacgccagggcttaaatgttaagggtttgatgaaagctgctcctgcaaaagaagaacctcaatcctatattgattgtactggcaacttgcaggtttggcgtgtaaatgataaagacaaggttccactctcatcctctgaccaatccaaattttacactggcgattgctacatatttcagtatacttatcctggagatgataaggaggaatgtcttgttggaacctggtttgggaaaaagagcattgaggatgataaggtaatagcagtctcacttgcaagcaagatggttgaatctgctaagtttcaggctgtccaggcacgcttttatgaggggaaagaaccgattcagttctttgtgatatttcaaagcttgcaagtgtttaagggtggcattagttctggatacaagagatttatcgctgaaattggtattgatgatgaaagttattctgaagatgggcttgcactctttcgtattcaaggttcaggaccagaaaacatgcaaacgattcaagttgaacctgtggcctcatcattgaattcatcatattgttacattctacatgatggaaacactgtgttcacttgggctggaaatctgaccactgcattggatcaagagttaatggaaaggctgcttgatgttattaagccaaacacacagtctaggtcacaaaaggaagggtcagaaacggaccagttttggagcttactgggaggcaaatctgagtactcaggccaaaaaatggtgcaagaacttgaaagtgatccccatcttttctcatgcatcctgtcgaaaggcaatttgaaggtcaaagaaatgcaccactttactcaagatgatttaatgacagaagatgtttttgttctggactgtcacacgagcatattcgtttgggttggtcagcaggtggatgttaaactcaggttacaagctctggatgttggggagaaatttattgtgcttgatttccttatggaaaaccttgcccgtgaaacaccaattttcaccattatggagggaagcgagcctctcttcttcactagattcttcacctgggacttggcaaaatcactgatgcatggaaattcataccagaggaaactcgcaattgtaaaaggtggaggtgctccagcgttggataaaccgaaacgacgaacatccatctattcaggaaggagtactgcacaagataaatcccaacgccccagaagcatgtccttcagccctgagcgtgtccgtgttaggggaagatctccagcattcactgcattggcagctacttttgaaagttcaagcaacagaaatctttcgactccacctgtagttaagaaactttacccgagatctgttacacctgattcatcgaatacttccaagtcatctgtaattgccgctctggctggttctttggatcgcccttctcaaactcctgctccagcattcatgaaagatggttctgagtcagagaagccaaaacaggagggagatggtaaaggtgttcatactgtggccactagtgttgaatctctgactataaatgaagatgtaaaagaaaacgagccagaagatgaagacggccttcctatttacctgtatgaacgtctgaagaccacagctgttgatcctgtcactgaaattgatgtcacgaggcgagagacctacttatcttcgactgaattcagagagaagtttgggatgacaaaggaagcatttagcaagcttccgaagtggaagcggaacaagctaaaaattgctcttcaacttttttag

SEQ ID NO: 141728 - DNA, 2444 bp, Zea Mays
cacggccggctctccgctccgccagacccggaccggcaccacgccacggctccggccatcacgcgccgcgcacaccatgaccacggttgcgcaccatcaccacctcgccgctgccaccgtgctcttcttcgtcgcattcaccatggcgcctctcgccgccggggaccccgtgggccagctctgcggtaccagcggcaactacacgctcaacagcacctaccagggcaacatccgccgcctcgccgccacgctgccgaagaacgcctccacctccgcgacgctcttcgccacggacaccttcggcgccgtcccggacatcgtctacgcgctcgcgctctgccgcggcgacaccaacgcctccgcctgcagcggctgcgtcgccgccgcgttcctggacgcgcagcagctgtgcgcctacaacaaggacgccaccatgttctacgacccctgcctcctccgctactccaaccagaacttcctcgccgaccccagcagcgatggccgcgggaccgcgctcatcctcatgaacacgcagaacgtcaccgcgcggttcaaggtgttcgacgccgccgtcgccgcgctcctcaacgccaccgccgcctacgcggccgccaattcgtccaaaaggttcggcaccggggtcgaggcgttccagaacttcgacagcaaccgcccgaggatctacgggctggcgcagtgcacgccggacatgacgccggccgactgccagagctgcctctcgggtattatccagacggggcccaagtatttcagcgggaagcagggtggcaggattcttagtgtgcggtgcaactacaggtatgagcagtacccgttctttacaagcaccccactgcttcagctggcggagcctaccgtgggggccccggcgcccgcgcccgcggtggtcaacggaactccaacgccaccgacgaccggaggagcacgacgaggaacaacaggaaataaaactggtagagttttagccattacactgcctatagttgctgcagtgctagctactgtagtactttgttcatgcctctggaggaggaagaggaaaacacaagggaagtcgtcactaccagatacaactaaccctgaggacatacaaagtattgattccctcattattgatgtgtcaactctacgagctgcaacagaaaactttgctgaagccaataagctcggtgaaggaggttttggttcagtatataagggaatcctccccgatgaccaggaaatagcagtgaaaaggctctcgcagacttctagacaagggatggaggagctgaaaaacgagcttgtgttggttgctaaactgcaacacaagaatttagtgaggcttgtcggggtttgcttggaggaccatgaaaaattgcttgtctatgaatacatgcccaacaaaagccttgacaccattctatttaatcacgagagatgtggagagctggattgggggaagaggtttaagatagttaacgggatcgcccgtggcttgcagtaccttcatgaagattctcaggtgaagataatccacagggatcttaaagcgagcaatgttctgttagacaatgacttcaaccctaagatctcggattttggcttagcaaggctattcggaagtgagcaatcacgagatgtcaccaaccgcgtcgtcggaacctatggatacatggcccctgagtacgccatgcgtgggcactactctgtcaagtccgacgtgttcagcttcggcgttttaatcctagaaatcgtcaccggaaggcgaaatggtggctcctatagctctgaggaatcggccgatctccttagtctggtgtgggagcactggacgacggggacattggtggagatcatggatccatccttgagcagccttgctccacgagacctgatgttgaagtgcatccacatcggcctcctctgcgttcaagatgaccatgaggacaggccgatgatgtcgacagtgaatgtcatgcttagtagcagcacggtgaccctccaagctccatcgaggccggcgttttgcttcccgaagagtggcttcaactcagagatcaactcagaagtgtacccgccaggagcttatcagtccgcgagcaggtcgcccatgtcgctcaacgacgtctcaatcactgagctcgagcccagatgatccatgcatggcggcgatgaattgatgattctcttcttcgaaggagtttctgttgagtgtttgtgttttaccgcctgggccgagcacgtaagtgtgacccgtagtatacaatgcaaaaccagtagactaccaatatggcgaaatataacgcctattagtcgtccaattacttatgtatctgtatggcattgcctttcaaatgtagaggagagtagaaatgagaacgtggataagagaatgtatcggtggttcctgattcctgaaaatgtcatcccagtattggttg

SEQ ID NO: 141729 - DNA, 2319 bp, Zea Mays
agaccacgacggcgacgcacaggccagaggccacggcactaccctcctctatatcactgctcgccacgcaagacggcacgagcagccgtaacgccatggcaacggccacggccgcgttgggtcgcgtcgcctccccgcgcctcgtcatgggctaccttctcttcctcaccgtcgcctccctcctcctcttctcgccgcgggccgctgcgcaggcgtggcagctctgcgggaacaccggcaactacacggccaacagcacctaccagtccaacctcgaaagcctcgccaaggcgctctccgcgaacgcgtcccgctcgaggaacctcttcgcggagggcagcgtcggcgccgtcccgtatgtcgtctacgcgctcgcgctttgccgcggggacaccaacgccacggcctgcggctcctgcgtcgccacggggtttcaagacgcgcagcagctctgcccctacaagaatgacgcggccgtggtctacgacgactgctacctccgcttctccaaccaggatttcatcgccagcaccaccgacaacggcaatgataacatcatcctcatgaacactcagagcgtgagctcgccggtgcaggcgttcgacgccgccgtcgtcatgctcctcaacgccaccggcgactacgcggcggcgaactcgtcgcggtttgccacgggggaagagggcttcgacgccagctaccccaccatctacgggctcacgcagtgcacgccggacatgtcgtccgcagactgccggagctgccttgggagcataatatcggcgatgccagggtctctcagcggaagtaagggcgggaggattatagggacgcggtgcaatttcaggtacgaggtgtattctttcttctccggagcgccctcgctacgtctgccagcggcgtcgccaccggcgccactgccatctcctacggcatttaacgtgacgccgacggcaaccccaccaggaagaaccagaaccaaaacaggacttgctttagcaattgtgttgccgataattgctgcggtgctagcgatcagttttgtttgtctatgtttcttctcgaggaggagaaaacaagcaagggagcagacaccatcttattcaacaattgctggagacatggaaagcatcgagtcacttctttttgatatatcaactttacgtgccgcgactggtaactttgccgagagcaataggcttggtgaaggaggctttggtgctgtctataagggcatccttcgtgatggtcaagaaattgcagtgaagaggctgtcacagagttcagggcaagggatacaagagctgaaaaacgagcttgttttggttgccaagctccaacaaaagaaccttgttaggcttgttggtgtttgcttgcaagaacatgagaaactgcttgtgtatgaatacatgcccaatagaagcatcgacaccatccttttcgatcctgagagaaacaaggagctagattggggaaccagattcaagataataaatggaattgccagaggactacagtatctccatgaggattctcagctgaagatcattcaccgggaccttaaagcgagcaatgtccttttagactctgattatacacctaagatttcagattttggcctggctaggctatttggaggggatcaaacccgggagattacaagtcgcgttgttggaacatatgggtatatggcacccgagtatgccatgcgtggccactattctataaagtccgatgttttcagctttggcgtcttggttctagaaatcttaaccggaagaagaagcagtggttcctttaacatcgaccagtctgttgacctcttaagtcttgtttgggagcactggaccatgggaacaattgctgaggttatggacccatctctgagaggcaaagctcctgcacagcagatgctgaaatgtgtccacatcgcgctactgtgtgttcaggacagtccggtcgataggccgatgatgtcgacagtaaacgtcatgctcagcagcagcacttcctctctccaggctccgttgaagccagtatttttcattcccaagagtggttattactcaactgtttattcagaatcatatcctacagcttcccaaaccacaggggcggtatcaccaaatgaagtgtcaattacagaattggaaccaagatgagccttgaagcatcatgttgccacttgctagagtaattggattattatattgcatgaataaactggacatagcgcaatgctctagcgtctgtattactgacttttcagttatgtttccactggcccctctaattataaagtcgtatatttcagttagc

SEQ ID NO: 141730 - DNA, 119 bp, Zea Mays
tttttattttacaaaaaatcatgtatacatatgtacaatttatattcaatattataaacatttaagtatgatgttctactggttagatcccaccttctgcaccgtttttaacattttac

SEQ ID NO: 141731 - DNA, 1717 bp, Zea Mays
gtggcgccgcggtgggagtagtactgactgtcactcagtccccgggcgggcctagataagctggctcccaattctttccgccatgcgttactgtaccaatggctccccacctcctggccgtggccgtggccgtggcggccatcatcgccaccgtctcgttgctggcgcccggcgccgctgcctacccgtggccagtttgtgggacgagcaacgacttcgagcccaacagcacataccaggccaacctcaacctcctcgccgccatgctgcccaacaacgtgtccgcatccccggtcctctacgccaccgccgtcgtcggcgccgtcccggagcaggtctggggcatgggactctgccgcggcgacgccaacgccagcagctgcctcgcctgcctcacccaggcgttccaggacctgcccaacgactgctcctacaacaaggacgccgccatctactacgacccctgcaccctccactactccgacgtccacaccctcgccgacgacgacaccggcccgacgaccatgtcgtacaacatcaacaacaacgccaacgtcacctcggacccggcccggttcgagcgcctcctcgccgccctcgtcaacgccaccgccgagcacgccgcgtccaactccacccggcgattcgccacgggggaggccgacgccgacttcgaccggcagttccccaaggtgtacgcgctggcgcagtgcacgccggaccagacgccggcgcagtgccgcaagtgcctcgccggcctcatatcgcagtcgctggacgggttccagaacaacatcggaggcagggtgctctgggtcaactgcacctggcggtacgagacctcgcccttcttcaatggaccggccatggtgcgcctggcatcgtcgtcgagccctccggcagcggcagcggcaggtggaggggagaggaagtacagcgtgttcatcgtggttcttgcagttgtgctgcccactctagctgccctgaatcttgtgttttgcttctgtttctggcggcggccagcaccacaggcaaagcagtcacagcccatgtattccaccgaagcagaggacgtggaaacggtggactccatgatgatcgacgtctccgccctgcgagccgcaacagggaatttcgacgagagcaacaagctcggcgaaggcgggtttggcgcggtgtacaagggcgtcctcccggacggcgacgagatagcggtgaagcgtctgtcgaagagctcgacgcagggagtggaggagctgaagaacgagctcgcgctggtcgccaggctgaggcacaggaacctcgtcaggctcgtcggcgtgtgcctggagcagcaagaacggctgctcgtctacgagtttgtccccaaccggagcctcgacctggtactcttcggtaccgacacgcgtgagccgctcagctgggagcagaggtacaggatcataaacggcatcgctcgaggcctgcagtacctccacgaggactcccagctcaaggtagtccaccgtgatctcaaggccagcaacatcctgctagacgtggagatgaaccccaagatctcagatttcggcctcgcgaggatcttcggccgggaccagacgcaggccgtcaccagccgcgttgtcggaacctagtcagcacccatctctctcagtctcagagctagctgtttgatctcccgtcccctattaggcttaactgatgagtactttgctgc

SEQ ID NO: 141732 - DNA, 2259 bp, Zea Mays
gtggcgccgcggtgggagtagtactgactgtcactcagtccccgggcgggcctagataagctggctcccaattctttccgccatgcgttactgtaccaatggctccccacctcctggccgtggccgtggccgtggcggccatcatcgccaccgtctcgttgctggcgcccggcgccgctgcctacccgtggccagtttgtgggacgagcaacgacttcgagcccaacagcacataccaggccaacctcaacctcctcgccgccatgctgcccaacaacgtgtccgcatccccggtcctctacgccaccgccgtcgtcggcgccgtcccggagcaggtctggggcatgggactctgccgcggcgacgccaacgccagcagctgcctcgcctgcctcacccaggcgttccaggacctgcccaacgactgctcctacaacaaggacgccgccatctactacgacccctgcaccctccactactccgacgtccacaccctcgccgacgacgacaccggcccgacgaccatgtcgtacaacatcaacaacaacgccaacgtcacctcggacccggcccggttcgagcgcctcctcgccgccctcgtcaacgccaccgccgagcacgccgcgtccaactccacccggcgattcgccacgggggaggccgacgccgacttcgaccggcagttccccaaggtgtacgcgctggcgcagtgcacgccggaccagacgccggcgcagtgccgcaagtgcctcgccggcctcatatcgcagtcgctggacgggttccagaacaacatcggaggcagggtgctctgggtcaactgcacctggcggtacgagacctcgcccttcttcaatggaccggccatggtgcgcctggcatcgtcgtcgagccctccggcagcggcagcggcaggtggaggggagaggaagtacagcgtgttcatcgtggttcttgcagttgtgctgcccactctagctgccctgaatcttgtgttttgcttctgtttctggcggcggccagcaccacaggcaaagcagtcacagcccatgtattccaccgaagcagaggacgtggaaacggtggactccatgatgatcgacgtctccgccctgcgagccgcaacagggaatttcgacgagagcaacaagctcggcgaaggcgggtttggcgcggtgtacaagggcgtcctcccggacggcgacgagatagcggtgaagcgtctgtcgaagagctcgacgcagggagtggaggagctgaagaacgagctcgcgctggtcgccaggctgaggcacaggaacctcgtcaggctcgtcggcgtgtgcctggagcagcaagaacggctgctcgtctacgagtttgtccccaaccggagcctcgacctggtactcttcggtaccgacacgcgtgagccgctcagctgggagcagaggtacaggatcataaacggcatcgctcgaggcctgcagtacctccacgaggactcccagctcaaggtagtccaccgtgatctcaaggccagcaacatcctgctagacgtggagatgaaccccaagatctcagatttcggcctcgcgaggatcttcggccgggaccagacgcaggccgtcaccagccgcgttgtcggaacctatgggtacctagcaccagaatacctgatgcgcgggaactactccgtgaaatcggacgccttcagcttcggcgtcatggtgctggagatcgtcaccgggaggaagaacaacggcagctcccacaagtccggagacctcttgaccaccgtatgggagcactgggaggccgggacggtggcggagctggtggacccgtccctgggcggaagcttcccggagggcgacgtgctgaggtgcatccacatcggtctgctctgcgtccagggggaccccgctgcccgcccggtgatgtcgtccgtcgtgacgatgcttggaaccgacacggtcaccctccaggctccatccaagccgggattcttcgccagaaagagtggcactagcacgaccgtgtccgctgatgatgggtcgatttagagattgccactagagtacagagttgccagaaagagtagctcctttttttaacgatagccatctctatcgctaataagatcctgcgttttattagtatgggaggcatgggattattgaaggtctccttgactctaaagaaaatgtcttaggacagacttgagcctaaacgtctttgttcaaccaaaactttctaaacccttcccattttgattgc

SEQ ID NO: 141733 - DNA, 803 bp, Zea Mays
cacgcacctttggttgctcagcatgtctcgcgggtcctgccgtctcgtcgccactactgactactgaggagaggagcatggccctgactaacgtcttcgtcgtcctcctgagtaccgcattggctgtgctccccttctcccctgccgatgccggcgtggtgggcgtgagctacggccgattagggaacgacctgccgggcacggcttcggtggtaaagctgctgaagaagagcggcatcacctcggtgaggctctacgacgccaactcaaaggtgctcaaggccctggccaacaccgggatcacggtgatggtaatgctacccaacgacaagctcgccgtccgcgggcaggttccgggacgacatcgcgcggtcggtgatgaagcccatgatcgatttcctggagcggaccgggtcgtacctcaccgtgaacgcctacccgttcttcgcgtacgccgaggagccagacaagatctccctcgactacgccctggggaactccaacgccaccggcgtgcgcgaccccgtgaccgggctcgtgtaccacagcctcctggacgcccagctcgacgccacgtacttcgcgatggagaagctggggacgtccagatccagtgcgcgggggccaaaatccgtggcgccagcagcgcacgtttcggagagcgggtggccttccggcggcaaacccaaacgcggcggcaggccgcggccacgcccacgcggcggcgggaggcgtttggagttggagcaggctggaggtgaagcggcttcggtagccaacgcgcaagcgtacaacaactacct

SEQ ID NO: 141734 - DNA, 2076 bp, Zea Mays
cacgcacctttggttgctcagcatgtctcgcgggtcctgccgtctcgtcgccactactgactactgaggagaggagcatggccctgactaacgtcttcgtcgtcctcctgagtaccgcattggctgtgctccccttctcccctgccgatgccggcgtggtgggcgtgagctacggccgattagggaacgacctgccgggcacggcttcggtggtaaagctgctgaagaagagcggcatcacctcggtgaggctctacgacgccaactcaaaggtgctcaaggccctggccaacaccgggatcacggtgatggtaatgctacccaacgacaagctcgccgcggcggccgcggacccgtcgagcgcgcgacggtgggtgcggaggaacgtggcggcgtactaccccgccacgcagatccacgccgtcgccgtcgggaacgaggtgttcgaggaggccaagaacctgaccgggcagctcgtcccggccatgtccaacgtgcacgacgcgctggtgaagcttggcctggacggggccgtgaaggtctcgacgccgatcgcgttcaccgcgctccaggagtcgtggccgccgtccgcgggcaggttccgggacgacatcgcgcggtcggtgatgaagcccatgatcgatttcctggagcggaccgggtcgtacctcaccgtgaacgcctacccgttcttcgcgtacgccgaggagccagacaagatctccctcgactacgccctggggaactccaacgccaccggcgtgcgcgaccccgtgaccgggctcgtgtaccacagcctcctggacgcccagctcgacgccacgtacttcgcgatggagaagctggggacgtccagatccagtgcgcgggggccaaaatccgtggcgccagcagcgcacgtttcggagagcgggtggccttccggcggcaaacccaaacgcggcggcaggccgcggccacgcccacgcggcggcgggaggcgtttggagttggagcaggctggaggtgaagcggcttcggtagccaacgcgcaagcgtacaacaactacctgatcaagcgcgtgctgtccggtgacacgggcaccccgtaccaccccgacgccgacatggacgtctacatcttctccctcttcaacgagaaccagaagggcgacggggcggacgacgtcgagcagcacttcgggctgttctacccgaaccggacgaaggtgtacgagttcgacttccggggcggcgcgctggtggccagctggtgcgtggcgaacgcgtccgccggggacgcgcggctgcaggcggcgctggagtacgcgtgcggccacggcgccgactgcggcgccatccagcccggcgcgccgtgcttcgagcccgacaccaggctcgcgcacgcctcgtatgcgttcaacagctactaccagcgcaacggccgggccaaggcggcgtgcgacttcgacggcgccgcctacgtcgtgtatcacgaaccagctggcacctgtgacccgaacgtgagctggtgcgtggcgaatgcggcggccggcgacgcgcggctgctggcagcgctgaactacgcgtgtgccaacggcgcggactgcggcgccatacagcccggcggagcgtgcttcgagcccaacaccgtggtcgcccacgcctcgtacgcgttcaacagctactaccagcggaaggggcggggcagcgggacgtgcgacttcgccggagccggttccgtggtctaccacgcgccaaagattattgggaagtgcgtcctcccgtcgaaagcttggattcaagaaacaacaacagtcaagtctagaggattcaagacaagttcggtttaacctcgtactaggaacgtagaataatgtaaacattggcatctgcacatcaggataactgatgtctttgtgttgctttgcttttcggacactcatgaaccatcgttcctgtttcctgaggcggatctcctgctaggtttggttcccggcttctggctttatcggatactgtagcttttttaaaaatacatctggggtccttaacttttttatattctcagctacgctatgaaactaaaaaaaaaaa

SEQ ID NO: 141735 - DNA, 465 bp, Zea Mays
cgtcgccggccgtgactccagctgtccctcactgctgaaagcgtgaaacatgtctcccacgtgggggatccagaaatccagtgaactgtaggctcacttttgtttgcttgcattgtgtggtcaccgcagagattattgggaagtgcgtcctcccgtcgaaagcttggattcaagaaacaacaacagtcaagtctagaggattcaagacaagttcggtttaacctcgtactaggaacgtagaataatgtaaacattggcatctgcacatcaggataactgatgtctttgtgttgctttgcttttcggacactcatgaaccatcgttcctgtttcctgaggcggatctcctgctaggtttggttcccggcttctggctttatcggatactgtagcttttttaaaaatacatctggggtccttaacttttttatattctcagctacgctatgaaactaaaaaaaaaaa

SEQ ID NO: 141736 - DNA, 2257 bp, Zea Mays
cacctttgctacgctggagagcggatcaatggcgttcactctccgcctcgggacagcatttctggtgctcctcctcttctcttgtgccgcagaggcgggcgaggttggtgtgaactatggaatggtggcgaacgacctgccgaaccctgcgtcggtggtgcagctgctcaagcagaacggcatcaccatggtgaagatatatgacgccaacgcaaccgtgctgacgtcgctggccaacacgggcatcaaggcgatggtgatgatgcccaaccagaacctggcccacgcggccagggacccggtgtacgcggcgcagtgggtgcaggacaacgtgaagaagtacttacccaggacgcagatcaacgccgtcgccgtcgggaacgaggtgttcgacgacccgaacgtggacaagatgaccctcgtccccgccatgaagaacgtgcagaaggcgctggcggatctgggcctcgccaacgccgtcaaggtgtccacgccgatcgccttctcggccgtcagggattcgttcccgccgtccggctccaggttccgggacgacatcgcgcagccggtgatgaagcccatgctgcagctcctgcagcggaccggctcgttcctcaccgtcaacatctacccgtgcttgacccagatgcagcagccggacgacatccccctggactacgccctggggaacgcccagcacgccgtgctcgacggcagcaacaagtactacagcctcctggacgcccagctcgacgccacgcactacgccatggaggccctcgggttcggcaacgtggaggccgttctcggggagaccgggtgccccaacaaagggaagataggaaagcacagaccaccccggcgtggcgtcggaagcagcaggcgccgtctgttggatgacggaggctcagagcctgaggcctcggtcgccaacgcccgagcgtacaacaactacgtcatcaaccgcgtgctgtccggcaacacgggcaccccgcaccgccctcgcgccgacatgcacgtctacatcttcgcgctcttcaacgagaacaacaagagcgccgatccggacgacgtggagaacaacttcggcttgttctaccccaacatgcagaagatctacgacttcaacttccgcggcggcggcggcggcggcggccaaccgccggcaggcccggcggcggcgagctggtgcgtggcgaacgcggccgtcggggacgacaggctgcagcaggcgctggactacgcgtgcggccacggggcggactgcagcgccatccagcccagcgggtcgtgcttcgagccggacaccaagctcgcgcacgcctcgtatgcgttcgacagctactaccagcggaacggccgggccaccagcgcgtgcgatttcagcggcgcggcctccatcgtctaccaggcaccagccgtcacttgcagcagcgcgaagccaagctggtgcgtcgccaagccaggggccgggggcgcacagctgcagcaggcgctggactacgcgtgcggccacggcgcggactgcagcgccatccagtccggcggctcctgcttccagcccgacaccgtggccgcgcacgcctcgtacgcgttcaacagctactaccagcggaacggccgggctagagtggcgtgcgacttctccggcgccggctctattgtttaccagcaacccagcttctgcgccgcgacggcaagctggtgcgtggcgaacccgggtgtcggggacgcgcggctgcaaacggcgctggactacgcgtgcggccatggcgcggactgccgcgccatccagcccgggggagcgtgcttccagccggacaacaaggcctcccatgcctcgtacgcgttcaacggctactaccagcgcaacaaccgggctagagtggcgtgcgacttctccggcgccggctctattgtttaccagcaacccaaggtgggaaactgtgtgcttccatcgaacgccggctgatcaactcgagaaacaaaactacatcacatttagcttgcttgaggcgacgatatgaagatgctaacatatatctcgatcagtatttctgggatgggaataaattttccatcgttctgcgtggcaaactattatctaataaattattaataaaatcctgcgcctgcaaatcgactgtgccgggtgctccctcccctcaaatctttgcaatagtacgtgtaataccacatgtcaacgtgttgtcttcactgctaataatgcatgctattggtacttctgtacaatctc

SEQ ID NO: 141737 - DNA, 927 bp, Zea Mays
cccaaattaaagggccatatataccgacccgaacgccgaagcaatataattcggtggaccaccactcaaaggacgcgtacgtacgggccgggagcgagcatgaataagatcgcctccgccggagcactgctggccgtggtagcggtggttgcggcgttggccgcgacgacggcgtcggcgaaggactacacggtgggcgggtcagacaggtgggacacctacgtcgactacggcaagtggaccgccggcaagacgttcatggtcggcgacaccataacgttcgagtacatgccgtaccacaacgtgctggaggtgacggcggcggactacgccagctgcaacgccggcagccccatctccacccactccggcggcagcaccgccttcaagctcaccgccacgggcacccgctacttcatctgcggcatcccgcgccactgcctcaacggcaccatgcacgtcacgatcaccaccgttccctacgattccgccaccgccgcggcaagcggccccgcgcaggctccgctccagtcatcctcatcgcctccagcagccgacgcctacgcgcccggaccggcggcgggacacaaggtggccctgggcgctgcagggaagtcgccggcgggcgcaccgagcagcgcgccgcggtatcagcagcccgcggccgcggtggctgggctggcggtggccgctctggtggccttggtcgcctaagctagcaacgtgcgtgtaatttgcacgcacgttgcagttttgactttttgagttactgcttactgctgctgtactgtacctgaaacaggacttctgttactgcgaacgtacaagcggtatattcatttgtgcttcttctttttactcttgtcgtgtgtttatattcggtacatgggtgtaaattgtgatatttacttcttataattccatttt

SEQ ID NO: 141738 - DNA, 1163 bp, Zea Mays
ccaaagttcttcaggacgcagtccccgcgaatcacaatggcaacaacctgctgtgctacatatgccagctcgggatggtatcgatatccaaaatcatcagctcaccctgcacatgcgcattcctgggcgactatacggaaagataggtttttgcatcgctggagaagcgctgcaaagtcgcattccagatctcccctgcctccgctgtataaatagaccctcaagctccctgcaacatccatcaaggcccaagctcagcgaccaccaagcagagcaagccagtgaggtctctcagagcgtagccagccagctacaatggcggggaacgcgctagccaactatgtccaggtctacgtcatgctcccggtaagctgcttaagaatcatgtgcggctgcagcattattagcatactgctaccagtttgtataacgaacaaaaaaaaggagagatcgacctaaacgaatcgtgccattccaaaaaaggaaagatgaagctgaatgatttacacccccccccccccccccctttttttgtcaactctgcttggcttgcgaacatgcagctggatgtcatcactgtcgacaacacgttcgagaaggaggacgagacgagggcgcagctgaagaagctgacggaggcgggcgccgacggggtcatgatcgacgtctggtgggggctggtggaagggaaggagccgggagtctacgactggagcgcctacaggcaggtgttcaagctggtgcaggaggccgggctgaagctgcaggccatcatgtcgtgccaccagtgcggcggcaacgtcggcgacgtcgtcaacatcccgatcccgcagtgggtgcgggacgtcggcaaaagcaaccccgacatcttctacaccaaccggagtgggctgacgaacatcgagtatctcacgcttggagtggacgaccagcctctcttccatgggagaactgccattcaggtcagctgacttgaaactcctgccctcttggtgtacctagcacatgcagaacgaaaggaagatggtaaaatcaagcgaacttctctgtctgtctgttgcagctgtatgctgattacatgaagagcttcagggagaacatggcagacttcttggatgctggtgtcgttgtggacattgaggtgggacttggccctgctggcg

SEQ ID NO: 141739 - DNA, 2047 bp, Zea Mays
ccaaagttcttcaggacgcagtccccgcgaatcacaatggcaacaacctgctgtgctacatatgccagctcgggatggtatcgatatccaaaatcatcagctcaccctgcacatgcgcattcctgggcgactatacggaaagataggtttttgcatcgctggagaagcgctgcaaagtcgcattccagatctcccctgcctccgctgtataaatagaccctcaagctccctgcaacatccatcaaggcccaagctcagcgaccaccaagcagagcaagccagtgaggtctctcagagcgtagccagccagctacaatggcggggaacgcgctagccaactatgtccaggtctacgtcatgctcccgctggatgtcatcactgtcgacaacacgttcgagaaggaggacgagacgagggcgcagctgaagaagctgacggaggcgggcgccgacggggtcatgatcgacgtctggtgggggctggtggaagggaaggagccgggagtctacgactggagcgcctacaggcaggtgttcaagctggtgcaggaggccgggctgaagctgcaggccatcatgtcgtgccaccagtgcggcggcaacgtcggcgacgtcgtcaacatcccgatcccgcagtgggtgcgggacgtcggcaaaagcaaccccgacatcttctacaccaaccggagtgggctgacgaacatcgagtatctcacgcttggagtggacgaccagcctctcttccatgggagaactgccattcagctgtatgctgattacatgaagagcttcagggagaacatggcagacttcttggatgctggtgtcgttgtggacattgaggtgggacttggccctgctggcgagatgaggtacccatcgtatccccagagtcagggatgggtgttcccaggcgttggagaattcatatgctatgataagtacctgcaagcagacttcaaagcagcagcagaagaggctgggcatcctgagtgggatttgcctgatgatgctgggacgtacaatgacactcctgagaagacccagttcttcgcggataacggaacataccagaccgacaaggggaagttcttcctcacatggtactcaaacaaactgatcaagcacggtgataagatcttggacgaagcaaacaaggtcttcctgggatgcaaggtgcagctggcaatcaaagtctctggcatacactggtggtacaacgttccaaaccatgcagctgagctcactgccggatactacaacttagatgacagagatggctacagaaccatagcacacatgctcacaaggcatcgtgctagcatgaacttcacttgtgctgagatgagggacagtgaacagagttcagaggcgaaaagtgcacctgaggaactggttcaacaggtgctgagtgctggatggagagagggcctaaatttggcatgtgaaaatgcactcaaccgatatgatgcaacagcttacaacaccatcctcaggaatgcaagacctcaaggcatcaacaagaatggccctccagaacacaagttgcacggattcacctacctccgagtatctgatgaactgttccaggaacagaactacaccactttcaaaacttttgtcaggagaatgcatgctaacctggattataatccaaatgtcgatccagttgcaccattggaaagatcaaaggcagagataccaattgaagaaatcctagaagtagcacagccaaaattggagccatttcccttcgacaaggacaccgacctaccagtttaaacactccaatgatgcaaactacaggaagaatcacgagacacttaaaaaatcaagacaaatagtaagcctattgtcgagcagtagtctattaactaaataaaatgctgtgtggagcatattataatcgcatattgccctaataatattgtgttgttaaacctgaggcttgatggttatctgatgagttgtaataatagccttggtcttcctgttgtatgtatgtatttgagctaaggaataaaaattgtggctttgtgggttattt

SEQ ID NO: 141740 - DNA, 1274 bp, Zea Mays
cccaacactgggctttgtaaatatattatcgcgaacgttgcaattggatctatagtattataacagacatttctttgtaattttgctattgtagctactattaaccgttttcgactgccatcaacccaaatcgtgtgcctatgctgttgttcaagaacctgtcaaggacttcgttcaagaacaccaccaggggtagtcgctgagctcggagcctcggacacgaggacgccgagggccatgcacacatccatgggcaggccggacacatcgcacacggcgacgcagttgctcagcttatcgagcgcgcgcatgtcgtcgaccatgcgctgtcactgcaggttggccgcgccgccgtcgtctttgagggaggcgatgatcccgtgcaggagcagcgtgcccacgacaatccccagtccccacgcgcgcacctcgcgctgtaaggagaaacaattaatctctcttttttagattccagacgactagcttcttccttctcttcccttgctttgatttcttccctgacacctgaggtgtctgcaaagaaccagcagcgagctaagctaagctaaactcggttcttcatatacaagagctagcaaaagcaccaacagtatcaaagcagatgtcttctcccaaaaggtgtagctcctgattagccctcacaggcgcaacggccttcgcttgcaaccatacatctccaccgccctcgcaggtgcaacgggctttgctctcgacgcgtcaccgcagccatggggactcatgttccaggctagccgcaacacgctcctctgttgaaccgacgcacatgctcctccaaggaatgggcgccgctaaagaagacgcggatgaatgggaggaacgaaagactccgatctgttctaaataatggaaagttatcggttaataccggcgacaataacaaaactacaaagaagcggctattataatactataaatccaattacaacgtttgggatactatttttaagaagcctagtgttcgggataccgtagttcaaaaaaactcaaatctatatgctttaatgatgagtcaatcaaccagttgagtgtggatattgatttaatgtatcctatcgagacattcctctgaaaaaatattgaattataagtggagacaaaaggcaagagataaaaatgcgacatattatttatttatatgtgatgaaaagcaggtgaacatgttgcaccagatgtgttaagactgacggtgagatcatgagataatgagttgcaaggttatgggattattattc

SEQ ID NO: 141741 - DNA, 1125 bp, Zea Mays
aaagaacatcaaaagcagtgcggagactggacaccggaggcatgaggcatctttctcatatcacaggtcacaacagtccatttcagtctcagcgctgtcgctcaactgctcaaggaggcacggggctggaaagggcaagaggaggagaagctgaaccatggcgagagtagaagcggtggtcatctgcctcctggtcctcgccatggacgtcgccgccggcgtgctcggtgtctacgcggagaaggctcagaaccaggcaagtttccgtgtagtcgggaagctcttttcttttcattgtagggtatccgggaaccagggggcaggggcttcgtccgtattcaggaatcaggctggctggccgtggccgccgctcacccggtgcggctggcgattgcagggcaggcacctgcggatcctgttcgtggagtgccggcagccggtccggcgggcctacgagctcggcatggcggcggccgcggtgctggcggcggcgcacgccatcgccaacgcggccggcggatgcgcgtgcgcctgctccggcgacaagctccgccgggcgtcgcccaaccggcagatggcgtccttcgccttggtcctcacatgtgacaagcgattcttgtcgtctggtgactgtggatggagcaggatggtccttgtcgtcgcgctctcgctgctggtgctcggcgcgctgcccaacgcgaagcgcaagctggcggagtgcggggtggcgcggcaccggttcctctccatcggcggcgtcctctgcttcgtgcacgcgcccttctgcgccgtctactacgcctccgctagcgccgcggcgcgggaggctcgccgcgacgcgacgcacgtgtagtctgttcggttctattagccacccctccatgagaccatgactgtatcgtgctcttgacgaaggtgctggcacagaagatggcgtcggacgggctgggcatgggatgtaattttgctcgtttctcgaacgatcatgcatggctgtgcatgggatggaatttatctcgtcttgcaggtatgcggtgtgcatgtgtagtatgtataacatctcgccatggcgttcgcgaactggtacgctcgccggtgaaatctttcaggaactcgatagcacga

SEQ ID NO: 141742 - DNA, 942 bp, Zea Mays
aaagaacatcaaaagcagtgcggagactggacaccggaggcatgaggcatctttctcatatcacaggtcacaacagtccatttcagtctcagcgctgtcgctcaactgctcaaggaggcacggggctggaaagggcaagaggaggagaagctgaaccatggcgagagtagaagcggtggtcatctgcctcctggtcctcgccatggacgtcgccgccggcgtgctcggtgtctacgcggagaaggctcagaaccagggcaggcacctgcggatcctgttcgtggagtgccggcagccggtccggcgggcctacgagctcggcatggcggcggccgcggtgctggcggcggcgcacgccatcgccaacgcggccggcggatgcgcgtgcgcctgctccggcgacaagctccgccgggcgtcgcccaaccggcagatggcgtccttcgccttggtcctcacatggatggtccttgtcgtcgcgctctcgctgctggtgctcggcgcgctgcccaacgcgaagcgcaagctggcggagtgcggggtggcgcggcaccggttcctctccatcggcggcgtcctctgcttcgtgcacgcgcccttctgcgccgtctactacgcctccgctagcgccgcggcgcgggaggctcgccgcgacgcgacgcacgtgtagtctgttcggttctattagccacccctccatgagaccatgactgtatcgtgctcttgacgaaggtgctggcacagaagatggcgtcggacgggctgggcatgggatgtaattttgctcgtttctcgaacgatcatgcatggctgtgcatgggatggaatttatctcgtcttgcaggtatgcggtgtgcatgtgtagtatgtataacatctcgccatggcgttcgcgaactggtacgctcgccggtgaaatctttcaggaactcgatagcacga

SEQ ID NO: 141743 - DNA, 1005 bp, Zea Mays
tcaagaagattcgtccatgttcgaagacgaatgcattttggtggacgagcaggacaatgttgttggccatgagtcaaagtacaactgccatttgatggaaaagattgattctgagaatctgctacatagggcattcagtgtgttccttttcaactcaaaatatgagctgctacttcagcaaaggtccgcgacaaaggttacctttcctttagtttggaccaatacctgctgcagccaccctctgtaccgtgagtctgagcttatccaggagaactaccttggtgtgagaaatgcagcacagaggaagctactggatgagctgggcatcccagcagaagatgccccagttgaccaattcacccctctgggccgaatgctttacaaggcaccatctgacgggaaatggggggagcatgagcttgactacctgctgttcatcgtccgggacgtgaaggtgcagccgaacccagatgaagtcgctgacgtgaagtacgtgaaccgcgacgagctcaaggagctcatccggaaggctgacgctggcgaggacggggtgaagatctccccctggttcaggctggtggtggacaacttcctcatgggctggtgggaccatgtcgagaaaggcaccctcggcgaggccgtggacatggagaccatccataagctgaaggagtgaggggccgccggccggccggctccgatgacctcaccacctgttgatgttgctgctgctgctgcactgcatgtttatcaaaagttatcgctcctgctcgcggaaagtgagcttgactgttgccggggtggaagtgtcgttttggactgaagatgagtgccgcggaggggtttgttgtttgtttgtttgtttgttcggtgaccgaatcgcgagttggacgcctgtttaatccgtgcttatacatcgtctgagtaaacagcaataagagggacatccgtaagctctttccgtaactgcttttgcgactcgtctgctgccactgcagttccatt

SEQ ID NO: 141744 - DNA, 101 bp, Zea Mays
ggttcaatagtatcacgaaccacaacatccagttaggcctcgtttggatcattaggattgaattcattctaatatatttatatactattgtagactatatg

SEQ ID NO: 141745 - DNA, 1546 bp, Zea Mays
tcacgctttacctcatgcagatgccgggccgctcctcggcatcgacggacggcggaatggcggatgaattagtacggccacggagtcaaaatgatagacactgacaagtgatcccaccaagtggcacgtgaccaatgccccgatttccgctttgcgcgcgcgtctgccgacgcggaaccgcccaaatgtacgaaacctccagcgcttcccgccggttccggatcgcggacccgcgacccgggcccactccacacatccgccgtccgcccgaacgccccaacccacgatccgcgtgatcgactcctattggctcgctgcgcgggcccgggcccgtgcccgcgcccctatatatcctcgccctcgcaccgaacaacctctatctccctgtttaatcaatccttcaagcgcaagctgcctcctcctcgtcgtccggtcgtgagaagggatggcgggccgtggcaaggctatcggcgctggcgccgcgaagaaggcaacgtcgaggagctccaaggccggactccagttccccgtcggcaggattgctaggttcctcaaggcgggcaagtacgctgagcgcgtcggcgccggcgcccccgtgtacctcgccgccgtcctcgagtacctcgcggctgaggtttgtgccccgcttcgttttctttcccctctccttgttgcgattcgcttcgggtccgcgtcgctgcggtctcggatctggttgttttgccgtggaggattgttcctggatctgaaatgagtcgcggcattgtacttcataaaaagtctcaatacatttcccgattccaattgcttcgattgcacatctatgcatcctgtaatttaccaactaatttgaacagacttggcactgaattattcgcattgtaatttctaggtgaaccggacaattttctggaataatatatctctgaatcctgcaattaagcagttggtagtaatgttaagcatgaaccattgtagaaaatcggagccaaatgcgtccttactcttactatttctagcattttctcccgtcatttctcaatggcaatatatccagtgttccaatggttacaacagtttctgactatgttcatttatccacggtgcaacaacaggttctcgaacttgccgggaacgccgcgagggacaacaagaagacccgcattgtgccgcgccacatccagcttgctgtgcgcaacgacgaggagctgaccaaactgttgggtggtgccaccatcgcgagcggaggtgttatgcctaacatccatcagcatctgctccccaagaaggctgcctcctccaaggccagtgtcgacgacgacgacaactgagactgcttcctgcagaaatgatccgaccaccgccttgttttgtaggaataggatgatgttgtcttcgatcggggaggagtcgggtatgctgggaaggagaattagattagtatctgtttttttgaatgggatgtgaacgtggctgtgaatctcaggattgtatgctcgttgagaaagaaatggaaggacttcgtgatgcacgatgttgatgccgc

SEQ ID NO: 141746 - DNA, 1977 bp, Zea Mays
tcacgctttacctcatgcagatgccgggccgctcctcggcatcgacggacggcggaatggcggatgaattagtacggccacggagtcaaaatgatagacactgacaagtgatcccaccaagtggcacgtgaccaatgccccgatttccgctttgcgcgcgcgtctgccgacgcggaaccgcccaaatgtacgaaacctccagcgcttcccgccggttccggatcgcggacccgcgacccgggcccactccacacatccgccgtccgcccgaacgccccaacccacgatccgcgtgatcgactcctattggctcgctgcgcgggcccgggcccgtgcccgcgcccctatatatcctcgccctcgcaccgaacaacctctatctccctgtttaatcaatccttcaagcgcaagctgcctcctcctcgtcgtccggtcgtgagaagggatggcgggccgtggcaaggctatcggcgctggcgccgcgaagaaggcaacgtcgaggagctccaaggccggactccagttccccgtcggcaggattgctaggttcctcaaggcgggcaagtacgctgagcgcgtcggcgccggcgcccccgtgtacctcgccgccgtcctcgagtacctcgcggctgaggttctcgaacttgccgggaacgccgcgagggacaacaagaagacccgcattgtgccgcgccacatccagcttgctgtgcgcaacgacgaggagctgaccaaactgttgggtggtgccaccatcgcgagcggaggtgttatgcctaacatccatcagcatctgctccccaagaaggctgcctcctccaaggccagtgtcgacgacgacgacaactgagactgcttcctgcagaaatgatccgaccaccgccttgttttgtaggaataggatgatgttgtcttcgatcggggaggagtcgggtatgctgggaaggagaattagattagtatctgtttttttgaatgggatgtgaacgtggctgtgaatctcaggattgtatgctcgttgagaaagaaatggaaggacttcgtgatgcacgatgttgatgccgcatcatattcagcgtagaactgcatttcttctgagtggcaatggtgtcaccgaaaaatgaaagtatttggctggtgtcgccaatctgaattggtgaattctgatttgaggcctgcatggatggccagcaggttgcatgacatctagatccacagtcatgaggctcgtgccaaagttaactcaagggcttgttccgttcatttggaaacaataaaaaacccgtctagacttggcaggccaatttgatcgaaattgacgaacaagcgaaaaaagcccacctgggttcgtaagtcagtgatccaaaggtgaggcccacaattcgggagtaacacttgcggcatataaaacgaggacaattccctgtcgtttgtgtgctactggacctatatgtcatatacataaaataatgaaaataaattctgatagaacatagaatttttttcctataaaagatagcctgccacagtccacacgacacttcccttccaccggaaggttagacaactccagtaactactcctcacccccacttcgcatctgtatttaacactcgtcaccccccttcacatccgcattttacacgttgaggcatatatatggatacaaatggggattagaagaatattggagctttgtttgggtaatttagtattgatcacgtgtgctgaagtagattatgatgtaaattagtttaagttaaatactaatctattttaataaatgtgaattgagtttaatattagaaaaactaggactgagtgaattgatcaatgcggattgagagcagctccaaaaaaagcactaaaaatttgttcccaaaatcttttattagcgcatattggaaaataaaatccactaaaaatatattatctcacagtagatcactaaaaacttgtccctaaaaaaaataaaaa

SEQ ID NO: 141747 - DNA, 1039 bp, Zea Mays
ccgcgtcgacccgcgccattggctaccctcacctatataacacgctaacccacccacccaccggttcccctcctgtctccgtcttctcaccaccgctgcctccgcggtttcgcttccccccgtcttcccaagcctttgcttcgctcttcgcttcggattccctctgctcatggccgggagagggaaggcgatcggctcaggggccgccaagaaggccatgtccaggagctccaaggccgggctccagttcccagtgggaaggatcgccaggttcctcaaggccggcaagtacgccgagagggtcggcgccggcgcccccgtctacctcgctgccgtgctcgagtatcttgctgctgaggtaaagaagacttccaattttgcggtggtagtgttcgatttggttttgagcactaggaattttgggtcctgtggtttcctgtcgtggaaattgcctggattactgtagaacaactggggggatttcagatgacgatctagatttcggcgattgctatgctagttcactgtggaaccagtgaggattttgaccgactaaaccgttgggactctctgcctgctcgttcgtgcaggttctcgagcttgccgggaacgcggctcgggacaacaagaagacccgcatcgtcccgcgccacatccagctcgccgtccgcaacgacgaggagctctcccgcttgctgggcacggtgaccatcgccagcggtggtgtcatgcccaacatccataacctgctgttgcccaagaagtctggcggcggcagtgccaaggctgcggctggtgatgaggactagaccgaccacgcctagcctttcatccggtggtggcacctcttgtggatgctgccgtatcaacttgtgcctgtgtagtacgctctagaaatgccttaggtgttgcgttgtagttcgggatgtgtctccctgtaccactgccaaggattagttctgtatattttgctataaggagtgcatcctttggacgacctgtttatcaatcctggtatcccagtttgcatttcgtgtcc

SEQ ID NO: 141748 - DNA, 1010 bp, Zea Mays
ccgcgtcgacccgcgccattggctaccctcacctatataacacgctaacccacccacccaccggttcccctcctgtctccgtcttctcaccaccgctgcctccgcggtttcgcttccccccgtcttcccaagcctttgcttcgctcttcgcttcggattccctctgctcatggccgggagagggaaggcgatcggctcaggggccgccaagaaggccatgtccaggagctccaaggccgggctccagttcccagtgggaaggatcgccaggttcctcaaggccggcaagtacgccgagagggtcggcgccggcgcccccgtctacctcgctgccgtgctcgagtatcttgctgctgaggttctcgagcttgccgggaacgcggctcgggacaacaagaagacccgcatcgtcccgcgccacatccagctcgccgtccgcaacgacgaggagctctcccgcttgctgggcacggtgaccatcgccagcggtggtgtcatgcccaacatccataacctgctgttgcccaagaagtctggcggcggcagtgccaaggctgcggctggtgatgaggactagaccgaccacgcctagcctttcatccggtggtggcacctcttgtggatgctgccgtatcaacttgtgcctgtgtagtacgctctagaaatgccttaggtgttgcgttgtagttcgggatgtgtctccctgtaccactgccaaggattagttctgtatattttgctataaggagtgcatcctttggacgacctgtttatcaatcctggtatcccagtttgcatttcgtgtccaaatcttggttagtccatttgaaaattctgaaaatgctgtgatgtgcagttttctgatttgtttgtgagactggctgtggctgctcattggaaaaatatgatgcccactgttagattagaagtctcagcaagtggtgattgctgtggatgcgaatgtcggatcattcagcgaacttaacgctttggcatgaaaatgtttgttc

SEQ ID NO: 141749 - DNA, 494 bp, Zea Mays
actcgtccacacgcgaaggcacccagcagcagccgctcccgaactgaggaaccctaccacgcgggcgacggcggtgcgcgaccggtgacgggacagcggcagcgccccctcctccatctgctggtcccaccgcctcctgacgttatccgatactgccaatccccctcttcgccgttgacggagcttaccgaggaaagaagggcagggccatggcgggagccttcgctttccgcctcgtgcctcgcctcgccgcagagccggcggcgagggggaagggtggcggaggaggagccaaccgcgacgccggcagcagggcgctggtgtcaaagaaaccaaacaagcagcagcatttgtggatcaggaaggagacagctgggtcagggaagaaggctctccgtcttattgatgctgtaagatatacacttgccattgatactgtaagatacacacatttgctctccctattgataaagccagaattctggatgttttga

SEQ ID NO: 141750 - DNA, 963 bp, Zea Mays
gcaacgcgcgatcgccttggtgcattggacaagtggagtgctttcgaacctgaatttcctattatagcagcagcaaaagctttggggatgttgaaaaggcgacgacaatggttaagaataatccaggtaaccaagtggttgatgagcaaaggacaggtgctgacatggacaacatatgatacacttctgctcgcacttcttatggataaacgggtagacgaagctgagtcagtttggaacactgtaatacagactcatacccgctcagtgcccaagaggttgttctctcggatgatcttgatctacgacattcaccagcgcccagataaagttttggagatattcgcggatatggaggagttaggtgtgcgtccggacgaggatacagcgagacggatcggaaaggcattcgtggcttctggccaagaagaaaaggagaagcatgtcctcgagaaatacttgaagaagtggaagtacatccatttcaacggcgagcgcgttcgcgtgcggagggacggaccattggcgtagtgcccgttttctgaaaaatgctcgaacctatcagagtatcgtgccggtaggcggtagggcaggggagatgctgttactgccgctgtgacagtcaggcacatggatatcggcactagtccctatcctatgtatgtggaatggaacggaaactggagattggttccatggctctagcctgtggaggagacgagcggatggggggtggctggctactaccggcgagatagtgatttaataggcactacataggcgtccagtgattgcgatggctttaacttgcgtatgtgtctgcggaatggtcccgtgctatttcggtgacttgtgcttgtggaattgtgaacacccactggaaagtgtatatcatgagagggacgatacctgacgtctgggcccatggcttgctgatttcacgcaacgaaccattttctgttt

SEQ ID NO: 141751 - DNA, 987 bp, Zea Mays
aattctatgataataaattacgagtcaatctttccactggaaccaaaattatgagttggctgatgcttaagttctgaaaatcacgcaaagtcatgtgctgttcaatgttcaagggtaagcagcattcatgcggtcaccctcacccgtctagtactgttcatggagcctaaccgtaagcgacaggttattcatcgtaactaacaggccatatgggaacaggatgggaagcggttccttgtatgtggtctagcaggcctgtttccattacacttgtctagctggctgctcagatttgtagcttacctttttctcttcagaaacagatgcatggaagcatttactgtgttcttgttgccaatttcagatattcgcggatatggaggagttaggtgtgcgtccggacgaggatacagcgagacggatcggaaaggcattcgtggcttctggccaagaagaaaaggagaagcatgtcctcgagaaatacttgaagaagtggaagtacatccatttcaacggcgagcgcgttcgcgtgcggagggacggaccattggcgtagtgcccgttttctgaaaaatgctcgaacctatcagagtatcgtgccggtaggcggtagggcaggggagatgctgttactgccgctgtgacagtcaggcacatggatatcggcactagtccctatcctatgtatgtggaatggaacggaaactggagattggttccatggctctagcctgtggaggagacgagcggatggggggtggctggctactaccggcgagatagtgatttaataggcactacataggcgtccagtgattgcgatggctttaacttgcgtatgtgtctgcggaatggtcccgtgctatttcggtgacttgtgcttgtggaattgtgaacacccactggaaagtgtatatcatgagagggacgatacctgacgtctgggcccatggcttgctgatttcacgcaacgaaccattttctgtt

SEQ ID NO: 141752 - DNA, 459 bp, Zea Mays
aaacccttcccctcttcctcgggtccttcagaagcaggacgcgggcgacacacatcgatcaggcgcgccgaagcagcagcagcagcagcagctgacgcgcatcttccggcgccggccagctcctcggccaccccgccggccgcggccatgtcgaagaagaaggcggtcacgacgatgacgctcaaggacttccacggtggctccatcccctccgagctcccgctcccctccgcccccggcgtcaccccgcgccccgcggaccgcaccgtcgcctctgcgtcccccggcgcggccgcggtcgcacggccacgagtacctgtcgcttcgtcctaccgccgctgcggcggcgttggcgatgccttcctttctcttaattttcccgtgttggccgtctcttcgataggacgagcgttcccctttcgatcctgtcgctcctcggtaactgttgccgtcctcgac

SEQ ID NO: 141753 - DNA, 1976 bp, Zea Mays
taccttcgatgttcagcttgattcgtccgcatcggccgtcacttcgacgaggacgagcgtacccataacgagcccgccgcgccacgccgtccggcgccgtccccgacatcgtacgcacccgctcccgtggttgcgcccaccagatccgggtccgggaacgcgtggggcccgagaaaggaggcctctccggcgtcttcccctgtgggtcctgctcccgcctccgccggcggccagatctggtccgcgacacgcatcgcccaggccagcgcagtggagaaggtcatctctgggagatggcacacgtcgaagccctcgtctccgccggcgccagtgacagtgccagctccggtgttgattaccgtggccccgccggaggttgagaggcctaggtctgttggggtgagagagctggacagtggggtggagaggggcgcggcacccgtgagacccgcgtcgcatgaaggaagagttggtggggaagggagagacggggataccccagagagacccaggttgaagctacttcctcggtccaagccaattgaggctcctgaaccatctcctacatatgttgcagagaagcaggtgcaccaggtccaggtaactgctaacctcatgaaggctgaggttgatcatgatgtgcatcagaatgcaatgactgctaaaacaggagttttaggagcagatgctgagagcaaggtagctgagcgaccacgtttgaatctgaagcctcgttcctatgccacaggacaatctgatgaaatggctgttaaggaaaggccatccctctttggtggtgctcgcccccgtgaacaagttctcaaagaacgtggagtggatgttttggccagtgatcttgagcggatttcaccagttggcaggtctaaaggtgaatttgcaaaggtcgagcagaaggttgaagctttgtccattaacccttctcttgaaagagctgatggtttttcagctggtcatagaggcccaaggagtgttgataagaaggattacaggcgggatactgagaaggctgatgcatataggccttctcgtcgggaggataacaggagggtcgctagagatatggagaagccacaggagcaaccacgcccagagcctgagacatggcgtaagccagtggagcctccaaagccagaggttgcaacacctcgttttgggaaagcagcaaccgcgttggagcttgcgcaggccttctcaacgtccatgtctgatactgcaccacagaaccggttgaccagcgttcccagcccaagagttcctcttagcccaggggctagggatcagtctggcttctcaaggctcactgacagcaggacgttacgctccagcccttcccagcgaaagataaatggctactgatcgcttggcacacatattacacgtgtcacgatgacagttggcctcgatgaagcgccccgctgtatcttcatactcaactgcccctgcgtggagaagtccaattgttgctctgtcagatggtggcacgtgagtggtgataatctcattggtagcaaacaaaaggctcctcttccataagtttctggtcagtgatttatgactcagggttcatttttcctctcttgataacaaagatgtgaatttgtggactattttttcttatgttcgccagccctgatttgttgctggggaataattgccacctgcgcatcttttagttggatgtgctctgccgtgcttggttttatgatgttgccagatcggtggtatgtagcctgcgtcataatgcaaaattgggattttactgcgagaacaaattattggtcttgtacggttaaatcaggattaaaggatgtaactttcaatcttggttgtctagtttatataagccgcgtttggatcactggattccaatttgaattttgaaccaagttacgttgaaaatcctgtgtaaattggtgtcacccaattggggttccgatgcttcgtttatttttctt

SEQ ID NO: 141754 - DNA, 1889 bp, Zea Mays
taccttcgatgttcagcttgattcgtccgcatcggccgtcacttcgacgaggacgagcgtacccataacgagcccgccgcgccacgccgtccggcgccgtccccgacatcgtacgcacccgctcccgtggttgcgcccaccagatccgggtccgggaacgcgtggggcccgagaaaggaggcctctccggcgtcttcccctgtgggtcctgctcccgcctccgccggcggccagatctggtccgcgacacgcatcgcccaggccagcgcagtggagaaggtcatctctgggagatggcacacgtcgaagccctcgtctccgccggcgccagtgacagtgccagctccggtgttgattaccgtggccccgccggaggttgagaggcctaggtctgttggggtgagagagctggacagtggggtggagaggggcgcggcacccgtgagacccgcgtcgcatgaaggaagagttggtggggaagggagagacggggataccccagagagacccaggttgaagctacttcctcggtccaagccaattgaggctcctgaaccatctcctacatatgttgcagagaagcaggtgcaccaggtccaggtaactgctaacctcatgaaggctgaggttgatcatgatgtgcatcagaatgcaatgactgctaaaacaggagttttaggagcagatgctgagagcaaggtagctgagcgaccacgtttgaatctgaagcctcgttcctatgccacaggacaatctgatgaaatggctgttaaggaaaggccatccctctttggtggtgctcgcccccgtgaacaagttctcaaagaacgtggagtggatgttttggccagtgatcttgagcggatttcaccagttggcaggtctaaaggtgaatttgcaaaggtcgagcagaaggttgaagctttgtccattaacccttctcttgaaagagctgatggtttttcagctggtcatagaggcccaaggagtgttgataagaaggattacaggcgggatactgagaaggctgatgcatataggccttctcgtcgggaggataacaggagggtcgctagagatatggagaagccacaggagcaaccacgcccagagcctgagacatggcgtaagccagtggagcctccaaagccagaggttgcaacacctcgttttgggaaagcagcaaccgcgttggagcttgcgcaggccttctcaacgtccatgtctgatactgcaccacagaaccggttgaccagcgttcccagcccaagagttcctcttagcccaggggctagggatcagtctggcttctcaaggctcactgacagcaggacgttacgctccagcccttcccagcgaaagataaatggctactgatcgcttggcacacatattacacgtgtcacgatgacagttggcctcgatgaagcgccccgctgtatcttcatactcaactgcccctgcgtggagaagtccaattgttgctctgtcagatggtggcacgtgagtggtgataatctcattggtagcaaacaaaaggctcctcttccataagtttctgccctgatttgttgctggggaataattgccacctgcgcatcttttagttggatgtgctctgccgtgcttggttttatgatgttgccagatcggtggtatgtagcctgcgtcataatgcaaaattgggattttactgcgagaacaaattattggtcttgtacggttaaatcaggattaaaggatgtaactttcaatcttggttgtctagtttatataagccgcgtttggatcactggattccaatttgaattttgaaccaagttacgttgaaaatcctgtgtaaattggtgtcacccaattggggttccgatgcttcgtttatttttctt

SEQ ID NO: 141755 - DNA, 195 bp, Zea Mays
atggcggcagtactccacaggttcagttcagtcatgctcatgcagcagcagcagcagcagcacaggcttgtgcctttgctgggggtggccactggcacgcctgaccgggtcaccagcttcatctactttgagtgtttgactacgacggccaaagctggtgctgggaaaaagaaaggtgctcgaggtatggagtaa

SEQ ID NO: 141756 - DNA, 222 bp, Zea Mays
atggaccacaaaagcttggagattttcgggaagtcacggctcaaaagcttggagatctccagcatcccaaccttgtccctcccaccaaacaagcttttgagtgtggcatcacagttgatatctgttttcttggcttggttctgcaaaccatggagacaaaatgactttcactatcacactttgtttgagcccataaatttgtttttcctcatagcaaacctg

SEQ ID NO: 141757 - DNA, 2692 bp, Zea Mays
atgaccaactcagatgctctttgcttgcaatctcagtcgacgcataaacaacgcatttctgcctatacctgtctgctgctgctggtgctatctctttcagggatccagtcttcttcatcaacaccaaacccatcgggtattcctgtaacaaatccaaaaaccacctccattcttctctctcccaccatctttttgttgcccatatctttggtgcagggaaaggactcccgcagcagcacaggcaggcatagccgcatagcacccgagtggccaggccaggcacacactacagctacagtatatgatacgtgcgagtgcaaagggcagggcagagaaaaatcaggaaccagccttacatattccccaaagctccccccctccctgcaaagctccacactcgcagtactcgcagcacggcagagggtgtcagtcagggcgcgagcaggagcagctcaggatccaccaacttcgtttggccccgcccgtcgccgtctgagccgagccattgactgctcagagcatcaggtgcgcttgggcgtctagccatttggcggcttgggctttctgcgtgggtgccgcatcccgccgccccccccctgcttccatccccatcgccgcagcctttttttttttttttgcctcgcttcgtcgccatgttgctttaaagttcaaattgctcgcgggatcgggaggggaggaaggaacgacgagtctaagttgcgcttgcgccggaaagatgagccgtgtcggtgtcgtccttgaggtggatgtgaacggcgaggagctcttcttcgttgataaggacgttctagcgcgcttctgcggcaggatcaggaggctggtggtcgccggcgcagcgtctgcggggcggcgtccgagggtgactctgcaaggactccccggtggccccgaggcgttcgagctcgtcgcgaggttctgctacaccgacgacggcggacggggcggggcggtgacggcgggcaacgcgtgcgtgctgcggtgcgcggcggagttcctggacatggcggcggcggacgtggccgcggccgaggccgaggccgaggccgcgccgagcctggtgcggatgacggagaaggcgctggaggagatgccgcactggccgtggcacacggtcgtggacgccgtgaagcagtgccagcgcctggtcccgctcgcggactccaccggcgcgttcgacgcggccgtggcggcgctggtgtcccagatggccgtgcccccgccggccggggacgccacgcccacgggctcctcgccggagagcaccgcgttccggttctcgtgcgacaccaagagcagcagcctcagcctgcgcggcgggtcctgcgtcagccgcacctggtggttcgaggacctcgtcgcgctcggccctgccacggtggagcgcgtcgcctcggcgctcgtggccaggggcgccgaccacggcgtcgtcgcccggttcctcttctactacctaaagtgccgcgtcgccggtgcgagcgccgaggagaagaaggcgatgctgcaggcctcggtcgccgtcatggcgaagctggaccgaagcgccgtctcctgcaagggcctcttcggcatcctgaggatcgccgcgccgctgaggctggccgacgcgtgccaggagcggctcgtggccatgatcggccgcaagctggaccacgcgacgctcgataacctgctcgtcccggcgccgcccgggacgggcagcctgtacgacgtgagcctggtgctgaggttcttggccgcgttcctccgcggcggcgccagtgacgagccggcgaggctgaagaaggtgggcaagctcgtggacctgtacctggccgaggtcgctccggacccgtcccttcgcccggccaagttcctggagctcgccaccgcgctgccggctcacgcgagggactgccacgacgcgctgtatcgcgccatcgacgtctatttccaggttcacggccgcctgacggacgaggagaagatgaagatctgcagggggctgagctacgagaagctgtcgcccgagagctgcaagcacctggcgcggaacggcgagttcccgacgagggcggcggtgcaggcgctggcgtcgcagcacacggtgctgaagagcatcgtgctgcgcgagcccgcgggccagctgaagcccgtgtcgctgtcccctcccccgtccacgggtaagcaccgcgacgtcggcggcggcgagaacgacgagggtcaggtggtcctgtacgcggggcggctggacctgtcgctggagaaccagaacctgcggtcgctcctggacgggatgcactggcgggtgatggagctggagaaggtgtgtagccggatgaagacgcagatgagcaagatgaagcagcccaggcgcggaggcggtggcggccgcgccggcaggtcgtcgctccccaggatgtgctcctgatccaccacctcgcctcctcgcgctgccgttattagcgcgcgctttagcggtgaccccgcaacactgtaccatagcgacgatgtacataccgactgccgtgctaggaggaatcagtgaagcgcggcgcggcgcggtgcaggcggcagagcatcgtcctcctccctgcatcttgtcccttttttttttttgcctagcttcctcccgtgtatgatgatgcgtgtatcggttctcggtggtggcaatttgaaaagaagggctggctag

SEQ ID NO: 141758 - DNA, 2066 bp, Zea Mays
gccttacatattccccaaagctccccccctccctgcaaagctccacactcgcagtactcgcagcacggcagagggtgtcagtcagggcgcgagcaggagcagctcaggatccaccaacttcgtttggccccgcccgtcgccgtctgagccgagccattgactgctcagagcatcaggacgttctagcgcgcttctgcggcaggatcaggaggctggtggtcgccggcgcagcgtctgcggggcggcgtccgagggtgactctgcaaggactccccggtggccccgaggcgttcgagctcgtcgcgaggttctgctacaccgacgacggcggacggggcggggcggtgacggcgggcaacgcgtgcgtgctgcggtgcgcggcggagttcctggacatggcggcggcggacgtggccgcggccgaggccgaggccgaggccgcgccgagcctggtgcggatgacggagaaggcgctggaggagatgccgcactggccgtggcacacggtcgtggacgccgtgaagcagtgccagcgcctggtcccgctcgcggactccaccggcgcgttcgacgcggccgtggcggcgctggtgtcccagatggccgtgcccccgccggccggggacgccacgcccacgggctcctcgccggagagcaccgcgttccggttctcgtgcgacaccaagagcagcagcctcagcctgcgcggcgggtcctgcgtcagccgcacctggtggttcgaggacctcgtcgcgctcggccctgccacggtggagcgcgtcgcctcggcgctcgtggccaggggcgccgaccacggcgtcgtcgcccggttcctcttctactacctaaagtgccgcgtcgccggtgcgagcgccgaggagaagaaggcgatgctgcaggcctcggtcgccgtcatggcgaagctggaccgaagcgccgtctcctgcaagggcctcttcggcatcctgaggatcgccgcgccgctgaggctggccgacgcgtgccaggagcggctcgtggccatgatcggccgcaagctggaccacgcgacgctcgataacctgctcgtcccggcgccgcccgggacgggcagcctgtacgacgtgagcctggtgctgaggttcttggccgcgttcctccgcggcggcgccagtgacgagccggcgaggctgaagaaggtgggcaagctcgtggacctgtacctggccgaggtcgctccggacccgtcccttcgcccggccaagttcctggagctcgccaccgcgctgccggctcacgcgagggactgccacgacgcgctgtatcgcgccatcgacgtctatttccaggttcacggccgcctgacggacgaggagaagatgaagatctgcagggggctgagctacgagaagctgtcgcccgagagctgcaagcacctggcgcggaacggcgagttcccgacgagggcggcggtgcaggcgctggcgtcgcagcacacggtgctgaagagcatcgtgctgcgcgagcccgcgggccagctgaagcccgtgtcgctgtcccctcccccgtccacgggtaagcaccgcgacgtcggcggcggcgagaacgacgagggtcaggtggtcctgtacgcggggcggctggacctgtcgctggagaaccagaacctgcggtcgctcctggacgggatgcactggcgggtgatggagctggagaaggtgtgtagccggatgaagacgcagatgagcaagatgaagcagcccaggcgcggaggcggtggcggccgcgccggcaggtcgtcgctccccaggatgtgctcctgatccaccacctcgcctcctcgcgctgccgttattagcgcgcgctttagcggtgaccccgcaacactgtaccatagcgacgatgtacataccgactgccgtgctaggaggaatcagtgaagcgcggcgcggcgcggtgcaggcggcagagcatcgtcctcctccctgcatcttgtcccttttttttttttgcctagcttcctcccgtgtatgatgatgcgtgtatcggttctcggtggtggcaatttgaaaagaagggctggctag

SEQ ID NO: 141759 - DNA, 2251 bp, Zea Mays
atgttcttcttcgtccctcccgctccattcctccactgctgggcgttaacggagtaacagctacacctcatcttcttcgcccttttctatgcgagctttaatgcccgtttggtggctacgactactgtacgtactcgtttattgccactagcttcttcccccattgaaaaagctttattactacattctgctccgcaaagagagagagtgacctgatcttcccttcaatttggcgtcggtgttaatttggattcctacaagtgggtggcgtctcgcattcttggcggctgcgtgcttctttaatgcgctgacgcttcttgttctgaattgctgttgcgtttttttggatataaaatcgcaggacgttctagcgcgcttctgcggcaggatcaggaggctggtggtcgccggcgcagcgtctgcggggcggcgtccgagggtgactctgcaaggactccccggtggccccgaggcgttcgagctcgtcgcgaggttctgctacaccgacgacggcggacggggcggggcggtgacggcgggcaacgcgtgcgtgctgcggtgcgcggcggagttcctggacatggcggcggcggacgtggccgcggccgaggccgaggccgaggccgcgccgagcctggtgcggatgacggagaaggcgctggaggagatgccgcactggccgtggcacacggtcgtggacgccgtgaagcagtgccagcgcctggtcccgctcgcggactccaccggcgcgttcgacgcggccgtggcggcgctggtgtcccagatggccgtgcccccgccggccggggacgccacgcccacgggctcctcgccggagagcaccgcgttccggttctcgtgcgacaccaagagcagcagcctcagcctgcgcggcgggtcctgcgtcagccgcacctggtggttcgaggacctcgtcgcgctcggccctgccacggtggagcgcgtcgcctcggcgctcgtggccaggggcgccgaccacggcgtcgtcgcccggttcctcttctactacctaaagtgccgcgtcgccggtgcgagcgccgaggagaagaaggcgatgctgcaggcctcggtcgccgtcatggcgaagctggaccgaagcgccgtctcctgcaagggcctcttcggcatcctgaggatcgccgcgccgctgaggctggccgacgcgtgccaggagcggctcgtggccatgatcggccgcaagctggaccacgcgacgctcgataacctgctcgtcccggcgccgcccgggacgggcagcctgtacgacgtgagcctggtgctgaggttcttggccgcgttcctccgcggcggcgccagtgacgagccggcgaggctgaagaaggtgggcaagctcgtggacctgtacctggccgaggtcgctccggacccgtcccttcgcccggccaagttcctggagctcgccaccgcgctgccggctcacgcgagggactgccacgacgcgctgtatcgcgccatcgacgtctatttccaggttcacggccgcctgacggacgaggagaagatgaagatctgcagggggctgagctacgagaagctgtcgcccgagagctgcaagcacctggcgcggaacggcgagttcccgacgagggcggcggtgcaggcgctggcgtcgcagcacacggtgctgaagagcatcgtgctgcgcgagcccgcgggccagctgaagcccgtgtcgctgtcccctcccccgtccacgggtaagcaccgcgacgtcggcggcggcgagaacgacgagggtcaggtggtcctgtacgcggggcggctggacctgtcgctggagaaccagaacctgcggtcgctcctggacgggatgcactggcgggtgatggagctggagaaggtgtgtagccggatgaagacgcagatgagcaagatgaagcagcccaggcgcggaggcggtggcggccgcgccggcaggtcgtcgctccccaggatgtgctcctgatccaccacctcgcctcctcgcgctgccgttattagcgcgcgctttagcggtgaccccgcaacactgtaccatagcgacgatgtacataccgactgccgtgctaggaggaatcagtgaagcgcggcgcggcgcggtgcaggcggcagagcatcgtcctcctccctgcatcttgtcccttttttttttttgcctagcttcctcccgtgtatgatgatgcgtgtatcggttctcggtggtggcaatttgaaaagaagggctggctag

SEQ ID NO: 141760 - DNA, 2150 bp, Zea Mays
atgttcttcttcgtccctcccgctccattcctccactgctgggcgttaacggagtaacagctacacctcatcttcttcgcccttttctatgcgagctttaatgcccgtttggtggctacgactactgtacgtactcgtttattgccactagcttcttcccccattgaaaaagctttattactacattctgctccgcaaagagagagagtgacctgatcttcccttcaatttggcgtcggtgttaatttggattcctacaagacgttctagcgcgcttctgcggcaggatcaggaggctggtggtcgccggcgcagcgtctgcggggcggcgtccgagggtgactctgcaaggactccccggtggccccgaggcgttcgagctcgtcgcgaggttctgctacaccgacgacggcggacggggcggggcggtgacggcgggcaacgcgtgcgtgctgcggtgcgcggcggagttcctggacatggcggcggcggacgtggccgcggccgaggccgaggccgaggccgcgccgagcctggtgcggatgacggagaaggcgctggaggagatgccgcactggccgtggcacacggtcgtggacgccgtgaagcagtgccagcgcctggtcccgctcgcggactccaccggcgcgttcgacgcggccgtggcggcgctggtgtcccagatggccgtgcccccgccggccggggacgccacgcccacgggctcctcgccggagagcaccgcgttccggttctcgtgcgacaccaagagcagcagcctcagcctgcgcggcgggtcctgcgtcagccgcacctggtggttcgaggacctcgtcgcgctcggccctgccacggtggagcgcgtcgcctcggcgctcgtggccaggggcgccgaccacggcgtcgtcgcccggttcctcttctactacctaaagtgccgcgtcgccggtgcgagcgccgaggagaagaaggcgatgctgcaggcctcggtcgccgtcatggcgaagctggaccgaagcgccgtctcctgcaagggcctcttcggcatcctgaggatcgccgcgccgctgaggctggccgacgcgtgccaggagcggctcgtggccatgatcggccgcaagctggaccacgcgacgctcgataacctgctcgtcccggcgccgcccgggacgggcagcctgtacgacgtgagcctggtgctgaggttcttggccgcgttcctccgcggcggcgccagtgacgagccggcgaggctgaagaaggtgggcaagctcgtggacctgtacctggccgaggtcgctccggacccgtcccttcgcccggccaagttcctggagctcgccaccgcgctgccggctcacgcgagggactgccacgacgcgctgtatcgcgccatcgacgtctatttccaggttcacggccgcctgacggacgaggagaagatgaagatctgcagggggctgagctacgagaagctgtcgcccgagagctgcaagcacctggcgcggaacggcgagttcccgacgagggcggcggtgcaggcgctggcgtcgcagcacacggtgctgaagagcatcgtgctgcgcgagcccgcgggccagctgaagcccgtgtcgctgtcccctcccccgtccacgggtaagcaccgcgacgtcggcggcggcgagaacgacgagggtcaggtggtcctgtacgcggggcggctggacctgtcgctggagaaccagaacctgcggtcgctcctggacgggatgcactggcgggtgatggagctggagaaggtgtgtagccggatgaagacgcagatgagcaagatgaagcagcccaggcgcggaggcggtggcggccgcgccggcaggtcgtcgctccccaggatgtgctcctgatccaccacctcgcctcctcgcgctgccgttattagcgcgcgctttagcggtgaccccgcaacactgtaccatagcgacgatgtacataccgactgccgtgctaggaggaatcagtgaagcgcggcgcggcgcggtgcaggcggcagagcatcgtcctcctccctgcatcttgtcccttttttttttttgcctagcttcctcccgtgtatgatgatgcgtgtatcggttctcggtggtggcaatttgaaaagaagggctggctag

SEQ ID NO: 141761 - DNA, 2014 bp, Zea Mays
gttcttcttcgtccctcccgctccattcctccactgctgggcgttaacggagtaacagctacacctcatcttcttcgcccttttctatgcgagctttaatgcccgtttggtggctacgactactgacgttctagcgcgcttctgcggcaggatcaggaggctggtggtcgccggcgcagcgtctgcggggcggcgtccgagggtgactctgcaaggactccccggtggccccgaggcgttcgagctcgtcgcgaggttctgctacaccgacgacggcggacggggcggggcggtgacggcgggcaacgcgtgcgtgctgcggtgcgcggcggagttcctggacatggcggcggcggacgtggccgcggccgaggccgaggccgaggccgcgccgagcctggtgcggatgacggagaaggcgctggaggagatgccgcactggccgtggcacacggtcgtggacgccgtgaagcagtgccagcgcctggtcccgctcgcggactccaccggcgcgttcgacgcggccgtggcggcgctggtgtcccagatggccgtgcccccgccggccggggacgccacgcccacgggctcctcgccggagagcaccgcgttccggttctcgtgcgacaccaagagcagcagcctcagcctgcgcggcgggtcctgcgtcagccgcacctggtggttcgaggacctcgtcgcgctcggccctgccacggtggagcgcgtcgcctcggcgctcgtggccaggggcgccgaccacggcgtcgtcgcccggttcctcttctactacctaaagtgccgcgtcgccggtgcgagcgccgaggagaagaaggcgatgctgcaggcctcggtcgccgtcatggcgaagctggaccgaagcgccgtctcctgcaagggcctcttcggcatcctgaggatcgccgcgccgctgaggctggccgacgcgtgccaggagcggctcgtggccatgatcggccgcaagctggaccacgcgacgctcgataacctgctcgtcccggcgccgcccgggacgggcagcctgtacgacgtgagcctggtgctgaggttcttggccgcgttcctccgcggcggcgccagtgacgagccggcgaggctgaagaaggtgggcaagctcgtggacctgtacctggccgaggtcgctccggacccgtcccttcgcccggccaagttcctggagctcgccaccgcgctgccggctcacgcgagggactgccacgacgcgctgtatcgcgccatcgacgtctatttccaggttcacggccgcctgacggacgaggagaagatgaagatctgcagggggctgagctacgagaagctgtcgcccgagagctgcaagcacctggcgcggaacggcgagttcccgacgagggcggcggtgcaggcgctggcgtcgcagcacacggtgctgaagagcatcgtgctgcgcgagcccgcgggccagctgaagcccgtgtcgctgtcccctcccccgtccacgggtaagcaccgcgacgtcggcggcggcgagaacgacgagggtcaggtggtcctgtacgcggggcggctggacctgtcgctggagaaccagaacctgcggtcgctcctggacgggatgcactggcgggtgatggagctggagaaggtgtgtagccggatgaagacgcagatgagcaagatgaagcagcccaggcgcggaggcggtggcggccgcgccggcaggtcgtcgctccccaggatgtgctcctgatccaccacctcgcctcctcgcgctgccgttattagcgcgcgctttagcggtgaccccgcaacactgtaccatagcgacgatgtacataccgactgccgtgctaggaggaatcagtgaagcgcggcgcggcgcggtgcaggcggcagagcatcgtcctcctccctgcatcttgtcccttttttttttttgcctagcttcctcccgtgtatgatgatgcgtgtatcggttctcggtggtggcaatttgaaaagaagggctggctag

SEQ ID NO: 141762 - DNA, 1479 bp, Zea Mays
cacagtttcaaatcccattactttctcccttaaaacctcctctcccctcgttctcctccgcctcctcctcccacctccccacacgggcacacctgccctccccgtcgccgcggacccactcccatggcaaagctcccgcgtctaccctgctcgtttgccgttctcgcgctcatgtgcatcatcccgctcacagcgccgcggcctgcactgtcctcgcgcgcggccccaagggacggtgtctccttcgccggcgcaggcaacacgatacatcaacttcttaaagatcacggccttcccggaggactgctcccgcgcggcgtggagtcgtacaccctggacgagtcgaccggcctgctggaggcgcggctgtcggcgccgtgctacgccacgtacgacaacggcgaactggcctacttcgacaacgtggtgcgcggcaacctcagcaagggcgcgctccgaggcgtggagggcctctcccaggaggagctcttcgtctggctccccgtcaagggcatcctcgtccaggaccaggaacccggggtcatcctgttcgacatcgggttagcccacaagagcctgtcgaggtcgctcttcgaggacccgccggactgcaagccgtcggcctccggcgggatgagcgccgcctccgccgccaggagggagggcacgcaaggtgttactggactacggttgaggcgagagatggcagcagcaggcagcgaccagagtcaggagcagaggtgaggaggaggaggaggagctctgagacgacaacacccgagacaatggcgagccagttttccgctttataaaatcctgcggtgagtgagtgagtgagtgagtgagagagagagagagagagagagtgccgccgccgccgcaacaagaaatacaacagctgcagcttcctgcagaggttggaatgtatctactaagatgtgggtacctttttgcagttcttttttctcgcttcttttcttctcttttagcccaagctcctctcttgtccatgcactgtgtgaattaagtttgtcagtcagtcaattgttgttataaacaaagcacgcaggggagaaaaagaacaagggaaagagttggctgagaagccagttgggggatccgcggactgtggtctggcctagaatgatagatttttgttctcgtcagggataaaattcttctggtgagggtttgttgcatgtgccagctcagcggggagtgagctgggcacagcacatcctccatgtgggcttgtgttggcttggctggttgttggttggttcacttcttccgtggattgataagtatatatatataatattatgctaggtttggttaggccttatatatagcactattaaagaatatagaagttgcatttctttttatgtcttgatgaaaggtatctctgtcaatctgtctgtcaagtagctgtattggaatttttaaaaaatatatatatatggctgtattcctttc

SEQ ID NO: 141763 - DNA, 1054 bp, Zea Mays
cacagtttcaaatcccattactttctcccttaaaacctcctctcccctcgttctcctccgcctcctcctcccacctccccacacgggcacacctgccctccccgtcgccgcggacccactcccatggcaaagctcccgcgtctaccctgctcgtttgccgttctcgcgctcatgtgcatcatcccgctcacagcgccgcggcctgcactgtcctcgcgcgcggccccaagggacggtgtctccttcgccggcgcaggcaacacgatacatcaacttcttaaagatcacggccttcccggaggactgctcccgcgcggcgtggagtcgtacaccctggacgagtcgaccggcctgctggaggcgcggctgtcggcgccgtgctacgccacgtacgacaacggcgaactggcctacttcgacaacgtggtgcgcggcaacctcagcaagggcgcgctccgaggcgtggagggcctctcccaggaggagctcttcgtctggctccccgtcaagggcatcctcgtccaggaccaggaacccggggtcatcctgttcgacatcgggttagcccacaagagcctgtcgaggtcgctcttcgaggacccgccggactgcaagccgtcggcctccggcgggatgagcgccgcctccgccgccaggagggagggcacgcaaggtgttactggactacggttgaggcgagagatggcagcagcaggcagcgaccagagtcaggagcagaggtgaggaggaggaggaggagctctgagacgacaacacccgagacaatggcgagccagttttccgctttataaaatcctgcggtgagtgagtgagtgagtgagtgagagagagagagagagagagagtgccgccgccgccgcaacaagaaatacaacagctgcagcttcctgcagaggttggaatgtatctactaagatgtgggtacctttttgcagttcttttttctcgcttcttttcttctcttttagcccaagctcctctcttgtccatgcactgtgtgaattaagtttgtcaggcaaaaaagaaaaaagaa

SEQ ID NO: 141764 - DNA, 218 bp, Zea Mays
attaaataggggtaatacagttttatgtgtagtaattagggcatgtacaatgggtatcttaagttgtgtcttagagtgtgtctaggtggtgaatgtaaaaaaactcaagacatgtatcttaacgaagacacagtgtcttagctctatgttcgagacaggagactagttgattggtcactttaatttattgaatgctctgattggtacaatgaatatcg

SEQ ID NO: 141765 - DNA, 918 bp, Zea Mays
ctgaatccaagaggacttcacaatgcatcaacgaggtcaagcatccttgtgctcctccgcagcgtcatggtactcgccttcttcctccggcacggggtgcagcacatcctcagcaccaaccgcggcggacaaaccagcggcctccccaccctcggcagagccgtcatcagggaagcgcaccaccacaacggggcagacacagtggtgcacgcagtagtcgctgacgctgccgagcctgcccttgctggtcctccgcgcggcgccgaagcccttgctccccatgatgacggcgctgagcgagaggcgctcgacctcgaggcagaggcgctccttcatgtcgtggtccctgacgatgtggatcttgtaggggatgccggcgtccttgagcgggctggcgaagtcgtcggccttggtggccgtgaaggcgtcgtagtcgtcctccatcctgcgcgcggcagcggcggtctcgcagtcgccgtcgccgtcctcggaggcggcggtggcgctagggttggggagggagacgtcgacggcgccccagtcggcgccgtagagcacggaggtggggcgcacgtggagcaggatgacggcgtccccggggcggaggtagttggcgacggcccagcgcacggcgtaggcggactcgtcggagaggtcgacggcgatggcgatgcggcggtgggcggtgcccaggggcgcggcggcggcggcggcggagaagaagacccccggggactcgggctgcagcgaggccggcggcgggggccgcggggtcggcgccttcaccggcggcggcgccaccgccagcggcaggtcgacggaggagggcgccggcggggcctgcatcgcgggatcttctgcggcgatcgctcttggagcttgcttagcggggtcgaggtcctgtggactggcgagtag

SEQ ID NO: 141766 - DNA, 2747 bp, Zea Mays
gtgccactgcacactggctagagtgtcagtgcccccccaccccacctacctctggtcttgccaaaggaaggaaaaggtagtagctagctaggacctgcaaggcatggcttcgccggcaccggcgggcgatgccgtgtatgcggccaatggcggcctcactgacccgcttctagtgagcgcgaacggccatggtgccgccgcgaggaaggctggccacggcgccaggggcaggtactgggtggcctccgacaaggccgagaggcgcgctgccaaggagtccggcggtgaggacggccgcgcgctgctgttccggaagtataaggtcaaaggcgccctcctgcacccctacaggttgctgatcatcatccgattagtcgctgtcctcgccttcttcgcgtggcgcatcaggcacaacaaatccgacatcatgtggttctggacaatgtccatcgtcggcgacgtctggttcggcttctcgtggctcctcaaccagctcccaaagttcaaccctgtgaagaccatcccagatctcgccgccctccagcggcactttggctaccctgacggcggcgcctctaggctccccggtatcgatgttttcgtcaccactgccgaccccattgatgagcccatactctacaccatgaactgtgtcctctccatcctgtctgtcgattacccagtcgatcggctagcctgctatctctcagatgatagtggggcgctggttctctatgaggcactggccgaggtcggaaagtttgcgcctctatgggttccgttctgccgcaagtactccattgagccaagggcaccagaaagctattttgagcatgtggcaccgccgcaggctggaagggtgacgcaggagttcttgaatgattataggagggtgcagatggagtacgatgagttcaaggcgcgcttggacaacctccctgatgccatacgcaagagatccgatgtttacaatagcgtgagagatgcaggaggagctcaaaaggcaacttggatggcaaatgggacgcagtggcccggcacatggattgatccagcagagaaccataggaaaggacaccatgctccaattgccaaggttgtgctgaaccatccaagccgtggacaacaccctattactgaaagcaatcccagcattgccaccactgatgagcgcctcccaatgcttgtttacgtctctcgtgagaagaacccaggttatgaccacaacaagaaggcaggtgccctgaatgcacagctgcgggcctctgctctcctctctaatgcccaactcatcatcaacttcgactgcgaccactacatcaacaactctcaagccctaagctcggctgtgtgcttcatgctggatcaacgggacggtgataacaccgcatttgttcagttcccacagcgcttcgacaatgttgaccccacggaccgctatggtaaccacaatcgtgtcttctttgatgggaccatgcttgcccttaatggtttgcaagggccctcatacctcggtactggttgcatgttccgtcgcttagcactctatggtattgacccaccccactgtagagcagaaaacatcacggccgaagctagcaggtttggcaactccacaatcttcctagattcagtgtcaaaagccctgaaaaatgacaggacaatcacaccgccaccaattgatgacacattccttgctgagctagagagggttgtgacatgttcttatgacaaaggtactgactggggcaagggtgtagggtacatctatgacatagccactgaagatatagtaacaggattccgcatccacgggcaggggtggcgctctatgtattgcacaatggagcacgatgcgttctgtggcgttgcaccaatcaacctaactgaacgcctccatcaaattgtgcgctggtctggtgggtctttagagatgttcttctcccacaacaatccattcatcggtggtcgccggattcaaccccttcagcgtgtctcctacctcaacatgacagtctacccagtcacatcagtcttcatcctaatctatgctctaagcccggtgatgtggcttatccccgatgaagtatacatccagagaccattcactaggtatgtcgtgtaccttcttgtaatcatcgtgatgattcacatgattggctggcttgagataaagtgggcgggggtcacatggctggactattggcgcaatgagcagttctttatgatcggctcaacaagtgcatatccaatggcagtgctgcacatggcagtgaacctcctcacaaagaagggcatacacttcagggtcacttccaagcaaacagccgcggacgacaatgacaagttcgccgacctttatgattttcgatgggtgccaatgctcatcccaacaatggcagttctgatctgcaatgttggtgccattggtgtagccctgggcaaaactgtggtatacattggaacatggacagcggcgaagaagatgcatgcagcactgggtctgctgttcaacatatggatcatgtttctcctctacccatttgcactagcgatcatggggcggtgggcgaagaggccaatcatccttgtagttctgctgccggttgtctttgcacttgtcgcgctgttgtatgtaggtatccatatcctacttgctggtctgattccattctaggtagtatagaaaacattgtaatttcttgtgtagttaccaaggaaccaattatgttttttttagcaaataa

SEQ ID NO: 141767 - DNA, 113 bp, Zea Mays
ctgatttggcttgttatttcagttcttctgatttggtcatgatttatattcggaatttaaactggaatttatctaattattcaacaaaatcgtccggcgcattccgtcgatga

SEQ ID NO: 141768 - DNA, 1341 bp, Zea Mays
tttttctccctgtagccgccgccatggtgatggccggccatggcggctccgatctgggatcctccggagtgggcgggcacggcgcagcccctcggtgcgcgcgggtgagcctctggcggcggtgcgcgaacccggttgtccggcatacgagcgcgggcgcgagcccggctgctcgacgcgggcgcaggcgcgaccctggcgcgggtgcggtggcctagccatggcggcaccggcactggcgcggtccagtgcaggcggtcctccggtggcgcgggcatgcggccctagccccggccccagcctcggcggcgaccaaccgccaccaggcgggcgcggccacggcacggcggggcggccacggcggcgcgggcaacggttgcctgggcgcgcaggccctagcggcgcgcagccccggcgcacgcgcgggtgcggcctgtgggacaccggcgttccggacgtggccccgcacggcggcggcggcccgtcccaagcctcggcgcgcgggcgcggctgcgctggccccggccccgtcgttttggcgcggcggctcccagccccgtcgacgcgggcgcgggtgctctgttcaggcgcgcggccccccggcccctcggtggcttggcacagaccggcgcacgagggcgggcgcggctgctctgcgcaagcgcgcggcccctcggcggcggttcgcggcggcgcgggcgaggcccctggcccgggcgatggaatcccctgcgcaggcgcgctgtcaggcagccctgaccttggcacacgaacccggctgcagcgtgggcagatggcccctgcgcacagcccagcggcggtgcggccaagcgaccctggcgtagccacgccgcacaggagcgggtccggcctggcgtgagcgtagcctcggcgtcgcggacaatggtgcggcctctgtgcggttccatcgctgcaacgcatggttgaaaccaaaattccatcggccgaggggaccagcgcatgcaagctttcgtactcaatgccacttgctgggagagaaagatgatgacgccgctgaagttcatcctcatcgctccgatggctggtgggaaaccactcatcgagtctacgtgctgataacgtgttgaagtatactcagtggtaacgagattgagagagacaaatagcagaactgttgtttgtattccacagatcattatacttatatacaagtgaaggggtgtatcccaagaggtgtgtcacttgggcaaaactgtcacaccccttgtattgatcacatatgtaatattttgtaacaagtaccatagtactgctagactagagagtgaagagaggtagtcagagagattgacttggacc

SEQ ID NO: 141769 - DNA, 1546 bp, Zea Mays
tttttctccctgtagccgccgccatggtgatggccggccatggcggctccgatctgggatcctccggagtgggcgggcacggcgcagcccctcggtgcgcgcgggtgagcctctggcggcggtgcgcgaacccggttgtccggcatacgagcgcgggcgcgagcccggctgctcgacgcgggcgcaggcgcgaccctggcgcgggtgcggtggcctagccatggcggcaccggcactggcgcggtccagtgcaggcggtcctccggtggcgcgggcatgcggccctagccccggccccagcctcggcggcgaccaaccgccaccaggcgggcgcggccacggcacggcggggcggccacggcggcgcgggcaacggttgcctgggcgcgcaggccctagcggcgcgcagccccggcgcacgcgcgggtgcggcctgtgggacaccggcgttccggacgtggccccgcacggcggcggcggcccgtcccaagcctcggcgcgcgggcgcggctgcgctggccccggccccgtcgttttggcgcggcggctcccagccccgtcgacgcgggcgcgggtgctctgttcaggcgcgcggccccccggcccctcggtggcttggcacagaccggcgcacgagggcgggcgcggctgctctgcgcaagcgcgcggcccctcggcggcggttcgcggcggcgcgggcgaggcccctggcccgggcgatggaatcccctgcgcaggcgcgctgtcaggcagccctgaccttggcacacgaacccggctgcagcgtgggcagatggcccctgcgcacagcccagcggcggtgcggccaagcgaccctggcgtagccacgccgcacaggagcgggtccggcctggcgtgagcgtagcctcggcgtcgcggacaatggtgcggcctctgtgcgggtaggcacacggccccagtgtgtgctggcgaatttgccatggaataaattgaaaaaggtaagcgcaatttgagattaatgcttacggttatttttcagttccatcgctgcaacgcatggttgaaaccaaaattccatcggccgaggggaccagcgcatgcaagctttcgtactcaatgccacttgctgggagagaaagatgatgacgccgctgaagttcatcctcatcgctccgatggctggtgggaaaccactcatcgagtctacgtgctgataacgtgttgaagtatactcagtggtaacgagattgagagagacaaatagcagaactgttgtttgtattccacagatcattatacttatatacaagtgaaggggtgtatcccaagaggtgtgtcacttgggcaaaactgtcacaccccttgtattgatcacatatgtaatattttgtaacaagtaccatagtactgctagactagagagtgaagagaggtagtcagagagattgacttggaccaaagtcagtcgttgccaataatccctccagcatgcagaggcgcgtgcatgcctgtacgagtggatacatgccatatgcatggctcgctatcagcttttcattttcct

SEQ ID NO: 141770 - DNA, 1068 bp, Zea Mays
ccgatctgaaccagacgcagccggccggacactcgacacgccgcggtcctgctatatatcagttgatccagacatccacacccgctgcacacaaacgtaacccccgcagcgagttactccaattcgcgccgactgatcgagacctgccgatccgttcgtctcctctcccgtgaccgcgcgcggctatgaagttgttcatgtgcttcggcggtgcggcggcggcggtcgtgatcggcgacgacgaagcggccgcgcccagacaccggggcctgcgccgtggccgccggagcctgtcgttccgggggaagctgaagttcttgcccggtactcacaacaagggcggatgcagcgagaagaaaccgtcggcggcgccaccgctgggccagccaacgaagcggggggcggacgcagacaacgacgacggcgtctacggcgtgtccagggcgtcgtcggtggcgtcctcggcgctgctgagctccgcgtcgtcgtggccgctggactcatcggacacttcgtcgtcgtcgtcgtcgttgtcgcgctcctcgtccgcctcgtcctcgccgtcggtctcggggatgctttctccgccgtcggtaaagctgcggccgaataacaagaggcccgcgtcgtccccgtccccggcggcgggcgccgcggccgtggtgctgtgcctcctcatggtggtgcttttcggccgggtcggggccacgctgctcatgtccacggcgctctacctcttcccgcgacggtggcccgcgacgacgcgtaaggagagtacggccgccgtcgacccgctggacggctggagcgcgacgccggagaagaggaaggtggttatggagcggtgtgacgcggtccctggcctggagtggaaccgcaacaagtgaagccatgatcccgccgtttcgtttttgccccctgctatttttttttaggaatcagtgatccttttttgtttagatggaaaggattagtttttgcagtactcggcagttttgttttgtccaagggttttttgcaattgtattcaatgcccaatgtgaccaaacttattatacgacacaaaaa

SEQ ID NO: 141771 - DNA, 1501 bp, Zea Mays
cgatcccgatttcccagcaacccccaagccccctctctcccgctgcccgcccacgacatggacatggcctcgccggcgctgctcaccgacgacctcctgtcggacatcttcctccgccttgcggagccggccgacctcgttcgcaccgcagccgcctgcgtccccttccgccgcctcgtcgccgaccgcgcgttcctccgccggtaccgttcgctccaccccgcgcctctcctcggcttcctcgaccacaacggcttccacccggcgctcccgccccacgcatccgcccccgcggcgcgggccgtctcgctcgcagcggatttctccttctcgttcctacccgcctcctccacgggccgcggctgggtcgtccgcgacgtccgcgacggccgcgtcctcctcgaccgctcccccgaggacagaggcgacgagccgcaggtcttcacggagatagcggtgtgcgaccccttgcaccggcgctgcgtcctgctccccccggtccccgtcgacctggccacagcggtggagcacccgctccgcttggagttcgaccgctggtgcgagcccttcctcgtcccccacggcgccgacggagaggatgagacgtcgttcgaagtgatctgtatggtgcagtgcaaagccaagctggtcgccttcgccttctcttccaccactggggaatggcgagccgtcgcgtccatggcctggcgcgacctgatggccggcctgggcgtgtcgtcaaggagccctacgttctccggccgccagtacgctcgcggctgcttctactgggttatggattggcgagacaagttgctcgtgcttgacgctgggaggatggaattctccatcgctgacgtcccacctagctgccataggcgacagatcgcagttgtggaagcaggggaaggcagggttgggatgttggcgctccgcgaccacgttgcagatggtgcagttagcctccattatactgtaaggcgagacgatgccgacggttccaattccaaccagtggcaggtggagaagataattccgctggatcctggatttcggtattacatcaggggtgcgatggagaggtacacgctcctgctaaggtttcctgaacacctaagcttagcaggggtgcatgtaagctcatcggcagtgatagaagacttggaatgtttttccatggacaccaagactttgcagcttgagagggtgtgcgaattgaaccaccacattatgcgtgcctacgtatataccaacttcccaccatccctgtcgccacagagtatctaaatgggtaaactccttccacaaacatgtaatgtatccacatccttcttctttctcatgctattcctattgacatggtaaatttgttagtgacaaacggacaatcttgtctattcaaattttagtagtgttgttttattgtttatgtggtttgtagcttttcttaccacatagatggaaccattaacgtttctatttgatgatcgtcagtgaaatg

SEQ ID NO: 141772 - DNA, 1566 bp, Zea Mays
cgatcccgatttcccagcaacccccaagccccctctctcccgctgcccgcccacgacatggacatggcctcgccggcgctgctcaccgacgacctcctgtcggacatcttcctccgccttgcggagccggccgacctcgttcgcaccgcagccgcctgcgtccccttccgccgcctcgtcgccgaccgcgcgttcctccgccggtaccgttcgctccaccccgcgcctctcctcggcttcctcgaccacaacggcttccacccggcgctcccgccccacgcatccgcccccgcggcgcgggccgtctcgctcgcagcggatttctccttctcgttcctacccgcctcctccacgggccgcggctgggtcgtccgcgacgtccgcgacggccgcgtcctcctcgaccgctcccccgaggacagaggcgacgagccgcaggtcttcacggagatagcggtgtgcgaccccttgcaccggcgctgcgtcctgctccccccggtccccgtcgacctggccacagcggtggagcacccgctccgcttggagttcgaccgctggtgcgagcccttcctcgtcccccacggcgccgacggagaggatgagacgtcgttcgaagtgatctgtatggtgcagtgcaaagccaagctggtcgccttcgccttctcttccaccactggggaatggcgagccgtcgcgtccatggcctggcgcgacctgatggccggcctgggcgtgtcgtcaaggagccctacgttctccggccgccagtacgctcgcggctgcttctactgggttatggattggcgagacaagttgctcgtgcttgacgctgggaggatggaattctccatcgctgacgtcccacctagctgccataggcgacagatcgcagttgtggaagcaggggaaggcagggttgggatgttggcgctccgcgaccacgttgcagatggtgcagttagcctccattatactgtaaggcgagacgatgccgacggttccaattccaaccagtggcaggtggagaagataattccgctggatcctggatttcggtattacatcaggggtgcgatggagaggtacacgctcctgctaaggtttcctgaacacctaagcttagcaggggtgcatgtaagctcatcggcagtgatagaagacttggaatgtttttccatggacaccaagactttgcagcttgagagggtgtgcgaattgaaccaccacattatgcgtgcctacgtatataccaacttcccaccatccctgtcgccacagagtatctaaatggcttatggccagcgcagcatccttgccctcaaggctcaaatgattgcgtgtgagcttcgtgtatgaactgttagattgtatcccagatttccacatcctcatggctaccagtctatagctgttgccatgctggttgtttagagtggttgtttagagagatgatacagcaccttttggatttattatgggctagactcatttaaatttgataaatcaataaactctatggtgtctaattgtggacaatacaaatagtaccgaattggaattctaagg

SEQ ID NO: 141773 - DNA, 826 bp, Zea Mays
ggctgtcgtagggaggagaaggaggaggagatcggtgaggagagaaggggatttatgtcccagcgaggggacaggggcgaggggcacgccaggagacccggccggtccagcagcttcggcggccaccgcggaggcggagtcggtggcgcgggcaagggcggcgcgggctcctcaggccagcctcctctctcatccaaccgcagctttagaaagcctggcaatggccacggcgggcaccagagggtggtgaaccagcccgacaccactggcttccagcctgcaccagcgcctggcacccaccaaactcctgcgcgcccgccacctgcgcctcagaatgcagccgtgcatgttcctgtctccgcatcacggccacaacaccagggtgagtgaggtgtcctgttccgctatcttgtactgtgtttggaatggtgccgtttggattgataaacatgatgtgttccttcgtttgattgcacatgtttttttttgattcaccagatccacatgtgtcatcttcattgtctgccagcgagaaaccggctaatccgccgttaccactaccgaaagctacacatgctgctccaagggctctaccaaaaaactctaacacagcgcttcctcagggaggatcgcaaggagaaccatcaaaggggtttaactttcagtttggtagtataaatatgaatgggctaccggtatgattttgttatctcttttttttttctccagcttgggtcatgaagctctctgtattagcaattaccttttgctttctacttacattacatctataaaattttgtacagcaatttcctgccaggacaag

SEQ ID NO: 141774 - DNA, 2909 bp, Zea Mays
ggctgtcgtagggaggagaaggaggaggagatcggtgaggagagaaggggatttatgtcccagcgaggggacaggggcgaggggcacgccaggagacccggccggtccagcagcttcggcggccaccgcggaggcggagtcggtggcgcgggcaagggcggcgcgggctcctcaggccagcctcctctctcatccaaccgcagctttagaaagcctggcaatggccacggcgggcaccagagggtggtgaaccagcccgacaccactggcttccagcctgcaccagcgcctggcacccaccaaactcctgcgcgcccgccacctgcgcctcagaatgcagccgtgcatgttcctgtctccgcatcacggccacaacaccaggatccacatgtgtcatcttcattgtctgccagcgagaaaccggctaatccgccgttaccactaccgaaagctacacatgctgctccaagggctctaccaaaaaactctaacacagcgcttcctcagggaggatcgcaaggagaaccatcaaaggggtttaactttcagtttggtagtataaatatgaatgggctaccgcaatttcctgccaggacaagctcagctcctccaaatttggatgaacaaaaacgtaatcaggcacttgtggaggaacttaaggttacacctgcccctgtgcaaccagctctgaaacagcagcagttgcagcagcagccacagctgccgccacagctgccgccgcagcaggttccccagcagccacagcagcagtcagcaagaaaggaagctgttggttccagccaacataactccatcaatccccatattacatcgcaattgaaaagagatgtgcacccatctccatctgtccctaatgttacatctcttagacctaccgttcaaattcctggtgttcagatgccgatccccttccatcaccagccggcacaagtttccttgcagtttggtggtcatggggcacaactgcagcctcaagtcgtgcctagctcatatcaaatgtcaatgggattgacaggcagtagtacacaagtcccacagcagctgtatgcccctactctgcagcatcatcaattgcaacagcaagcaatgatgcatcctggccagggtatgggttatgttccttccgttgctcaccaattcccacagttgggaaacattcctatgaacatcgcatcacaatatgctcagcaacagccaaacacgcatgctgctgcacgtaagactactgtaaaaattactcatccagacactcatgaagagttgaagctcgataagaggatggactcttctgggcagagagctgcaccgagcttgacacaacaatcccagcccgttggtaattatgctcctcatattggcttctttcatcagccacagagttcctacaatcagtcaggaatgtattaccctactacagctggtgtgaaccaggttgctactggatcttcaggtcctagatataattatcctgtcactcagtctgggcaagcgatgacatatatcagtccatctgcagtgcctccggtatctgctcagtcccaatatacagttaaaccgcaccctattgggttggtgactgaaaaatctagtactcatgtcacaataagtgctccaccagctaaatctgagcctcctaagttacgtgctgctgaggattctgcgtcaagtcggcaaaaggataatgaaattgtttctgggatcgctgtttctagtaaatcaatccttgagaaggaggagagtaacgatcctttagtcacagtgaagcattcgactgtaataagcccgtccttgccaattcatggtgcaaaatcacaaacttcagtgacatcatctcctgttgtgaattcagtctcacctgtggcaggagttgatggaaaaagcatagaatctattcaaaggactggatcatttaatgataacaagaaaattgtcactaaaaaggatgtcaggatttcatctgaaccaccgaattcagcttcatctgttgaagataaggtgcaaactgtaaaggctggaggcagtgatcaccaggaaactaacaacctgaacaatgagttggatttggccagctcatcttcatgctcaacggttccactggcagtaagtaggatctttccagggaccgtttcagtgaatgctaacagcacagcagtaactgctgctgatgttcctgggacagatagaagctcaagaagaccatctcccgagggtactggtgagcctgcagtagaaagcttcactgttttggctgttgaatgtgacaaaaggaagcggactgatgaagttgcgacagatcctagcaaggataatatttcttctgatgctaccaaacatgaattgcctgatgcatgtgcagtggaccctactgaacaggcatcagcagtgacttctaatactgatgattcatatgcatcccctatagtaaataatcaggagcagttgctgaaagagtctgctccatctgcttctgaggaacaagctatgatgaataacttttccaagaattctgagacttcacattttcttgatagcaatgctgtggaagtgagaactggaacttcagagcctactgttcaaagttccaatgacgaaggtgactcggatattagtccagaaacagacctagctgtttgcaatgttcctctagtttcatctgagggacaactgaaatctgagagtagggctgatgatcaacaggctgctgaaccaacagtttcagttcgatcagtatccagggaaaagcctagtgttgagatcgccaggtcaaagtccgcagctgggaagaggaagaagaaaaaggaaatgcttgctaaggctgatgctgctgggtcttcagatctttataatgcatacaagggaccagaagagaagtctgaaatggttggtac

SEQ ID NO: 141775 - DNA, 6145 bp, Zea Mays
atgtcccagcgaggggacaggggcgaggggcacgccaggagacccggccggtccagcagcttcggcggccaccgcggaggcggagtcggtggcgcgggcaagggcggcgcgggctcctcaggccagcctcctctctcatccaaccgcagctttagaaagcctggcaatggccacggcgggcaccagagggtggtgaaccagcccgacaccactggcttccagcctgcaccagcgcctggcacccaccaaactcctgcgcgcccgccacctgcgcctcagaatgcagccgtgcatgttcctgtctccgcatcacggccacaacaccaggatccacatgtgtcatcttcattgtctgccagcgagaaaccggctaatccgccgttaccactaccgaaagctacacatgctgctccaagggctctaccaaaaaactctaacacagcgcttcctcagggaggatcgcaaggagaaccatcaaaggggtttaactttcagtttggtagtataaatatgaatgggctaccgcaatttcctgccaggacaagctcagctcctccaaatttggatgaacaaaaacgtaatcaggcacttgtggaggaacttaaggttacacctgcccctgtgcaaccagctctgaaacagcagcagttgcagcagcagccacagctgccgccacagctgccgccgcagcaggttccccagcagccacagcagcagtcagcaagaaaggaagctgttggttccagccaacataactccatcaatccccatattacatcgcaattgaaaagagatgtgcacccatctccatctgtccctaatgttacatctcttagacctaccgttcaaattcctggtgttcagatgccgatccccttccatcaccagccggcacaagtttccttgcagtttggtggtcatggggcacaactgcagcctcaagtcgtgcctagctcatatcaaatgtcaatgggattgacaggcagtagtacacaagtcccacagcagctgtatgcccctactctgcagcatcatcaattgcaacagcaagcaatgatgcatcctggccagggtatgggttatgttccttccgttgctcaccaattcccacagttgggaaacattcctatgaacatcgcatcacaatatgctcagcaacagccaaacacgcatgctgctgcacgtaagactactgtaaaaattactcatccagacactcatgaagagttgaagctcgataagaggatggactcttctgggcagagagctgcaccgagcttgacacaacaatcccagcccgttggtaattatgctcctcatattggcttctttcatcagccacagagttcctacaatcagtcaggaatgtattaccctactacagctggtgtgaaccaggttgctactggatcttcaggtcctagatataattatcctgtcactcagtctgggcaagcgatgacatatatcagtccatctgcagtgcctccggtatctgctcagtcccaatatacagttaaaccgcaccctattgggttggtgactgaaaaatctagtactcatgtcacaataagtgctccaccagctaaatctgagcctcctaagttacgtgctgctgaggattctgcgtcaagtcggcaaaaggataatgaaattgtttctgggatcgctgtttctagtaaatcaatccttgagaaggaggagagtaacgatcctttagtcacagtgaagcattcgactgtaataagcccgtccttgccaattcatggtgcaaaatcacaaacttcagtgacatcatctcctgttgtgaattcagtctcacctgtggcaggagttgatggaaaaagcatagaatctattcaaaggactggatcatttaatgataacaagaaaattgtcactaaaaaggatgtcaggatttcatctgaaccaccgaattcagcttcatctgttgaagataaggtgcaaactgtaaaggctggaggcagtgatcaccaggaaactaacaacctgaacaatgagttggatttggccagctcatcttcatgctcaacggttccactggcagtaagtaggatctttccagggaccgtttcagtgaatgctaacagcacagcagtaactggtgagatcttgaaacttttagaattgtacagggatgcctcttatttttttctaactcatttacgttggcagctgctgatgttcctgggacagatagaagctcaagaagaccatctcccgagggtactggtgagcctgcagtagaaagcttcactgttttggctgttgaatgtgacaaaaggaagcggactgatgaagttgcgacagatcctagcaaggataatatttcttctgatgctaccaaacatgaattgcctgatgcatgtgcagtggaccctactgaacaggcatcagcagtgacttctaatactgatgattcatatgcatcccctatagtaaataatcaggagcagttgctgaaagagtctgctccatctgcttctgaggaacaagctatgatgaataacttttccaagaattctgagacttcacattttcttgatagcaatgctgtggaagtgagaactggaacttcagagcctactgttcaaagttccaatgacgaaggtgactcggatattagtccagaaacagacctagctgtttgcaatgttcctctagtttcatctgagggacaactgaaatctgagagtagggctgatgatcaacaggctgctgaaccaacagtttcagttcgatcagtatccagggaaaagcctagtgttgagatcgccaggtcaaagtccgcagctgggaagaggaagaagaaaaaggaaatgcttgctaaggctgatgctgctgggtcttcagatctttataatgcatacaagggaccagaagagaagtctgaaatggttggtactgcagatggtgctgatagttcttcaatagttgacacaacacatgtgctgcttgatgaagcagaaagggatgttagtacgtttgcagatgattgtaagaaaaaagttgagcttgatgattgggaagatgctgcagacatgtctactccaaagctggcaccagattctggaaatcaggctggcaccacccaagtgctagattcagatacaagtgaagcaaacagcaggaagaaatattcacgggattttctgttgaccttgcaacaccactgtactggtcttcctgttggatttcagatgaatgaagctgtcaatgcaataatgaataatttggttggaaagtcttatgttgttgaccgggaaccttaccctagtcctggaaggggtttggaccgcccaacttctcgtggtgaccgccgtggtgctgccatgactgacgacaggtggactaagacgggtgttcctctcagtcctggtcgtgatgttcacatggacctgccaaatggaacatcagttgtcaactaccgtagctcaggaggtaatcatggtgttttaaggaatccacgtggccaaccatcaaatcaatatggtggtggtcttcttgcaggacctgtgcattctgttgggcctcaagtacctcgcagcggctctgattctgatagatggcagcaaaagggtctcatgccttcccctgtcacacccatgcaaacaatgcacaaagcagagaggaagtatgttgttgggaaagtttctgatgaggaggaggcgaaacagaggcagttgaaaggcattcttaacaagctgactccacaaaactttgaaaaactgtttgaacaagttaaggaagtcaacattgacagtgtagcaactcttactggggtcatttcacagatatttgacaaagctttgatggaaccaactttttgtgaaatgtatgctaatttttgcttccatctggctggtgccttgcctgacttcagtgaagacaatgaaaagatcacattcaaaagattgcttttgaataaatgccaagaggagtttgagagaggtgaaagggaagaagctgaagctgataaaacagaagaggaaggtgagatcaaacagaccaaagaagaaagagaggaaaagagaatccgtgctcgaaggcgcatgctgggaaacattaggttaatcggagagttgttcaaaaagaaaatgttgacagaaaggattatgcatgagtgcattaaaaaattgtttggaaattgtgatgatcccgatgaggagaacattgaagcactatgcaaattgatgagtacaattggtgagatgattgatcgtgcaaaggcaaaggagcacatggatgcatattttggtatgatgcataagatgtcaacaagtcagaagttgtcttctcgtgtaaggtttatgttgagagattcaattgacctcaggagaaataaatggcaacagaggcgtaaagttgaaggccccaagaagattgaggaggtgcacagagatgcagctcaagaaagacatgctcagtcaagtaggctaggacgtggtccagctgttagttctgtttcaagaagaggagcaccttctatggattatggctctcgtggctcatctgcgttagcatcctcaagttcccaacaagggagcattcgtggaatgcctccacactcgcgtggttcacaagacatccgatatgaggagaggaaccagtttgacaatagaactgttcttccccagcgtgtagtcaaggatgaagctatcactcttgggccacaaggtggccttgctaggggtatgtctataagagggctgtcaccagcatcaaatactgaacttccttctgttattgaccaccggagaatattatctggttctaatggttataactctgtgactgattggacatcatcatctggaagagaagattctagctcaataattccagatcgaacctctggccgaacttctgcttctagtcaatctgctggaccttcacagaggcctgccagccaggaaggccgtccaggaagtaaatcatattctgaggatgaattgagagaaaaatctgttttggccattcgggaatattacagtgcaaaagatgaaaaggaggttgctttgtgtattgaggagctgaatgctccgagtttctatccttctgttgtatcactttgggtaaatgattccttcgagagaaaagacatggaaagagagttgttggctaaacttctcgtcagcctttgcagtggtcgacataatttgttgagcaagcaacaactcagtgatggcctttcatctgttcttaccttattggaagatactctaagtgatgctccaagggccaccgagtaccttggacgactttttgcaaggtttgtggaggaaagcatattgctcttggaagaggtaggtaaattgattcaagaagttggagaagaaccagggtatctaatacgagatggcatcgccgctgacatccttggtgctgttctggattccataaaatcagacaaaggggattcattcttgaatgaggttaagtcaacttcgagtttaaaattggttgatttcagaccacatcatcttaagcgatcaaagttggatgccttcatgtagctacatgagttattattacctgattcaccaatgggtgcggccgccaagcagtttactttgttcgcacgcaaatacccatcggcctttttgatgtactgtgaaaaattcctctgatgctactcctacttgctgtacctgatcgtgcactatttataagatggaaggcgatgggtcacccattttttcagagttgatgctggttgtaaactactgtcaatgaagggtcatgggtgggaagcagctagctaggcccccataagaggatcagggaatatttttgcgatcacagggagaagtctgctaaccaatattagttggtagttgggggaactgtaggttgaacttaatgcctcctgcgggcttctgaccaaatactcctttgtgatcagaattggtagtcggttaacttagcggcattttcgtgatagccaatgtttctcgtgatggtctgaatatgttgatgttgcttaaattttgctgtaatttgctatttttcctcgttctttgtttttgtacttattgagaattgatgcctcggattctctgatgtatgtatgattgggctcaggctcagggcactttgccatccctattttgtcatttcggtt

SEQ ID NO: 141776 - DNA, 1990 bp, Zea Mays
tcttcgtcttggcgaccattccctcttcttgccattgtgacgaagctgtcctgcaaagagaagaagaatacttccaatccgaagccattcaaggtgcgttcaacttcgtatccggagtccggagccattcaaggtgcaagagctgctactggctgtactgtatccaagagctggtatttgacaattctccatcccactcccacctacccacgcccgcccacagggccagtgggccacggcccacgggacgccggcgacgccaatacgggatggcctcgccggaactgcccggcgccaagcgtaacaacgtcctggtgccgccgtccccgcttttgcgcctcaacgatgacctcctcgccgatattttcctccgcctgcccaccctcgccgatgtagggcgcgccgccaccacctgcgcctccttccgccgcgtcgtcgccgacagcaccttcctgcgccgcctccgctccgtccacccggcgcccctcctcggcttactgctcttctcatcagtccacccggcggagccgccccacccctccgcgccctatgcgcgagctctgcagagggccgcagacctctccttctccttcgtcccctgcgccggccgctggatcccgatcgacgcccgcgacggccgcgtcctcctggagagcgagaccatgggcggcgactttgcggtgtgcgaccctgtgtcccggcgatacctctttctgccccgtatccccggacacccagccgctcagcgctgccgccgtctggagccgttcctcgttcccgccagtaacgaggagccggagacgtcgctgagggtggtctgcgtggcagagcgcaaacctggacagctggtcgccttcgtcttctcttcggacaccgggcgatggggaagtctgaccgtggatgtcagcgtgcctccctcttgcaaattttcgtggtcctcctacggtttcggcagctgctactggaaggtgactgggagtaacaaactccttgggctcgacacgcgttccatggtgttctcctctttcgatatcccgtctggttacggccagcaagattctgtcgttgtggaggcagcggaaggcagattcagaatgttcactctccacaacagcatgatttctgctgcatcttacctggttcatgctgttcgggtaatccgcgaagaaggcaacaacctttggcaggttaagaggagagtcaggttgccgtcccaatatattttcagctttgcagatgcaacggataagcacttactccttcgtgggattccatggaatttgcacctggagccttctactcctggcgctgatataggatacttctctgttgagttcgagtctatgcaggttgagaaaatttgtggcatcaggaatcttctatacgccaaactgtacactggttttccaccgtcattgtccctaccaagcatatgaaatggtggcttcacaacgtgaatgaactatgctggctattgacttcaatctggtggtttggaaaggaagcaaaggattcatgtatgaactacttccagggcagggtcactaaggagtaaaaggacttgaggactgatgagcagttggatgatctgtttttcagtcttttaggacatgtttggatgcagccctggcctggaccgcctgctggcttaggcagctttcccgtgccgccatccaaacatgcccgcccttattttgtcgtcgtaccaatatttcgatgtgattctgcatccgcatctgccagagtgctgttgcaacgttgcatcctatcctggaaggctggaatgtttatttggtgctcggcatctctctgaacttcatgtttccccggcgtaccatgctagtgtttttcaatggagccattattgcacttcgctgtgctaatacgtgcctcaattactgttactcgttatttgctattcggatggttcatgtaacaaatgtggattgagcaatctggtgcatccaatcaaaatccaacggtgaccttc

SEQ ID NO: 141777 - DNA, 1942 bp, Zea Mays
accgcgcaccgcccgaccagcgacgggaacccacgccgccccctctccgccccgtgcagtcgctccccagctcccgcgccgccgttccctgctaaccccatccccttcgcctcgcctcgtgctaagagagcgcggaccactgcggtgccacgccgacgccttctgccggccccaggtggattctgtccgcagactcctggaggtgctgctatctagccccttgatctgagctgaaattaggagctgaacctgccgggcgagccgatgtacggctcgccggtgtccaaggacctcaacctcccggtgcagccgcccatggcctcgtccgggctgctgaggtacagatcggcgcccagcacggtgctcggcgacctgtgcgaggacttcctctcttccgcgccccgcgccgccagccctgacgccggcgccgacaacgtcttctccaggttccttgctgaccaccacatccgggacgacaagccgtcgccgcttgcctccgccgccgtccacttcccgactgaaaccgacacggcctcccagcagcagcagcagcagatgatgttccactcccagcagcagcaggagatggtgagcgccaagtccggcctttaccgcaccgtgaactcaggcgtagaaaccgcggccgctgctggtgccggcggggccagctccagtgacaacgctagcaacctgattcgacagagcagctcccccgccggattcctcgatcatttgaacatggagaacggatacggggccatgctgagggcgggcatggccacggcggactccctcgcaggcggcggcagcaggctaaaagggcaactgagcttctcgtcacggcaggggtcattgatgtcccagatctcagagatggacagcgaggaggtcggagggagcagcccagaggcttccggcggcggcggcagggggtacatccctgggtacccaatgggctctgggtgggaggactcgtcggctctcttgtcagacaatttgtctggcgtcaaacgcccccgggactcgtcggagcctggccagagcggccttacgcaccagttcagcgtgcccaagacgtcgtccgagatggcaactattgagaaattcctccagttccaggacgccgtgccttgtaagatccgtgccaagcgggggtgcgccactcatccacgcagcatcgctgagagggtgaggagaacaaagatcagtgagcgaatccgaaagctgcaagaactcgttccaaatatggacaagcaaaccaacacatctgacatgctggatttggctgtcgactacatcaaggatctccagaagcaggttaaggtactaaaggagagccaagataactgcacctgctcagcaagcaagaaccagcagcactcctgctgaaaccgtaatgctcactgtacatgaatgacctcgaaagcatgtccactcgggaaagaaaaagatgtaagacagctctcatgcatgttgtttcatgaggttttgaactgcagcagttgagaggctttatctaccaggcagtgtagcttttgtatgagcgaagggggatgaagcaatggcatcatcaagcattcaagtgattgggagaagggtaaaaaaagtggggagagatatatatacaggagaaacaactgtatagtttggctgtagctttgctatatatacacacacgcactaccctttcggtagaaagtggttaatttacctctgtttactagtagcaccagctgtaaatgtgccgcagataaacagtggagaagcttggaggtgttcagtgcgagcgatagtgtttcaactctatgaacatatcatcgttgggttaatgggcatcatctactggggtctggggatagccctgcttcctctcggacctcaggcctgaagcttgtatgttgttcagctatctgacattctgactatatcgatgcttaacata

SEQ ID NO: 141778 - DNA, 1871 bp, Zea Mays
accgcgcaccgcccgaccagcgacgggaacccacgccgccccctctccgccccgtgcagtcgctccccagctcccgcgccgccgttccctgctaaccccatccccttcgcctcgcctcgtgctaagagagcgcggaccactgcggtgccacgccgacgccttctgccggccccaggtggattctgtccgcagactcctggaggtgctgctatctagccccttgatctgagctgaaattaggagctgaacctgccgggcgagccgatgtacggctcgccggtgtccaaggacctcaacctcccggtgcagccgcccatggcctcgtccgggctgctgaggtacagatcggcgcccagcacggtgctcggcgacctgtgcgaggacttcctctcttccgcgccccgcgccgccagccctgacgccggcgccgacaacgtcttctccaggttccttgctgaccaccacatccgggacgacaagccgtcgccgcttgcctccgccgccgtccacttcccgactgaaaccgacacggcctcccagcagcagcagcagcagatgatgttccactcccagcagcagcaggagatggtgagcgccaagtccggcctttaccgcaccgtgaactcaggcgtagaaaccgcggccgctgctggtgccggcggggccagctccagtgacaacgctagcaacctgattcgacagagcagctcccccgccggattcctcgatcatttgaacatggagaacggatacggggccatgctgagggcgggcatggccacggcggactccctcgcaggcggcggcagcaggctaaaagggcaactgagcttctcgtcacggcaggggtcattgatgtcccagatctcagagatggacagcgaggaggtcggagggagcagcccagaggcttccggcggcggcggcagggggtacatccctgggtacccaatgggctctgggtgggaggactcgtcggctctcttgtcagacaatttgtctggcgtcaaacgcccccgggactcgtcggagcctggccagagcggccttacgcaccagttcagcgtgcccaagacgtcgtccgagatggcaactattgagaaattcctccagttccaggacgccgtgccttgtaagatccgtgccaagcgggggtgcgccactcatccacgcagcatcgctgagagggtgaggagaacaaagatcagtgagcgaatccgaaagctgcaagaactcgttccaaatatggacaagcaaaccaacacatctgacatgctggatttggctgtcgactacatcaaggatctccagaagcaggttaaggtactaaaggagagccaagataactgcacctgctcagcaagcaagaaccagcagcactcctgctgaaaccgtaatgctcactgtacatgaatgacctcgaaagcatgtccactcgggaaagaaaaagatgcagtgtagcttttgtatgagcgaagggggatgaagcaatggcatcatcaagcattcaagtgattgggagaagggtaaaaaaagtggggagagatatatatacaggagaaacaactgtatagtttggctgtagctttgctatatatacacacacgcactaccctttcggtagaaagtggttaatttacctctgtttactagtagcaccagctgtaaatgtgccgcagataaacagtggagaagcttggaggtgttcagtgcgagcgatagtgtttcaactctatgaacatatcatcgttgggttaatgggcatcatctactggggtctggggatagccctgcttcctctcggacctcaggcctgaagcttgtatgttgttcagctatctgacattctgactatatcgatgcttaacata

SEQ ID NO: 141779 - DNA, 1362 bp, Zea Mays
atggcaggctcttcatcatacagcgttctccctctctggtaccacccgtttaactcttgccactttctgctccttttttttcttcttcttgatttgaaggaccagaccatggacaacgatgatgcacaaattggagttgctaaaactcagggaaagtattggggcattttcatctgctggcttcttggaaatggatgtctatttgggttcaatgggatgcttactattgaagattactacgtgtacctcttcccgaagtaccatccaacaaggattattactctcacctatcagccctttgttctcgccacaaccgccatattcacatatcacgaggccaaggtcaatactagggtgcgcaacctggcaggatacacgttgttcttcttgagctcatttggagtgatcatcctggatgttttgtcttcaggaagtggtggaatcgccccattcgttggtatctgtaccattgctgctgcttttggcatagcagacggtcatgttcaaggcggaatgactggtgatctgtccctgatgtgcccagaattcgtccagtccttctttggcggcgttgctgcatcaggtgcaataaccgcggcgttaaggttcttcacaaaagcggtgtttgagaattccagagatggcctgcggaaaggagctatgctgttctcttcgatctcgtgcttctttgagcttctatgcgttctactttatgctctggtgttcccgaagttgccaatcgtgaaattctaccgttcaaaagctgcctctgaggggtctcagacagtcaccgctgaccttgctgctggaggcatcaaaagcctgccgaatccattggctgaggaagatggtgtggtcgaacggttgaacaacaagcagttgctgcatgagaacatggactacgctctggacatgttcctggtctatgtcctgacactgtcgattttcccagggtttttggcggaagacactggatcgcacagcttgggttcttggtacgtgcttgtgttgatcgcgagctttaacgtgtcggacctgatcggaagatacctgcctctggtcgagcaaatgaagctgacatccaggacggggctactaaccgcagccatctctaggttcctgctcgtcccggcgttctacttcacggcaaagtacggtgaccagggctggatgatcatgttaacgtcgctccttggactgagcaacggccatctcaccgtctccgtcctcaccgaggcgccgaaaggctacaaggggccagaacagaatgctctggggaacctgctggtgcttttcctcttggcaggcatatttgttggcgccgtttctgattggctgtggctcataggcaaagggtggtga

SEQ ID NO: 141780 - DNA, 166 bp, Zea Mays
ctgtggctcataggcaaagggtggtgaccgaacttaacttgttctccccaggtgtatatttattatgcaagctagcagatcatgcaatcaataaatcatttctaaagttgactcgtatctttttttttaatcatcataaccaatatgatccaaccattcacatgct

SEQ ID NO: 141781 - DNA, 449 bp, Zea Mays
ctgaccaccaggcctggtacccgcactccccggctcgttggtcgttgccctgccccggctttctcggtgtccgcctgccgctcttggccgccgccgccgccgccgcggacgacggcgagtgggccgagacttgcccccccgcgccgcccggcacaccgcaggtgaagccatgagcatggaggtagcaggtgcagaggcacctgtcaaggggaaattccttggtatacttgtctgctggcttttgggaaatggaagccttttcgcgtggaacagtattctaaccattgaagattactactcccatctcttcccggtacttgctttcagaactcagttgatgattgattggaatgagttcagtttcagtgtagcagggtagcagcacagttgaaaaacatggagggggtggcatccttgatttatctttgttcgtcaaataaactgaatgg

SEQ ID NO: 141782 - DNA, 1708 bp, Zea Mays
ctgaccaccaggcctggtacccgcactccccggctcgttggtcgttgccctgccccggctttctcggtgtccgcctgccgctcttggccgccgccgccgccgccgcggacgacggcgagtgggccgagacttgcccccccgcgccgcccggcacaccgcaggtgaagccatgagcatggaggtagcaggtgcagaggcacctgtcaaggggaaattccttggtatacttgtctgctggcttttgggaaatggaagccttttcgcgtggaacagtattctaaccattgaagattactactcccatctcttcccggattatcatccaacaagagtactcacactagtttaccagccttttgcctttggaataaccctcatcatgacatattatgaagcaaagatgaacacaagattgagaaatcttgcaggattttcccttttcttcctcggttcttttgcattgataattctggatgttgcaactaaaggacatggtgggcttggtgttttcgttggtgtatgcataattagcgccatatttgggacagctgatgctaattgtcaaggcgcactggttggcgacctttctttaatgtgcccagagttcattcagtccttcatggcgggactagctgcatcaggggtcctaacatcagctttgagattagttaccaaggcagcttttgagagctcaaaagatggtcttcgcattggagctatactgttcttttcaatcacatgcctgttcgagctggtgtgcctcctgctatacacattcgtcttcggcaaactacccatcgtgaagtactaccgtgcaaaggcagccgctgaaggcagcaagactgttgccagcgacctcgccgctgcagggatcatctctgaacaacagggacagatggaggaggatccagagaaatacaagcgtctgaccactaaagagctgctgatgcagaacatcgactacgcgctcgatatctacctgatatacgtcctaacgctgtcgatcttcccaggatttttgtctgaagacaccggagcacacaacctgggaacatggtacgcgcttgtgctgatcgcgatgtacaacgtgtgggacctgatcgggaggtacgtgccgctgatcccgtgcttgaaactgacctcccggaagggcacgctggcggctgtcttggcgcggttcctgttcatcccggccttctacttcacggccaaatacggcgaccaggggtacatgatcttcctaacctccttcctggggctcaccaacgggtacctcaccgtgtgtgtgctcatggaggcgcccaaggggtacaagggccccgagcagaacgctctgggcaacgtgctcgtcgtctgcctcctcggcggcctcttctccggcgtcgtgctcgactggctctggctcattggcaagggctggtgagtacggtcttctgcgcgtgggtctttgagggggatcgattagattttagatctctgtttcgacctcttgtttttgcttaaaaaaacagaaaacttctgtctttaggtagctagtcagagaacacggatactgtaatctgtctaagtttgaaattttctttcgggtgcaatcactcccttttgtttccgacttttggatgttgtatagtattttggaatgaaatattattgaggtgtgagcttgagcacctgggtgtattttcttacaatataatttagctcttgc

SEQ ID NO: 141783 - DNA, 1650 bp, Zea Mays
ccgtcgtcagggttttcatccgccgcaacgcccaagccacctcacacctgtacaaagaggctgcaccaccaattgtctgctggtccagcaaaaaaaacatcgtatactttagtggggtcagggatatcaggcacaccgcaggtgaagccatgagcatggaggtagcaggtgcagaggcacctgtcaaggggaaattccttggtatacttgtctgctggcttttgggaaatggaagccttttcgcgtggaacagtattctaaccattgaagattactactcccatctcttcccggattatcatccaacaagagtactcacactagtttaccagccttttgcctttggaataaccctcatcatgacatattatgaagcaaagatgaacacaagattgagaaatcttgcaggattttcccttttcttcctcggttcttttgcattgataattctggatgttgcaactaaaggacatggtgggcttggtgttttcgttggtgtatgcataattagcgccatatttgggacagctgatgctaattgtcaaggcgcactggttggcgacctttctttaatgtgcccagagttcattcagtccttcatggcgggactagctgcatcaggggtcctaacatcagctttgagattagttaccaaggcagcttttgagagctcaaaagatggtcttcgcattggagctatactgttcttttcaatcacatgcctgttcgagctggtgtgcctcctgctatacacattcgtcttcggcaaactacccatcgtgaagtactaccgtgcaaaggcagccgctgaaggcagcaagactgttgccagcgacctcgccgctgcagggatcatctctgaacaacagggacagatggaggaggatccagagaaatacaagcgtctgaccactaaagagctgctgatgcagaacatcgactacgcgctcgatatctacctgatatacgtcctaacgctgtcgatcttcccaggatttttgtctgaagacaccggagcacacaacctgggaacatggtacgcgcttgtgctgatcgcgatgtacaacgtgtgggacctgatcgggaggtacgtgccgctgatcccgtgcttgaaactgacctcccggaagggcacgctggcggctgtcttggcgcggttcctgttcatcccggccttctacttcacggccaaatacggcgaccaggggtacatgatcttcctaacctccttcctggggctcaccaacgggtacctcaccgtgtgtgtgctcatggaggcgcccaaggggtacaagggccccgagcagaacgctctgggcaacgtgctcgtcgtctgcctcctcggcggcctcttctccggcgtcgtgctcgactggctctggctcattggcaagggctggtgagtacggtcttctgcgcgtgggtctttgagggggatcgattagattttagatctctgtttcgacctcttgtttttgcttaaaaaaacagaaaacttctgtctttaggtagctagtcagagaacacggatactgtaatctgtctaagtttgaaattttctttcgggtgcaatcactcccttttgtttccgacttttggatgttgtatagtattttggaatgaaatattattgaggtgtgagcttgagca

SEQ ID NO: 141784 - DNA, 583 bp, Zea Mays
cattctctgtttgatcgaaagacgctgtccatattattgatgtaatttgatccacgatgctgcgatttgcccttctgaccccagttctccagttctcctctcctgggctgcgagagtagtagattcgattcggcgcgcgagctcggcgtcttgtctgacctaccctgatgcagtgatgctcccgtttccaatttccggcacgacgcgtgtatgcggtacggcgggaccaggcgccgctcatcggcggtgcagcccggaccccatttgtcagcgcggaaggcgacaaaacagagcgcaacagccgttcagccagcgtccgttgccttgcctgcctgcggccgccgcccgcgaggccgcgaggtacgctggacccgggcggacgggcggtgccgccgccgggttctgctccttgcgcggatgaattcaggttaacaaagtatgagcgattcggagtgtgcaggagcacctcaacttaaggggaagtacatggtctgttcgtctgctctctattggggaatggatgcctcttctcatggaacagtatgtgcttacaattgaagattactatgtctatctcttcccc

SEQ ID NO: 141785 - DNA, 369 bp, Zea Mays
tacattacggtgtagattttggcaaggagtaatatgtatgatgctgatgcaacagacaaatgcatatgccatgtatcatcaggggagcttagtcagaagcattgcaaaagtgaaacaaaccagctatttatgttcaggctccagacatctcttttttctcgtattcacaattttagtgagaaggattgccaagctgacaagtgggataaaccattcgagaatttagtatataacatgttatctgcttccgtgtgtcttagaatagtaatatctctgttccaagttgttctgtttccatgtacttttgacagtgtgcttgactgcgttgtaaaaacagagaagaaaagaacaatttatgtcatcttgaac

SEQ ID NO: 141786 - DNA, 2074 bp, Zea Mays
agtcagagagcgggccccatgcacgcagccctctttacccccatccgcagcccgcgcttgtgtccttctccgcgagccagtacacgcaccacttccccccttcgatctagccatcccaactccgccgactcgctggaaccctagccagccgccgccatgccgccgcgccgcggtagaaggaaggggaagggcagggcaaagccaagagcgaaggccaccgagcccgagcctgagctagaggaagccgccgattccgagatcgaggcgggggacgcgaaggcggaggagtccggcgaagcgaaagaagatgaatcggcaagcgacgccgagtccatggatgcagatgccaacgaggaagccgtcgagaacggagcggatgagatggatgcggagcctgaagccaaagccgagccggaagcggtagccaccgaggcggaagcgaaacctgacgtctcggatgccgaggatgaagaagccggtgaaacgtgctccgaccgcgaagcagatgccaaggatgttgattcgaaggccaaagcggaggagtccgacggcgaggatgaggagggagccaccgccgagaccgacggcgaggatgaggagggagccaccgccgagaccgacggcgagagtgaagaggaagccgctgagacgggcggcgagaacgaagaagatggtggggactccgacaccgaaggtgatgctgaggaatcccctccaccccctccttcccgcagccgccgccgtaagcgagcggccactcccgatgatgaagcagaggagacccctacaccgtcgcgtcgccggcgccgtcggaagtcgaggcagcgtggtgactctccgccgccacttccggaccacctccgttgccgtcgtagcgacgggaagaagtggcgctgctcgggccgtgcactcccaactgttagcttctgcgaataccactacgcgagggccaacaagggcaagaagctaccagcggatggagagctccttgctgtcgctcttcagaggcagaagaacaagaggaagggcaggaggagaatcaatccgtcgacgtcccctcaggcagccacgagtgaccgccagaccagggatctcccaaacggactgatgacgatcttgccaggtagcagtggacctgcagcactgtcaactcctgttactacaaaagttggtgtagaaatttctgcaccgatgcagcggtgctatcgatccaagaatgctgagccattgcctgttggtcctgtgaaggttgttcctcgtgctatgagtatgacgaaagcagcaccaagaatgtgtcactgctgcggggtaaagaaggcagcgcgtgttgccaattgcaagaactgtgatacgaatttctgtaacagctgcattaataaatggtattctaagttgtccaggaaggatataaaggctcgttgtccagcttgccgtggtctctgcaattgtaaactgtgcagccttggtcataccaagggtgctactcataaggaaccgccaagtggtgaaaggaagatactcagcataaaaatttccaaccatcaattttacaagcttttacctgtaaaacttgaccgggagcaacttgacgagttggaattagaagctaaaatacaaggaacaaaaacatctaatgtccgtgtccaggttgctgaaaatggtcagagtgagtcactctactggtaagctcaaatctcttatgttactaccagctactatgtcgccatcagctacatataggctagtaacagtttaataggttttctcccttggctttgtgttattttgtacagagtaaagtgtaacctgggtccttgaactttaggttctatttttaaatggttcactctagagcaaccaatttaaatgtataaggacccagatcctcactgagactggacctagatgagaacctgagaaaaaaattaaggactgtgagtgcattttactcttatttgtggtgagcatgaaataaatcaatcttgtaattgcacggacagttagatatttctttggtcaggcaaatgttgtcttgtcgcaactcgccagcttagtattattatgttccgatttt

SEQ ID NO: 141787 - DNA, 2421 bp, Zea Mays
agtcagagagcgggccccatgcacgcagccctctttacccccatccgcagcccgcgcttgtgtccttctccgcgagccagtacacgcaccacttccccccttcgatctagccatcccaactccgccgactcgctggaaccctagccagccgccgccatgccgccgcgccgcggtagaaggaaggggaagggcagggcaaagccaagagcgaaggccaccgagcccgagcctgagctagaggaagccgccgattccgagatcgaggcgggggacgcgaaggcggaggagtccggcgaagcgaaagaagatgaatcggcaagcgacgccgagtccatggatgcagatgccaacgaggaagccgtcgagaacggagcggatgagatggatgcggagcctgaagccaaagccgagccggaagcggtagccaccgaggcggaagcgaaacctgacgtctcggatgccgaggatgaagaagccggtgaaacgtgctccgaccgcgaagcagatgccaaggatgttgattcgaaggccaaagcggaggagtccgacggcgaggatgaggagggagccaccgccgagaccgacggcgaggatgaggagggagccaccgccgagaccgacggcgagagtgaagaggaagccgctgagacgggcggcgagaacgaagaagatggtggggactccgacaccgaaggtgatgctgaggaatcccctccaccccctccttcccgcagccgccgccgtaagcgagcggccactcccgatgatgaagcagaggagacccctacaccgtcgcgtcgccggcgccgtcggaagtcgaggcagcgtggtgactctccgccgccacttccggaccacctccgttgccgtcgtagcgacgggaagaagtggcgctgctcgggccgtgcactcccaactgttagcttctgcgaataccactacgcgagggccaacaagggcaagaagctaccagcggatggagagctccttgctgtcgctcttcagaggcagaagaacaagaggaagggcaggaggagaatcaatccgtcgacgtcccctcaggcagccacgagtgaccgccagaccagggatctcccaaacggactgatgacgatcttgccaggtagcagtggacctgcagcactgtcaactcctgttactacaaaagttggtgtagaaatttctgcaccgatgcagcggtgctatcgatccaagaatgctgagccattgcctgttggtcctgtgaaggttgttcctcgtgctatgagtatgacgaaagcagcaccaagaatgtgtcactgctgcggggtaaagaaggcagcgcgtgttgccaattgcaagaactgtgatacgaatttctgtaacagctgcattaataaatggtattctaagttgtccaggaaggatataaaggctcgttgtccagcttgccgtggtctctgcaattgtaaactgtgcagccttggtcataccaagggtgctactcataaggaaccgccaagtggtgaaaggaagatactcagcataaaaatttccaaccatcaattttacaagcttttacctgtaaaacttgaccgggagcaacttgacgagttggaattagaagctaaaatacaaggaacaaaaacatctaatgtccgtgtccaggttgctgaaaatggtcagagtgagtcactctactgtaataactgtaagctctctgtgagtcaattcttgagatgctgcccaacatgcccgtttaagctgtgcctaagttgctgtcagaagatacgtcaaggaaacatgtcgaacagcaaccctgaagataagttcaagaaccggttgcttcaacaagagtctgtccatgaggatggcagcattacttgcccttcgattgagctgggtggctgcggtgacgccatgctgaacctgatatatgcatctccatcgagccagtctgaagagctcagttcagaatgtgagctggatgctgcaggcaatcattctggagtgaaggatgctgaagttcacggatcacctgtacctgagagtaatggaagattagcagcagcttcccaggcagaaacaatgtccacatagtctcagaagatgcaattcttgttggctcatctttcaggtgggagcgcaagcgtttatattacattgaagcctgaagatagtgtatgatatggtcaaaaatcggtagagggtaggttgcctgattaggttgcttgatttaggaggttgccagcctatatggccattgattttaggcctgtgacctggggataatcccaattgttgtattgttcatctttgaccagggagcgaacatcgttgtacatatggttatggctttatttttgtcattaccgaggggcgagagctgatgaatggttgtactgtcgttcgttcaagggattacctggctattttgtggta

SEQ ID NO: 141788 - DNA, 1848 bp, Zea Mays
atgtgcgggagccttatggtcatctgcctcctctaaaatatctgtcttgcaaacgaaaatagatggacggcagtccgtaggccactccacctccacgatacaccacggcaccactcaacctgtcaggtagacttctctctcccgcggaagctcttacctccggctccgcaagcaagacttcatggagaagacggtcgttctgtaccccggcctatccgtcagccatttcgtcccgatgatgcagctcgccgacatgttcctagaggagggttacgctgttgcggtcgcgctcatcgacctcaccttggaccaagacgccgccttggcagacgccgtcgaccgcgtcgcctccgccaagccgtccgtcgccttccacaggctccttcggatccagaatcctcccactgtcacagacgacggggagccgttcctctggtacttccagatactgaaacgctacaacgaccgcctccgtgagttcctctgctccctgcctccccgaagcgtccacgcggtgatcgtggacgcgctttccgtcgacgcgctcgacgtcaccaaggagcttgggctcccggcctacaccttctgcgccgccaacgcctccgcgctcgccgtgttcctccagcttccttggatccgcgcggaaggccaaccaagcttcaaggagctcggagacgcccccgtcaacttctccggcgtgcctcccattccggcgtcacacctcgtgcgccagatgctggacccggagagcgagatatacaccgcgatgatgaacgcgatgcgaaggggagcggaggaccccgacggcatcttggtgaacacgttcgcgtcgctggaagctcgggcggtgggagctctccgggacccacagctggttcctcctagcagcggcagagcacgcaggacgcctccggtgtactgcgtcgggccactggtcgccggtgccggcgcagaggcaaaagagaagcacgaatgcctggcgtggctcgacgggcaaccagagcgcagcgtggtgttgctctgcttcgggagcataggcgcggccacccactcggaagagcagctcagggaggttgccgtcggcctgcagagatccggccaccgtttcctgtgggtggtgcgagccccgctgcgcggtgacaccgagaggctgttcgatccccgtgcggacaccgacctcgacgcccttctgccggacgggttcctcgaggccacaagagaccgcggcctggtcgtcaagcactgggcgccgcaggtggaagtgctcaaccatagggcgacaggcgcgttcgtgacgcactgtgggtggaactcggtgctggaaggtatcacggctggcgtgccgatgctttgctggccgatgtacgcggagcagaaaatgaacaagctgttcatggtggaggaagccatggtcggcgtggaaatggttggatggcagcaggggctggtcagtgctgaggaggtggaggccaaggtaaggttggtgttggaggagtccgaggaaggcaaccagctcaggacgcgggtggccgcgcataggaatgccgcgaccatggcccggaggggcggcggctcatcgcgcgctgcgtttggccagttcttgtcggacgccgccaaactcgcacgggagtagacgcgtacgcgctggatgcattgccgattgctgaatttcaccatcatcggttgtgattcgatgttgagaattgagatgaaactgcgatgcttgcatgtactctgtggtaacttttatttctatatctgtgagtgctcggcgttgcaacaggaccactatattacaacctttaatatcatacagacttctatatatgatagtacaatacttgcata

SEQ ID NO: 141789 - DNA, 787 bp, Zea Mays
tgctccgccgcgcgctccgagctcaatcccccgcgcgcgaagccccgagctcaatccgcccgccgacctcgacccgaaagactacctggagatcccctgggctgagctgcgctccatggtcgaaccgtcctttgctgagagatcgttgatctaccacaaagattacctcagcgatgcgaccatcgtgacatcttctgcggtcaatatcactgaacacgctgtcctgactactgacggccactctcttccatatgattatctcatcatagcgactggccatgctttggcttctcctgccagcagagctgaaaggataaatgaattccagagagataatgggaagatagagtcttcagaatctgtgctgataattgggggtggtccaactggtgttgaactagctggagagattgtggtagactacccggggaagaggtgacccttatccatagaggaccgcgtttactcgaattcattggagataaggcttcaaagaagtgccttgattggcttacttcgaagaaagtagacgtgctccttcagcaatcggttgacttgggctcattatcagacactgagaaggtgtacaagacatcaggcggagaaacagtatagctgattgccactttgtatgcattggaaagccactgagttcgtcgtggctacatgataccattctaaaggaatccttggacagcaaggggagagtaatggtggaaaaggatttaagagtgaaaggttttaataacattttcgcgattggtgacatcacagatattcctgtaag

SEQ ID NO: 141790 - DNA, 687 bp, Zea Mays
cgcgaccgccgcatactccgctgcgcgctccgagctcaattccccgcgcgcccagccccgagctcaatcccccgcgcgcggccccgagacttaatattcgttcacccgtcgattccgcctccgatcccctccctccttccgttgcggagactcccgcttctgcggcggaggccaagcaggagtcggtgttggagacggaggaaactaagcaggcggtggcagcagcagcagcagcggcaggaggtgtgcaggccatggcggtcaccgtagtgcgggacgtcgagacgggtctggacacgagtaccagcgaccaggacggcgacaagccttcctggttcacacctaagaggtaatccccccaacccgtagcagagctcgattgagtaccatcgtcgtaggctcggctgtggtaggctttatctgtttccgttacatctggtttgaggagctctgagggcggtgttgaccttgggtttgggcgatttgcatgcttgtttgttctaaggatttttttgcttctcttgagctccaattggtcgtactgggactcgattttgctaggtctgagaaattgggttatccgggttatccggagctccagttcgacgttgtgatgtagctcatttgagctgttgggttgcttggcagctgctcgggattaacttgagcttctggcgatgctcaagt

SEQ ID NO: 141791 - DNA, 1019 bp, Zea Mays
cgcgaccgccgcatactccgctgcgcgctccgagctcaattccccgcgcgcccagccccgagctcaatcccccgcgcgcggccccgagacttaatattcgttcacccgtcgattccgcctccgatcccctccctccttccgttgcggagactcccgcttctgcggcggaggccaagcaggagtcggtgttggagacggaggaaactaagcaggcggtggcagcagcagcagcagcggcaggaggtgtgcaggccatggcggtcaccgtagtgcgggacgtcgagacgggtctggacacgagtaccagcgaccaggacggcgacaagccttcctggttcacacctaagaggcagaacatgggccggaggtatgttgaggtgttcagatgtaagaagttggagtactaccgtgcaatagccaacgaggtgagccagggtggttactttgagtcagagtatcgccgctcctcacctcctctgagcccccctaagaagcctgctgaagacaagggcagcatggagtacactgaggtgttgaagctccgtgggcttccctactctgcgaccactgaggacatcatcaagttcttcctggagtatgagctgacagaggagaatgtgcatattgcgattagctcagatgggaaagctaccggtgaagcctttgttgagttcccaacaactgaagttgccaagacggtgatgtgcaaggataagatgactatcgggacgaggtatgtggagctgttcccgtctaccccagaggaggtgagcagggcgagaacccgaggcaggcattgaagaaacgaatggcttggctgaatgatctctggttgcatgtggctgcaatcgactgtagttttcacttggcatgcttatctgtatcgcttttagattgtgttagttgtgtgtatttgacttcttatatgcgaactgaactgtaacaactttcctttgttggccggccgcacatgtacggcataatcatttatggattttgctacgtttgagttcattcaa

SEQ ID NO: 141792 - DNA, 1393 bp, Zea Mays
cgcgaccgccgcatactccgctgcgcgctccgagctcaattccccgcgcgcccagccccgagctcaatcccccgcgcgcggccccgagacttaatattcgttcacccgtcgattccgcctccgatcccctccctccttccgttgcggagactcccgcttctgcggcggaggccaagcaggagtcggtgttggagacggaggaaactaagcaggcggtggcagcagcagcagcagcggcaggaggtgtgcaggccatggcggtcaccgtagtgcgggacgtcgagacgggtctggacacgagtaccagcgaccaggacggcgacaagccttcctggttcacacctaagagtctttagtacgaattcttctaggatttttgaaccaggcccgccctattttggggccatgggcagcaacactggtggtgccagtggtggcttctaccagcccttcaacagcaacttagctggtgcaggggctagcactggcatccaaaactttccaggtgtacggctgcgaggtctcccttttgattgcaatgacattgatatctgcaagttctttgtgggactggacatagtggactgcctcctggttaacaagaatggtcgcttcactggtgaggcttttgtggtcttcccaacagctatgcaaacagaatttgctctgcatcgtaacaggcagaacatgggccggaggtatgttgaggtgttcagatgtaagaagttggagtactaccgtgcaatagccaacgaggtgagccagggtggttactttgagtcagagtatcgccgctcctcacctcctctgagcccccctaagaagcctgctgaagacaagggcagcatggagtacactgaggtgttgaagctccgtgggcttccctactctgcgaccactgaggacatcatcaagttcttcctggagtatgagctgacagaggagaatgtgcatattgcgattagctcagatgggaaagctaccggtgaagcctttgttgagttcccaacaactgaagttgccaagacggtgatgtgcaaggataagatgactatcgggacgaggtatgtggagctgttcccgtctaccccagaggaggtgagcagggcgagaacccgaggcaggcattgaagaaacgaatggcttggctgaatgatctctggttgcatgtggctgcaatcgactgtagttttcacttggcatgcttatctgtatcgcttttagattgtgttagttgtgtgtatttgacttcttatatgcgaactgaactgtaacaactttcctttgttggccggccgcacatgtacggcataatcatttatggattttgctacgtttgagttcattcaagtggtgtttctttcgctgatgttggggatgcgatggaattttc

SEQ ID NO: 141793 - DNA, 1371 bp, Zea Mays
cgcgaccgccgcatactccgctgcgcgctccgagctcaattccccgcgcgcccagccccgagctcaatcccccgcgcgcggccccgagacttaatattcgttcacccgtcgattccgcctccgatcccctccctccttccgttgcggagactcccgcttctgcggcggaggccaagcaggagtcggtgttggagacggaggaaactaagcaggcggtggcagcagcagcagcagcggcaggaggtgtgcaggccatggcggtcaccgtagtgcgggacgtcgagacgggtctggacacgagtaccagcgaccaggacggcgacaagccttcctggttcacacctaagaggatttttgaaccaggcccgccctattttggggccatgggcagcaacactggtggtgccagtggtggcttctaccagcccttcaacagcaacttagctggtgcaggggctagcactggcatccaaaactttccaggtgtacggctgcgaggtctcccttttgattgcaatgacattgatatctgcaagttctttgtgggactggacatagtggactgcctcctggttaacaagaatggtcgcttcactggtgaggcttttgtggtcttcccaacagctatgcaaacagaatttgctctgcatcgtaacaggcagaacatgggccggaggtatgttgaggtgttcagatgtaagaagttggagtactaccgtgcaatagccaacgaggtgagccagggtggttactttgagtcagagtatcgccgctcctcacctcctctgagcccccctaagaagcctgctgaagacaagggcagcatggagtacactgaggtgttgaagctccgtgggcttccctactctgcgaccactgaggacatcatcaagttcttcctggagtatgagctgacagaggagaatgtgcatattgcgattagctcagatgggaaagctaccggtgaagcctttgttgagttcccaacaactgaagttgccaagacggtgatgtgcaaggataagatgactatcgggacgaggtatgtggagctgttcccgtctaccccagaggaggtgagcagggcgagaacccgaggcaggcattgaagaaacgaatggcttggctgaatgatctctggttgcatgtggctgcaatcgactgtagttttcacttggcatgcttatctgtatcgcttttagattgtgttagttgtgtgtatttgacttcttatatgcgaactgaactgtaacaactttcctttgttggccggccgcacatgtacggcataatcatttatggattttgctacgtttgagttcattcaagtggtgtttctttcgctgatgttggggatgcgatggaattttc

SEQ ID NO: 141794 - DNA, 621 bp, Zea Mays
cctccctccgccgccgcacgtatcgtccccctcgccctgggcctccctgaagacattgaagaccttcacgcggtcctgcttcctagcgccttagcccgtgctcggctcccgccatcgccgcctctcctttcccctctcctagggttccatagcaatgcacaacacttgtctcacgcgaagaatccgcatttgccctcccccgcaccacacccccgccggagagagagatgacggcgtccgcgaggcccggggagagggcaaccaacttcgccgtcgcgtgcagcctcttcagtcgcttcgtccgccagaacggcgccgcgcccgcccagctaggcctcgggatcaaaggcgaggtcgagcagcaaaggacgccggcgacaattaacttgctccccggagtggacggcgaggagaccgagaggaggaaggagaccatggagcttttcccgcagagcgccgggttcggtgtcaaggatcccgctgctgcccctaggtgcgtactgctgcttcacatcatgtaaatcccatttcggttttggtttgtgcaacacttcctatgccactgtctcccactttggccctggttccccaagcaagcaagatgccatggcgaccgccaag

SEQ ID NO: 141795 - DNA, 242 bp, Zea Mays
agtggtccaggagtgcaactcaccaccaatcaatccataaaccaaatcatctcaaaagaatcaaatgttttccaccgaaaacacaagggggagaagggaagaacacgtgaccaaacaactccaaatttcagcaattatgtaaaactgagatggagatataaacaaacgttgtggaccataccagtgatccttcctcagattaaactttcagatcacaagatcacagtcgacagtacaaaatc

SEQ ID NO: 141796 - DNA, 879 bp, Zea Mays
atggcgggcttaagaggaccctccgaacgtgtcgaagatggtagtgtggagcgggtcgctcaggtgggtggcccagttgttgagcggccccttgccggtggcggcggcctgcacggcgaagccgaggaaggcgaccatggcgaggcgcgcgtgcttgatctccgccagctgcagccgctccttcttctcagggtcggccgccaggccgagcgggtcgaagtaggagccgccggggtacagcctcttctccgggtcgagctcggcgttgcgctggaactcgatgtagccgatcacgagcacctcgatccagatgagcgtcgagatggagaacggcagcggctggcccaggtaggaggacccgtccaccagctccaccttgccggcgtcctgccaggtgacgccggtgagccactcgacggagagggcgccgagggtggcgagcatggcccagcggccgtggatgagctcgcactcgcggaaccgctggaggccgaacacctcgctgtagggctgcaacggggtggacttgacttcggaggactcgaaccgggtgccgatgatgccgccggcctcattcttggccaggttctggtccagcgagtccaactcgaactgcaggtactccacgggcttcccgagaccgaacgggtcgaacccgtagtcgccgaccagcgagccgtccaggtagtcgggcgccacggcgccggggaaccacagcggccggtcagaggaggtcgatgtcttcgccaccttcttcggagcaggcttcgccttgccgcccaacccgaacccgaaccgggccacgatgcgcccgttctgtggcgccgggtccgccaggcgggtgcccaggaatgtgctcgccgcggcggccaccgatga

SEQ ID NO: 141797 - DNA, 116 bp, Zea Mays
ttctctaggctgttgcttgcttatttttccatgcttattactttgtttagtatcctcgtactatatttccttagtcctgtgcccctgtttctgagtggtgatatataatgtttgac

SEQ ID NO: 141798 - DNA, 1014 bp, Zea Mays
ctgactgcctgcttcttccctgggattgtgttcatcatcctcactgtgcttaactccattctgtggggcaagaagagcactggagctctacccatctcactgttcttcaccctcctggccctgtggttctgcatctctgtgccactcacacttattggaggcttgctaggcacacgtgctgcaagcatcgactaccctgttccgaaccaaccagatcccacgagagattcctgagcgcaagttcccctcatggttgcttgtgctcggtgcgggaacattgccatttggtactctcttcattgagctctttcttcatcctttccagcatttggttgggaaggttctactacgtctttggcttcctgttcattgtcctcttcctgctggtcatagtctgtggtgaggtttctctggtcctgacctacatgcacctttgcgtggaggactggaaatggtggtggaaggccttctttgcttcttgctctgtcgcattctatgtgttcctctactctattaactacctggtgttcgatctcaggagcctgagcggaccagtttctgccacactctaccttggctattccctgatcatggcccttgcaatcttgctctccactggcgccattggtttcctgctctccttctacttcgtgcactacctcttctcgtttgtgaagattgattagaggtgtgccccgctgcctctttctgcaatagagtcatctgatcatggtaatagttaccctcctagaaatactacacaataaatcaaatggaaaaaatggatacatggcaacgcccatggcttttggtcatgattaattcaatcatttagctcagcacagtcactcaagttgaaacttaattcttaggaatgattgtaagttcttcagctatgtttattgcactttgtaataccattcagttttgcttgctctgggcatttgtgagcagcctttggttttggaacacttgagatctattcaatatgaaaatgaagctattcatttacag

SEQ ID NO: 141799 - DNA, 228 bp, Zea Mays
ttaatatacttcttgcgttatcctatgcagcacagtgttggaagtagagatggcaatttgtccaaagcagaaatctccataaaccctagaacaagcaaacacattgaagtgcacagagagagtagaaggcaaagtgcgcacctgcactccaaaaaccagggcaccagcaaaaacgccagagagagtctcgatgccaaagaggttccatcaatgagggagtcagcatga

SEQ ID NO: 141800 - DNA, 826 bp, Zea Mays
cgcacggcacctcaacacacgtatataatcaagcttctgctcggctcactctacatgcgcactgacgttcttgagagtccaggcagagtcgtagtttcttcggaacgcagggaaaaaaaagaggatgaggtttgcggtggcgaacaaggcgtacattgcggtgacgctgggcgccgccatcgagctcaaggagcaggtggccaagccttgctcctcggccgcgaagcggggcgcgttgcggttgtcggcggccggcaagatcggcggcggcggcggcgccgaggagtcgctaaggatgatcatgttcctcagctgctggggaccgagctaagctctgaagccgcggcagaggtggctagtgccgcagggcaggtctacaactgactgtgccttggaggttgctaagtggccgacaacacctgctactgttctcggcttctcactgagctccgagactcctctacggaacctcgtgttcatggattggatggatgctcgtctgaagctacaaaagctaaaatctgacatgtaaatttgttcgaaagataaacaaacggctacgtacgtatgtgcgcttctttcagttgctgtttggctgtcctggctgatcctcatattgagccttgacagcacggtagactacgagacaagctcgtctaggattgaattgaatcgcttgttcatctctggtttctcgctgggcacggtggtacagtacgagtagctagcaaaggatcaaagcaggaagcaaccccgtacggtatatgaacagaattgcagaaacttatgcgtatgacctagtcaagtctcaacatgaggatcagag

SEQ ID NO: 141801 - DNA, 731 bp, Zea Mays
acatgcgcactgacgttcttgagagtccaggcagagtcgtagtttcttcggaacgcagggaaaaaaaagaggatgaggtttgcggtggcgaacaaggcgtacattgcggtgacgctgggcgccgccatcgagctcaaggagcaggtggccaagccttgctcctcggccgcgaagcggggcgcgttgcggttgtcggcggccggcaagatcggcggcggcggcggcgccgaggagtcgctaaggatgatcatgttcctcagctgctggggaccgagctaagctctgaagccgcggcagaggtggctagtgccgcagggcaggtctacaactgactgtgccttggaggttgctaagtggccgacaacacctgctactgttctcggcttctcactgagctccgagactcctctacggaacctcgtgttcatggattggatggatgctcgtctgaagctacaaaagctaaaatctgacatgtaaatttgttcgaaagataaacaaacggctacgtacgtatgtgcgcttctttcagttgctgtttggctgtcctggctgatcctcatattgagccttgacagcacggtagactacgagacaagctcgtctaggattgaattgaatcgcttgttcatctctggtttctcgctgggcacggtggtacagtacgagtagctagcaaaggatcaaagcaggaagcaaccccgtacggtatatgaacagaattgcagaaa

SEQ ID NO: 141802 - DNA, 632 bp, Zea Mays
acacctcccagctccagcagcgtagctcagagaagggacgaggaagtaaaataggcagagcagcagaggtcgagttttgtgaccggatggcgcacatgagccgggtgtgggcggcggccacggtggccgccgtgcgtgcgcagcgcgagagggcgccttccgccgcggcgggggcgcgggaccggctggccgggctggccccgcaggcggccgcgctggccggggcgcgggcggcctgcgccgacgggcgcaggcaggccggcgccgacgagtcgctccgcaaggccatgtacctcagctgctgtggacccagctgagctgtacggcgttggtgagtgaccgaccgaccgtcggcgggtgactggactgtatgtaattcgtacgtacattagttctaggctctttgtgtagatattcgatggaatggaactacgaactacccgctcactgctaataatcattgggttcaaaaaataataataacaagcggttccatcgtttggaaacttagaatggtaccatcggttcacactcaatgttttactttctcagctcgttccgaaatcactgaaattcgatgtacttttttttctccgttttcggtactaataaccgagcgaagagcgggttct

SEQ ID NO: 141803 - DNA, 189 bp, Zea Mays
gggcggttcggcgattctccgagcttaaagctctgaacagcaaagcaggttctattctgcggcacgccgggtcgcggatacggtcgcccgccggacacggagcacgcgcgattaccacgggattcacgagcacacctgcagagtatcagatgaacaccagcgtcggtgtctcggcgctgataccggtct

SEQ ID NO: 141804 - DNA, 2236 bp, Zea Mays
gcagcttacgagcatccaatagcagtagcagagacaaagcgcacacacacacacaatcgtgccaatggccgacacggccgacgccccgctcctgacaagccacgggcaggccaagcagctggccaaggcgccgtccatcgacgacaccatcgagacgtacatcggcgcgaccggttccatgcagctgctcaaggccgtcctgctggcattcgcgtgggccttcgacgcgcagcaggtgttcatctccgtgttcacggacgcggagccgcagtggcactgcacgggcgcctcggcgtcctgcaagccggccgcacccccggcctcgccgtgcgcgctcccctccggcgcgtgggcgtgggaccggccggcccacacgacggtggtctccgagtgggcgctcaagtgcgccggcccggcgccggcgctcgtctcgctcccggcgtcgtccttcttcgccggctgcctggcgggcgggttcctgctcaccacgctcgcggactcgctcctcgggcgcaggaagatgctgctcacgtccctggtgtccatgtccgtcgccggcgtgctcaccgcgttcgcgcccaacgtgtgggcgtacgccgcgctgcggttcgtgtgcgggttcggccggtccatggtgggcacgtgcacgctggtcctgtccacggagctcgtcgggaagaggtggcgcgagacggtgagcatggccggcttcatcttcttcaccgtcggcttcctgtccctcccggcgctcggctacacgttacgcgaggcgtcgtggcggagcatgtacctctggacgtccgtgccttcgctctgctactccgtcctgctctacttcctcgcccaggagtcgccgcggtggctgctggtgcgcggcaggaagcaggacgccatggagacgctgcggcagatcgcctcgctcaatggcaacagcatcacgtccagcttctccatgctgcacgcgtgcaacatgcaggaggacgacggggccgccggcggagccgccggcgtgttctccacgatgcgggcgatgtgggagcggccgtgggcgctgcggaggctggcggcgatcatgaccgccagcttcggcgtcggcatggtctactacggcatgccgctcaacgtcggcagcctgggaaccaacctgtacctgagcgtcacgtacaacgctttagccgagctgccgtcggccatcctgtcgttgatcttcatcggcagggtcaaccggcggagctctgtcgtcgcgcttactgtggcggcaggtgccttcagtctcgcgtgcgtcgtcatcccagagggctcggcggcgcgaatggcggccgagttgctctccttcttctcgaccatcacggcgttcaacctcatcctgatctactccatcgagctgttcccgacgtccgtgcgcaactctgcggtggggctggtgcggcaggcgctggtgctgggcggcgtggtggcacctgtgctcgtcgcgctcggccgcgaacggagcttctggtccttcggcgtgttcgggctctgcatcggatgtttggggctctttgccgcctgcctccccgagacgagggggcggagcatgtcggacaccatggaggaggaggagcacaaggaggccgccgccgcggcttgcaccggcgcaaccgacattgccacgaaggatgataccgacctgctcgtgtagcggtgagatgctggttcggcggcgctgctagatatgcctaggctaggcgctgtacaggtacagctagcaggtcaatcacgaagctgtcagcctccatctatccggtcttgtaccgctgccgccaagttgatgcatataattcagaaccagctgtggagtccgactgtccgagtgtctgcatatagttcaaagtctagggccacattcactgaagcagatctcgatgcatatcggcgaacattaactgctgaagtgctgaagcacatgtacattgacgaagcaatacgccaatacggaagtgtcgttggcggcaaaaaaacaaaaaaacagacagtacaaaacatgacttaatttttacatactccctccgattttctattagttatcgtttagcacaacgatacggtctccaaaatataactcaaaatataactttgaccaatgtttttttgttaaaatacaaatgaactcttaatacatttatacttttataaaagtacgttttatgacaaattattgcatataaatattaggttccaaaactaaataacaaaa

SEQ ID NO: 141805 - DNA, 1884 bp, Zea Mays
cgatcgcgtagaggaaatcgaagtctgtcgcataggacagttcggctaggccggagacctgccggcttgacggagagttgatgcagatctgatctcgcagcaacgttgtggtagagcgtgctgataacgtgttgagaacaacgttaccacggatcactagatctgctcccttcccttccgtcagcagtagagacgcgagaagatgtagagaacccgtctcccttcctagaagcacgacagagaaacacacaagacacaggatatatagggttgggcctttggcctctttctcttcactgtattatgagggggtgtacaggttccttatatagagatgtgagacccctcagggataaagtaggtatttgcccacataaccctaactagggttacttaacacaaacttgcatggtgccatacatacgtctaaacagggcccactacaggcgctactaggacggcccccaagatctgcgttcagctgaacctccaggcccagagcaattgagcagcccggcccaaaccagtgccacgcaatgctgtaggacccggtagtaaccggtcgacggtcgtccgaggtggcagcgccgcagctccagaatccagtgctgcgccccgattgggcggaaccaaatccagaaatctccacctcacatccgccccctccaatcgccgctcgctccttccccggcaacaaaacacttgtgctacaaatacgtccacgtaacgcctttctccaagcctgagcactccatccactagacactactttactcaaagtctagagctagcttttgctttgctcaccagataaaccgcagcagatggcgtcgacgatcatggccgccacctcccgcatcgtcgcggccaagacgccgtttcttggccagggtcgcgccgccgccaatgccagccccctccgcgacgtcgccgccgccgctgctggcggccggatcaccatgggcaacgacctgtggtacggcccggaccgcgtcaagtacctgggccccttctccgcccagacgccctcgtacctgaccggcgagttccccggcgactacggctgggacaccgccgggctgtccgcggacccggaggcgttcgcgcggaacagggcgctggaggtgatccacgggcggtgggcgatgctgggtgcgctgggctgcatcaccccggaggtgctggagaagtgggtgcgcgtggacttcaaggagcccgtgtggttcaaggccggcgcgcagatcttctcggagggcgggctggactacctgggcaaccccaacctggtgcacgcgcagagcatcctggccgtgctcggcttccaggtcatcctcatgggcctcgtcgagggcttccgcatcaacggcctcgacggcgtcggcgagggcaacaacctctaccccggcggccagtacttcgacccgctgggcctcgccgacgaccccgtcaccttcgccgagctcaaggtcaaggagatcaagaacggccgcctcgccatgttctccatgttcggcttcttcgtccaggccatcgtcaccggcaaggggcccctcgagaacctgctcgaccacctcgacgaccccgtcgccaacaacgcctgggtctacgccaccaagttcgcaccagggtcttaagctagctaccgggccgcggcgtgccaggacattgtgttgtacactactcgtttctgtcgtgatctgtaccatgaacgaatgcaaatattcttgtgctctcccagaaggaacgaactggactagttttgctcttccattccatgtatactctgcttcagcatatatgtagttgtgtctactggtttttgcagttgttaactgatttgcgtccatatatgaggttgtgtctactttttttttacaaacacaa

SEQ ID NO: 141806 - DNA, 1181 bp, Zea Mays
tggcagcgccgcagctccagaatccagtgctgcgccccgattgggcggaaccaaatccagaaatctccacctcacatccgccccctccaatcgccgctcgctccttccccggcaacaaaacacttataaaccgcagcagatggcgtcgacgatcatggccgccacctcccgcatcgtcgcggccaagacgccgtttcttggccagggtcgcgccgccgccaatgccagccccctccgcgacgtcgccgccgccgctgctggcggccggatcaccatgggcaacgacctgtggtacggcccggaccgcgtcaagtacctgggccccttctccgcccagacgccctcgtacctgaccggcgagttccccggcgactacggctgggacaccgccgggctgtccgcggacccggaggcgttcgcgcggaacagggcgctggaggtgatccacgggcggtgggcgatgctgggtgcgctgggctgcatcaccccggaggtgctggagaagtgggtgcgcgtggacttcaaggagcccgtgtggttcaaggccggcgcgcagatcttctcggagggcgggctggactacctgggcaaccccaacctggtgcacgcgcagagcatcctggccgtgctcggcttccaggtcatcctcatgggcctcgtcgagggcttccgcatcaacggcctcgacggcgtcggcgagggcaacaacctctaccccggcggccagtacttcgacccgctgggcctcgccgacgaccccgtcaccttcgccgagctcaaggtcaaggagatcaagaacggccgcctcgccatgttctccatgttcggcttcttcgtccaggccatcgtcaccggcaaggggcccctcgagaacctgctcgaccacctcgacgaccccgtcgccaacaacgcctgggtctacgccaccaagttcgcaccagggtcttaagctagctaccgggccgcggcgtgccaggacattgtgttgtacactactcgtttctgtcgtgatctgtaccatgaacgaatgcaaatattcttgtgctctcccagaaggaacgaactggactagttttgctcttccattccatgtatactctgcttcagcatatatgtagttgtgtctactggtttttgcagttgttaactgatttgcgtccatatatgaggttgtgtctact

SEQ ID NO: 141807 - DNA, 1987 bp, Zea Mays
tccagaactcccgaacctctctgctatcttcgcttttaaccccatcgatgcttcccagtaagctacacgctcacccgcctcgtccttccatggccgatcccaacctccaggccgaggtcctgaccgcgtcagtgcgggtcaacggcaccgaggcggaggcaacgctcaggggcggcgagctgacgtggcgccccgccgacaccggcggcggcggagaggggcaggagcgggggctggagctggagtcggaggtgctcgggtgccgggtggacgggaggaagctcaaactcgcgacctttaccgcgagcggcggcggtgatgggaaagggggaggaggggatgggaatcggaggagagaggaggtcgtggtggagatggagaccgaggatgccgcgctgcgctggggggacatcatcagggattgcctcgcttcgctcggtattcctcctgcaatattgccacaggccggccaaagaaattgttcattatagtgaacccttatggtggaaagagaagtggaaggagtattttccagaatgaagtcctccccctcattgaagcttctggcgtgctttatacgatgcaagaaaccaagcatcggcttcatgctcaagagatcgcacgttcacttgatcttaggaagtatgatggcatcatttgtgtcagtggagatggtgtgatggtagaggttgtcaatggtctcctgcagagggaggactgggaaacagcaataaaagtgccccttgggatcgttccggcaggtactggaaatggaatggcacgatctctattgcatgctgctggtgaaccattctctgtatctaatgctgtgtttgcaatcatcagaggtcataaacgtgcacttgatgttacttctgttgtgcagggaaacacaaggttctttagtgtcctgatgcttacatggggtctggtggctgatgttgatattgaatcggagaagtataggtggatgggaagtgctcgccttgaattttatctcctactccgcatgctgaacctgcgacggtacaatgggcgcatcctttttgttccagcaccaggatatgaagaagttggtgatcccgtggaacaaactaccggtcatgaaacaaatggggttagcgggggcaactgacaaaaatggtgaaacgtgcggctatgtcggcccgtcgatcaaagaagccgatcttagatggagatcgctgaacggtccgttcgtttcagtctggctcggcaatgttcctttcgctagcgaagatgccatggcagcaccaaaagcagagtttgcggatggctacttggatgctgctataatcaaggactgcccgcggtgggatgttctggggctcgtgctccagatgaaggacggcgcctacgtgaactcgccgtgcgtggagtatttcaaggtgaaggcgatccggatcgagccgggcctgcgcgtgggcagcagcaccaagggcggtatcatcgactcggacggggaggtgctcgcgaggggcgacgggtcccactcccgcgccggcgacgagccggggcacctgatggcgtacggcccgcccatccagctgacggtggaccaggggctggccaccatcttctccccgagatgacgattcttctatctgttctccaccgcctgcgaggactttgcttcgttagccctgccattttctcgagtagaaccatgtgactctatatgtaaatattagtcacacggtcacaccccactccagtggatgagcgatgagccaaaacacaagagggacagatcctttatctccgtcaagagattgttttcttttcacggccacagcccacatggccgccgcttttagtgttagcgtgagaaaatgacaagtgggctgtgggcagctcctattctttttttcaccttgtgtgtgttgttgattgtcccttgacaaacagtggactgttttcctgcaaaattggtgtttaattaacctgaaaagcttccacttgcatctaa

SEQ ID NO: 141808 - DNA, 1961 bp, Zea Mays
tccagaactcccgaacctctctgctatcttcgcttttaaccccatcgatgcttcccagtaagctacacgctcacccgcctcgtccttccatggccgatcccaacctccaggccgaggtcctgaccgcgtcagtgcgggtcaacggcaccgaggcggaggcaacgctcaggggcggcgagctgacgtggcgccccgccgacaccggcggcggcggagaggggcaggagcgggggctggagctggagtcggaggtgctcgggtgccgggtggacgggaggaagctcaaactcgcgacctttaccgcgagcggcggcggtgatgggaaagggggaggaggggatgggaatcggaggagagaggaggtcgtggtggagatggagaccgaggatgccgcgctgcgctggggggacatcatcagggattgcctcgcttcgctcggccggccaaagaaattgttcattatagtgaacccttatggtggaaagagaagtggaaggagtattttccagaatgaagtcctccccctcattgaagcttctggcgtgctttatacgatgcaagaaaccaagcatcggcttcatgctcaagagatcgcacgttcacttgatcttaggaagtatgatggcatcatttgtgtcagtggagatggtgtgatggtagaggttgtcaatggtctcctgcagagggaggactgggaaacagcaataaaagtgccccttgggatcgttccggcaggtactggaaatggaatggcacgatctctattgcatgctgctggtgaaccattctctgtatctaatgctgtgtttgcaatcatcagaggtcataaacgtgcacttgatgttacttctgttgtgcagggaaacacaaggttctttagtgtcctgatgcttacatggggtctggtggctgatgttgatattgaatcggagaagtataggtggatgggaagtgctcgccttgaattttatctcctactccgcatgctgaacctgcgacggtacaatgggcgcatcctttttgttccagcaccaggatatgaagaagttggtgatcccgtggaacaaactaccggtcatgaaacaaatggggttagcgggggcaactgacaaaaatggtgaaacgtgcggctatgtcggcccgtcgatcaaagaagccgatcttagatggagatcgctgaacggtccgttcgtttcagtctggctcggcaatgttcctttcgctagcgaagatgccatggcagcaccaaaagcagagtttgcggatggctacttggatgctgctataatcaaggactgcccgcggtgggatgttctggggctcgtgctccagatgaaggacggcgcctacgtgaactcgccgtgcgtggagtatttcaaggtgaaggcgatccggatcgagccgggcctgcgcgtgggcagcagcaccaagggcggtatcatcgactcggacggggaggtgctcgcgaggggcgacgggtcccactcccgcgccggcgacgagccggggcacctgatggcgtacggcccgcccatccagctgacggtggaccaggggctggccaccatcttctccccgagatgacgattcttctatctgttctccaccgcctgcgaggactttgcttcgttagccctgccattttctcgagtagaaccatgtgactctatatgtaaatattagtcacacggtcacaccccactccagtggatgagcgatgagccaaaacacaagagggacagatcctttatctccgtcaagagattgttttcttttcacggccacagcccacatggccgccgcttttagtgttagcgtgagaaaatgacaagtgggctgtgggcagctcctattctttttttcaccttgtgtgtgttgttgattgtcccttgacaaacagtggactgttttcctgcaaaattggtgtttaattaacctgaaaagcttccacttgcatctaa

SEQ ID NO: 141809 - DNA, 2657 bp, Zea Mays
ggtagttgcgtggcgcacttgagtagttggttgactggattcatagctgggagagctaaaaaattctgctcctgatagtaaggggggaaatcaaagcaaaaccagaagagaatatctaggttgattcgattcaacaataatagtttgaagcaattggttctagattgcaacggtcatagtcataggcgtgcacagatctttcttaatgcgtgaaatcgtgcggttgaatagctgttcttctgggcataccctgggtcaaagcgtcaaccgtcaaatgtacaaatgctagtagtatgctaggtgccaagagtcctacagagtttgaaattctccatggattctttcttcagtatctggtctactcaaatttccacggttggcttcagatgggcatgttgctgatggtgtgcatcccacaaagtttgcattccaattattataaccctgagcaaatcggaatcgtgtacgtctgtctaaatggtgcctgttcatttggtgcaacgcagcagtgatactttgcagtagtagtaatgttatgcatattctgtaggaacaattggatctataccattaaaagatccaaactttagatatataccatggacctcacatgtcattgactcatgtggacccacatgtaagtgagatagtaatggtatggatccaaagtggtgatcttttaatggtatggatccaaatttccctcttctatacaacttccttttaaaatcacccttgagtgttgcattagctatcatacttgtaggatgcaagtgtgtactcaacggtgttttgtgtgtcacctatcttggttcatttctccccttaaattaattatgtggcatgccattctagttcattttatcaagttctgggttgatccaatgacttagaacatgggatgcttgcatccctagctatcaacgcaaaatatcggagctggccttttttgctcagttattcatcatcgatagtgctgatctagtgctcataattctgttccatttctagttggtactagctcatgcttctctaactccttcagaaaagcatagtagattaacaactgaatttggaacaccagttttacctactcatggccccttaggtattcctcctgcaatattgccacaggccggccaaagaaattgttcattatagtgaacccttatggtggaaagagaagtggaaggagtattttccagaatgaagtcctccccctcattgaagcttctggcgtgctttatacgatgcaagaaaccaagcatcggcttcatgctcaagagatcgcacgttcacttgatcttaggaagtatgatggcatcatttgtgtcagtggagatggtgtgatggtagaggttgtcaatggtctcctgcagagggaggactgggaaacagcaataaaagtgccccttgggatcgttccggcaggtactggaaatggaatggcacgatctctattgcatgctgctggtgaaccattctctgtatctaatgctgtgtttgcaatcatcagaggtcataaacgtgcacttgatgttacttctgttgtgcagggaaacacaaggttctttagtgtcctgatgcttacatggggtctggtggctgatgttgatattgaatcggagaagtataggtggatgggaagtgctcgccttgaattttatctcctactccgcatgctgaacctgcgacggtacaatgggcgcatcctttttgttccagcaccaggatatgaagaagttggtgatcccgtggaacaaactaccggtcatgaaacaaatggggttagcgggggcaactgacaaaaatggtgaaacgtgcggctatgtcggcccgtcgatcaaagaagccgatcttagatggagatcgctgaacggtccgttcgtttcagtctggctcggcaatgttcctttcgctagcgaagatgccatggcagcaccaaaagcagagtttgcggatggctacttggatgctgctataatcaaggactgcccgcggtgggatgttctggggctcgtgctccagatgaaggacggcgcctacgtgaactcgccgtgcgtggagtatttcaaggtgaaggcgatccggatcgagccgggcctgcgcgtgggcagcagcaccaagggcggtatcatcgactcggacggggaggtgctcgcgaggggcgacgggtcccactcccgcgccggcgacgagccggggcacctgatggcgtacggcccgcccatccagctgacggtggaccaggggctggccaccatcttctccccgagatgacgattcttctatctgttctccaccgcctgcgaggactttgcttcgttagccctgccattttctcgagtagaaccatgtgactctatatgtaaatattagtcacacggtcacaccccactccagtggatgagcgatgagccaaaacacaagagggacagatcctttatctccgtcaagagattgttttcttttcacggccacagcccacatggccgccgcttttagtgttagcgtgagaaaatgacaagtgggctgtgggcagctcctattctttttttcaccttgtgtgtgttgttgattgtcccttgacaaacagtggactgttttcctgcaaaattggtgtttaattaacctgaaaagcttccacttgcatctaa

SEQ ID NO: 141810 - DNA, 1890 bp, Zea Mays
gataaggcacggagaacgagtgaccggcgcgtgaagcagcggtggtggagtgggcctagggcagggtagccgtcaaggcagggcgttcgtaggcgctacgaaagctcgaggactgtactcgctcgcaaaccctagccgccggaccggccggtgaccgtgcggcgctgaggcgcgcgctatataaacagagccatccattcctcccttaccgttcagtcccacctcgaccgcctcctctcccctcccccggctctgtctgttgacttaccccgtcgagctttctagtcagctgctcccgttgccatggggaaggagaaggttcacatcaacattgtggtcattggccatgtcgactccggcaagtccacaaccaccggccacctcatctacaagcttggaggcattgacaagcgtgtcatcgagaggtttgagaaggaggctgccgagatgaacaagaggtccttcaagtacgcctgggtccttgacaagctcaaggccgagcgcgagaggggcatcaccattgacattgccctgtggaagtttgagacaaccaagtactactgcaccgtgattgatgcccctgggcaccgtgacttcatcaagaacatgatcaccggcacctcccaggctgattgtgcggtgctcatcattgactccaccactggtggcttcgaggctggtatctccaaggacggccagacccgtgagcatgcgctccttgctttcactcttggtgtgaggcagatgatctgctgctgcaacaagatggatgccactacccccaagtactccaaggctcggtacgacgagatcgtcaaggaagtgggttcctacctgaagaaggtggggtacaacccggacaagatccccttcgtgcccatctctgggttcgagggtgacaacatgatcgagaggtcgacgaacctggactggtacaagggccccaccctccttgaggcgctggaccagatcaacgagcccaagcggccctcggacaagcccctgcggcttcctctgcaggacgtgtacaagatcggcggcatcggcaccgtcccggtgggccgcgtggaaactgggctcctgaagcccggcatggtggtcacctttgcgcccacgggcctgacgacggaggtcaagtcggtggagatgcaccacgagacgatgcaggaggcactgcccggcgacaacgtcggcttcaacgtcaagaacgtggcggtcaaggacctgaagcgcggctacgtggcctccaactccaaggacgaccccgccaaggaggctgccagcttcaccgcgcaggtgatcatcatgaaccacccggggcagatcggcaacggctacgccccggtgctggactgccacacgtcccacatcgccgtgaagttctcggagctgctcaccaagattgaccggcggtcgggcaaggagctggagagcgcccccaagttcctcaagaacggtgacgccggcttcgtcaagatgatccccacgaagcccatggtggtggagactttctccgagtatcctccactggggcgcttcgcggttcgcgacatgaggcagacggttgcggtcggcgtgataaagagcgtggagaagaaggacccaacgggagccaaggtgaccaaggcggctgccaagaagaaatgatgatgattctgcatgtaatccatggttcctggtttctttgctggtcggagtattttgttgggtggtgctagtagtagttaacaaaagaataattttcatgggttcattgtgtaggtttggactgttgtgttcgtgattgcgtaccacactatatatattgggttttgcttctatagtaatattatcgatgaccatgatgctatgaggcttgtctacccagtcatgattgcttgccttttggct

SEQ ID NO: 141811 - DNA, 109 bp, Zea Mays
atctaaatgaacgaacgtttcacaaaattttccgttttaaacgaacgaagtagattagcagtgtcggtacccgtaactgcgtactcactcctattgtggcaaggcagag

SEQ ID NO: 141812 - DNA, 3382 bp, Zea Mays
cgtctcgtcctctgcccatcgtcgtcttattcctatcgcccccacgaatcccacgcccctcccaaaaccccccttgcctcacagcgctgccgccggcttggtgtggcgtccgaccatgtcgtccccggggccacagcaggcgccgccggcgcagcctcccccgccgcaggccgccgcgccccccaccgccgctcccgcaacggtctccgcgacctccatctcggtgcagctgcctcctatccagccgaaaccgccgccgcagccgggtcccacttccggcccgcaaccgccgacgccggcgcagctcttgaatctgggtccgcagccgccgctgtacaggggcccgatctgctggaactcctattgtaaggaccccgaccccaactccttcggccgccgcgggtggaaggtccgctcgggcccaccctactccgtgtacgccgacctctgcgggagatgctattctcagtttgaacaggggatatactgcgaaacgttccattccgaagagggcggctggaggaactgtgaatcctgcgggaggagggtacattgtggctgcatcgtgtccatccacaagtatcagctccgtgacgctggtggggttgactgcgccaagtgtgctcggagcacccgtgctgccatggccccaccaagtcccgtatggacaaatcctattcatagttctcaaaatgtatctgacagaaaagacattactgtaaagagctggagacctcctgctgggcaaatttcaagtcagtggaggcagactaatctgtggagcgtgtccagtatacagtcagacttgcagcagcgtctagcttttgagtttgataggcctagcggcagtgaaaagctacttcctgggcgcacttttattcattcccaggaaaggaaatttgatgacatgcatgacagaccagcaactcctgcgggcatgaaccacattatgagggagagagatcccaatgggcacggtcagaccactaatatggatccagcatactcttataccctctatcacagagatggatcgcatccaaataatcttcatgattctaatcaccattgtggagaaaatgactctttgtcttctaggaaagtggcaatgccagaagcttctacaagtgtggatgctggtttcaagcttgattcacatcatacatctaatttaaaggatgatccaccatccctttcagttggtctggcttctaattttgcaccacagaatggaccgaaagaccatatcagaattgcacctactcagcagcaatcacaaatgacttcctcctcattgcagaaacaattctattctcatgctgtaactggttataatgaatttcaagcacagatgcgcaatggaagacccagaatggattcaaaggctagatcacaattacttccccgctattggcctagaataacagatcaagagctacaacacttatctagcgattcaaattctgttattactcctttgtttgaaaagatgctaagtgctagtgatgctgggcggattggtcgtttagttttgccaaagaagtgtgctgagacatacttccctccaatctcccaacctgaagggctccctttaaaggttcaggatgccagtggtaaagaatggatattccaattccgtttctggccaaataataatagcaggatgtatgtattggagggtgtcacaccttgcattcagtcaatgcagttacaagcaggcgacacagtaacctttagtcgaatagacccagaagggaaattgatcatgggcttcaggaaggcaactaacaattctttcgaacaggagcaagctacaaagcctgccaatggcgccctagcaacttcagaagcaaatggtaaagtttctgccccagattccagtccaaatgctgcagtttcccgtcaaaacaagctcaacacagagaccaaaagttctagtcctgtggaacaagccactgcattgaaaatggacaaggatggattaacacagaaggaagggcctggaactggtagttcttccccaggttctgtcaagagaaaaacaactattcttggtcaaaagaataaaagattacggatggataatgaggaatcaatggagttgaagataacatgggaggaagctcaagaattgcttcgccctcctcctaaggccccatccattgttattgttgatggccatgagtttgaggaatatgaggagccaccggtacttggaaggaagacttattttgtagcagataaatcaggttcgaaccatcaatgggcccaatgtgaagattgttccaaatggaggaaacttccaatagatgctctgttgccctccaaatggacctgctctgacaacaaatgggatccagagaggtgttcttgcgaatctgcacaggaaataagtatagaggagcttgcagaattcattcctataaaacctgccaaaaagcccaaattgaagatagaatctgatgctatcgatgcttcagatgggctggacacgcttgcaaaccttgcgattcttggtgaaggtgaagctctcccttcacagccaacaacaaaacatccccgccatcgtccgggctgctcatgcatcgtctgcatccaaccaccaagcgggaagggtccaaagcacaagcaaacttgcacctgtaacgtttgtatgacggttcgccgccgtttcaggacactcatgcttcgacgcgagaagaaggcgacaaaggatctgtctcgcaagaaagagacgggccaatccagtgagaaggccacacaacaagctgtgtccggacctccaggagccaatgccactgcaaccagatctgcccagaaagcagatggaaacaccgatggacctgaagacatggccgtcgatcacaaggtgacaacatcctctcccgtcaagaaccatattgacctgaacatccaacctgaacgggacgatgagcagtcaccgaaatctggtgcggctggtttgttgagccgagacaatgcaacttagagagtggatagcgtggattgattgatcataccataccaatgagtggacatagataaccgatcgaacatatccttccgaatgtctatacccttgttttttttttaagatagatgtggcgtgaggcgtggggccttgtagtgtagctgttaccttcccataccatagagccggtttccttttaccctgagactccagtggtaatgttatcgtgtataccatagggcaggacacccgtaggtgttgcgtggggacttgcataaccatgtatattgcaagaccagctcgtttcggctgaatgtgaaccgtaagttgctactgtacccctgcacatatttcccccgagttggcaggaattgttacattacattcgtaggatgaatgagctttgtctta

SEQ ID NO: 141813 - DNA, 171 bp, Zea Mays
atgggcggcgaagtagggggcgaagacaagggattcaaccgccataagcttgatgagaatgttgagggaggggccagacgtgtccttgagaggatctccaatggtgtaaccaatgacagccgccttgtgagggtcagaaccttttgggccaagggtcctggcatgcactga

SEQ ID NO: 141814 - DNA, 579 bp, Zea Mays
atggaatatgcaagatcccaagctgcttcaatatgtgaaacacatagctgtgaactggaggtcgggccgcacctagtcctggtcgagcaggtcgccgaggcattcggtgccgtgggggcgcgacggtcgtggcagcagaggttgaggcggagggatcgtcttcgtcggagggaaccgctcacgccacgaggcggagggatcgtcttcgtcggagggaaccgctcacgccacccaacgtcagcagatcctgatccgtcggagactcggagggcgtcgggaggagacagcaaccgcgagcaggagcagcacgagttcatcgagaagaccctggcatccgctggcttctgcaacgagaagacccaggacatctttgcccggtggcattcgctcgaccggcccttggaccccgccgtggtcgaccagctgctggaacgcatggggaggacgccaagtgccgagagaggcgcgagatgcggcgggagatgcagtgagagagaggaggggagcagtggcgtcggtggatccgtagaggccgaactgcacagcttgagcccgtgggagtcggatgatgcagattga

SEQ ID NO: 141815 - DNA, 195 bp, Zea Mays
atgaccagactctgtaacaatatctgcacaacagtaccttggcagactctccaagcagcaaacaaagtgaaggctatcaggaggcttagggaactcttgacaaccaaacttcctacaggcacatttccagtcaagggagatgagctcaccttggcaatggtagttaatcttattaatgcaaacaaggatgattaa

SEQ ID NO: 141816 - DNA, 243 bp, Zea Mays
atgggcgacgacggcgttcgggtcagctccggagaggatgcaggagcgacgcaacgtgccccttcgaggtcatcgtgcggcgccgtggtgagggccggggtagaggagcccgcgaggctggaggagacctgcataggatgccagagccgtgcagatggcggcgtgggggagacgcggcggagtcggagctggtgcttgcgcggggctagggcgtcggcggcgagatcggagcggggcagttag

SEQ ID NO: 141817 - DNA, 3674 bp, Zea Mays
atggcggggtggctggcgctagacgtcgccgcggaggcagaggcgaacgagaatgaggccacgacggaggatgcgaatgcgcagaggatcggtctcgaactctcaattgtccctagagggcttgggttccgtgttgagggcgttcaaattactaccaaaaaattgggagttcaagacaccctgatgccatcagcacctggggagaaggatccacaagttataccgaggcctgcgacggggcctcctctggtgcagactctcacgcctgtcaatgcaacaggaagtcctgccatagacccgaggctggcgcagccgtcttggcctggccatgtagtactcctgcgcccttgtgcagcttggcctcctcatttgccagtcccgttgctgcttccgcaccaaaatgtggatgtggctgcagcagatgttaaccctgcgatcgatagctgtgacgagaagatgttgcccaaggtgaatatgttgttcgatggtgaaagcgatgcgtatgagttctacaatgcatatgcggaaaaggtgggcttctttgtccgaaggtcaacgctctggacgacgtcaaagaacataatcactaggagaacttttgtgtgctcgagagaggggtttcgggagaagaagaagggagcaaaggaagcaaagtgcccacgtcccgaaacacgaattggatgccctgcaagcttgaccattagacttactgctaatggcaagtaccgtttgacagagtttgtgccgaatcataaccatcagctggcaacagcctctacagttcatatgctgaaaacaaagaaaatcaggcgcaaagcacgggctgcgagagaaaacctggcagatgataccgtgagtacaccagaatttgagaatgaagacgaggcatatgaattttacagcatgtatgcggggaaaattgggttcagcgtgcgcagggctagcatgacggtgaataatgagaatgttataaccagaagaatgtttgtttgttcaaaagaaggattccgtgagaagaaaagaggagcaaaaagagtaaagaaacctcgaccagaaacacgaactggctgtccggcatgtatggtcatcaggcttggaactaacgagaaatatcaagtcacagaatttgttacctgccacaatcaccagcttggagctgcagcagcttctgatcttgtcatggcatctgggagtacagaaaatgatcaagatgatggatttgatcaggcagatagatcacccgatgattctgttcacaagcaaaatctgatttatggaagtaccactctgagttccctagaaggtagaagttgcaaaagatacaagtatacaaagactccacgctcaggtgatgttggcgctacactagaatacctgcaaaaggtgcaacatgataacccttcattcttctatgctgtaaaatctgatgatgatgggaacttcacaaattttttctgggcagattcaaaatctattgtggactttttccattttggtgacgtagtctgttttgattcaggatatgcattgcaaggctatgataggccattggctttgtttacaggtgtgaatcatcataagcagacagttatctttggtgctgcaattatatatgatgaaagtaaagaagctttccaatggttattagatactttcaagatggcaatgaacggaacacatcccaagacattgttaactgatagatctgttgccttaagtgaagctgttgcagccacgttgcctgctacagcccatcgttattgtgtgtggcaaatttatcaaaatgctctgcagcagctgagtcaagctttccatggttcaaaaactctagaatgcaacttcaagagatgcctatttgattgtgaggatgaggatgagtttgtgacagcatggaaggaaatgttggaaaagtatgacctagaagataatcaatggctagcagatttgttctcaataaaggagaaatgggcactggcatatggccgcgatgcattttatgctgatatgaaaagcgtccagcaaaaggaaagtttgacaagtgagctgaagaaacatctatcattggaatgtgaccttttgaacttctttgagcagtttgaaagactgttatgtgatcgtcggtctgcagagatggaggctgatgtgaatgctaatcagagtacaaagaagccaccttctatgcgaatgttaaggcaagctgccaatgcatatacaccttctgcctttaaaatgtttgagagggaatttgaattgtacatggattgcatgctctacatctgtggtgagatgagcacaattttcgagtatagaataagtgttgaggacaagtcaagagatcacttcgttaaatttgattcactcaattccatgatgaattgtacttgtaagacgtttgaatttattggcatcccatgtcgccatatgctgaaggtacttgacatgaggaatatcaaggaccttcctgcccagtacatcatgaaaaggtggaggaaggatgccaaatcaggatcctcaaatggtggttgtgctttcttgtttgatggtgaccctgacttttctcacataaaacgttataattttttgtgtcgtatgttcagtgtagcagcggctagagctgcaacttctgatgaatcatttgcatatatggaaaaccagtcaaacatactgatggatcaaatagagcaagttattcaaaccaggccccctgacatagctgatcttattggtgctaattgtgatcgaacacaaaatccagttgacaatattgtcgctgaaggcattcaaagtcatactaattttcttagtggctccactgatggctctctaacatttccattcacattgggtgctggcacattggattaccgctgactggtacctactgttaggatggtactgcagtacagaacaaagtatttctgtctcgccatgaacaacaatatgtgtcatttttaatgttttacaataaaaccatggctgcatcatttactcattactcacctgtccttttggtacaagctatttagttttttttatttgctgaccaagtctttttaggcatgcaaaatgacataatggatgttctactaatgtgttggtagcttcacattggctgcagagctgcaaataacaatggtacacctactgcactggtagttggcaggcctgatattgtctgccttaacttctcacccaaagaaaggaaggattttttccccttcgccagcactcattgtatgtacttgatgggaaatgatgtttcatgaggtagcacccgaaatatcacctggttttccagcctggtgattgtgcacagggtgctcccggtaatgagggactccgcctgctgtgttgccagtttacaaggtgatgatgctgaacttaaccaacgcgagcccatctgatttttaaccagtgctgtacgcctgtagcgtaatgctgttgcgatagccttgtcatgacagttgtgcaatgtacagattttttaacccattacgtaaatatattgacatgtgatcactggtttcaaattgccagctgtgcaatgtattatgctagggagtacatattaacagctacgtagtatttatttagaaaaaaattagaacggcttacaatttggaattgaggaagaatgtgagaatggaacatgaataagaatgaggacgtgaggc

SEQ ID NO: 141818 - DNA, 3319 bp, Zea Mays
cgccgtcctcttctttgcccgtcggccggcgccgccgcagaaaccagccacccgagtgagctcttccagtcgtacttgtattaatcggcccactgtccggctactggtattaggttcgtgttgactggagattcagaattcatttttgtttgttgtgacagctggtgatccatctcgtgctcaaggatcggtctcgaactctcaattgtccctagagggcttgggttccgtgttgagggcgttcaaattactaccaaaaaattgggagttcaagacaccctgatgccatcagcacctggggagaaggatccacaagttataccgaggcctgcgacggggcctcctctggtgcagactctcacgcctgtcaatgcaacaggaagtcctgccatagacccgaggctggcgcagccgtcttggcctggccatgtagtactcctgcgcccttgtgcagcttggcctcctcatttgccagtcccgttgctgcttccgcaccaaaatgtggatgctctggaggatgtggctgcagcagatgttaaccctgcgatcgatagctgtgacgagaagatgttgcccaaggtgaatatgttgttcgatggtgaaagcgatgcgtatgagttctacaatgcatatgcggaaaaggtgggcttctttgtccgaaggtcaacgctctggacgacgtcaaagaacataatcactaggagaacttttgtgtgctcgagagaggggtttcgggagaagaagaagggagcaaaggaagcaaagtgcccacgtcccgaaacacgaattggatgccctgcaagcttgaccattagacttactgctaatggcaagtaccgtttgacagagtttgtgccgaatcataaccatcagctggcaacagcctctacagttcatatgctgaaaacaaagaaaatcaggcgcaaagcacgggctgcgagagaaaacctggcagatgataccgtgagtacaccagaatttgagaatgaagacgaggcatatgaattttacagcatgtatgcggggaaaattgggttcagcgtgcgcagggctagcatgacggtgaataatgagaatgttataaccagaagaatgtttgtttgttcaaaagaaggattccgtgagaagaaaagaggagcaaaaagagtaaagaaacctcgaccagaaacacgaactggctgtccggcatgtatggtcatcaggcttggaactaacgagaaatatcaagtcacagaatttgttacctgccacaatcaccagcttggagctgcagcagcttctgatcttgtcatggcatctgggagtacagaaaatgatcaagatgatggatttgatcaggcagatagatcacccgatgattctgttcacaagcaaaatctgatttatggaagtaccactctgagttccctagaaggtagaagttgcaaaagatacaagtatacaaagactccacgctcaggtgatgttggcgctacactagaatacctgcaaaaggtgcaacatgataacccttcattcttctatgctgtaaaatctgatgatgatgggaacttcacaaattttttctgggcagattcaaaatctattgtggactttttccattttggtgacgtagtctgttttgattcaggatatgcattgcaaggctatgataggccattggctttgtttacaggtgtgaatcatcataagcagacagttatctttggtgctgcaattatatatgatgaaagtaaagaagctttccaatggttattagatactttcaagatggcaatgaacggaacacatcccaagacattgttaactgatagatctgttgccttaagtgaagctgttgcagccacgttgcctgctacagcccatcgttattgtgtgtggcaaatttatcaaaatgctctgcagcagctgagtcaagctttccatggttcaaaaactctagaatgcaacttcaagagatgcctatttgattgtgaggatgaggatgagtttgtgacagcatggaaggaaatgttggaaaagtatgacctagaagataatcaatggctagcagatttgttctcaataaaggagaaatgggcactggcatatggccgcgatgcattttatgctgatatgaaaagcgtccagcaaaaggaaagtttgacaagtgagctgaagaaacatctatcattggaatgtgaccttttgaacttctttgagcagtttgaaagactgttatgtgatcgtcggtctgcagagatggaggctgatgtgaatgctaatcagagtacaaagaagccaccttctatgcgaatgttaaggcaagctgccaatgcatatacaccttctgcctttaaaatgtttgagagggaatttgaattgtacatggattgcatgctctacatctgtggtgagatgagcacaattttcgagtatagaataagtgttgaggacaagtcaagagatcacttcgttaaatttgattcactcaattccatgatgaattgtacttgtaagacgtttgaatttattggcatcccatgtcgccatatgctgaaggtacttgacatgaggaatatcaaggaccttcctgcccagtacatcatgaaaaggtggaggaaggatgccaaatcaggatcctcaaatggtggttgtgctttcttgtttgatggtgaccctgacttttctcacataaaacgttataattttttgtgtcgtatgttcagtgtagcagcggctagagctgcaacttctgatgaatcatttgcatatatggaaaaccagtcaaacatactgatggatcaaatagagcaagttattcaaaccaggccccctgacatagctgatcttattggtgctaattgtgatcgaacacaaaatccagttgacaatattgtcgctgaaggcattcaaagtcatactaattttcttagtggctccactgatggctctctaacatttccattcacattgggtgctggcacattggattaccgctgactggtacctactgttaggatggtactgcagtacagaacaaagcatgcaaaatgacataatggatgttctactaatgtgttggtagcttcacattggctgcagagctgcaaataacaatggtacacctactgcactggtagttggcaggtagattttacatttgctggagatccatttggttgtccttaggaagtaatctcaaaaataacttatgcacaacagctcacctccatgcgaaactacccaacatttcaggcctgatattgtctgccttaacttctcacccaaagaaaggaaggattttttccccttcgccagcactcattgtatgtacttg

SEQ ID NO: 141819 - DNA, 3598 bp, Zea Mays
agaaaggataggaaaatagttgctaggaagttaggggcaaaatgcaagggagacaaaacttgcatttgggtccctaaggatatttgcactaaccttgtaggacccaacatgagttgggtacctaagacccaagcctaaatttgccttgcaggtttatgcatccgggggttcaagctggattatcgacagcggatgcacaaaccatatgacgggggagaagaagatgttcacctcctacgtcaagaataaggattcccaagattcaattatattcggtgatgggaatcaaggcaaggtaaaagggttaggtaaaattgcaatttctaatgagcactctatctccaatgtgtttttagttgagtctcttggttacaatttgctatctgttagtcaactatgcaatatgggatataattgtctttttacaaatgtagatgtgtctgtctttagaagaagtgatggttcactagcctttaagggtgtattagacagcaagctttacttagttgattttgcaaaagaagaggccggtctagatgcatgcttaattgctaagactagcatgggctggttgtggcatcgccgcttagcacatgtggggatgaagaaccttcacaagcttctaaagggagaacacgtgataggtttgactaacgtacaattcgaaaaagatagaccttgtgcagcttgtcaggcaggtaaacaggtgggaggagcgcatcacagcaagaatgtgatgaccacatcaagacccctcgagctgctacatatggacctcttcggacccgtcgcctatctaagcataggaggaagtaagtatggtttagttattgttgatgacttttcccgcttcacttgggtgttctttttgcaggataagtctgaaacccaagggaccctcaagcgcttcctctggagagctcaaaatgagtttgagctcaaggtgaagaagataaggagcgacaacgggtccgagttcaagaaccttcaagtggaggagttccttgaggaggaagggatcaagcacgagttctccgctccctacacaccacaacaaaatggtgtggtagagaggaagaacaggacgctaatcgatatggcgaggacgatgcttggagaattcaagatcctcgagcgtttttggtcggaagtcgtgaacacagcttgccacgccatcaacagggtctaccttcatcgcctcctcaagaagacttcgtatgagctactaaccggtaacaaacccaatgtatcttactttcgtgtatttgggagcaggtgctacattctagtgaagaagggtagaaattctaaatttgctcccaaagctgtagaagggtttttgttaggttatgactcaaatacaaaggcgtatagagtcttcaacaaatcatcgggtttggttgaagtctctagcgacgttgtatttgatgagactaatggctctccaagagagcaagttgttgattgtgatgatgtagatgaagaagatgttccgacggccgctatacgaaccatggcgattggagaagtgcggccacaggaacaagatgaacgagatcaaccttcttcctcaacaacggtgcatcccccaactcaagacgatgaacaggttcatcaaaaggaggcgtgtgatcaaggggagcacaagatgatcacgtaatggaggaagaagcgcaaccggcacctccaacccaagttcgagcggtgattcaaagggatcatctcgtcgaccaaattttgggtgacattagcaagggagtaactactcgatctcgattagttaatttttgtgagcattactcctttgtctcttctattgagcctttcagagtagaggaggccttgctagatccggattgggtattggccatgcaggaggaactcaacaacttcaagcgcaatgaagtttggacactggtgcctcgtcccaagcaaaatgttgtgggaaccaagtgggtgttccacaacaaacaggacgagcacggggtggtgacgaggaacaaggctcgacttgtggcaaaaggttatgcccaagtcgcaggtttggactttgaggagacgtttgctcctgtggctaggctagaatcaattcgtatcttgctagcatatgccgctcaccattctttcaggttgtaccaaatggatgtgaagagcgctttcctcaatgggccaatcaaggaggaggtgtacatggagcaaccccctggcttcgaggatgaacggtaccccgaccacgtgtgtaagctctctaaggcgctctatggacttaagcaagccccaagagcatggtatgaatgccttagagacttcttaattgctaatgctttcaaggttgggaaagccgatccaactctttttactaagacttgcgacggtgatctttttgtgtgccaaatttatgtcgatgacataatatttggttctactaaccaaaagtcttgtgaagagtttagcagggttatgatgcagaaattcgagatgtcgatgatgggcgagttgaactacttccttgggtttcaagcgaagcaactcaaggatggcaccttcatctcccaaacaaagtacacgcaagacttgctgaagcggtttgggttgaaggacgccaagcccgcaaagactccgatggggaccgacggacacaccaacctcaacaaaggaggtaagtccgttgatcaaaaagcataccggtcaatgatagggtctttactttatttatgtgctagtagaccggatattatgcttagcgtatgcatgtgtgctagatttcaatccgatcctaaggagtgtcacttagtggcggtgaagcgaattcttagatatttggttgctacgccttgcttcgggctctggtatccaaaggggtctacctttgacttggttggatactcaaattccgactatgctggatgtaaggtcgataggaagagtacatcagggacgtgtcaattcttaggaaggtccctggtgtcgtggaactctaagaaacaaacctccgttgccctatccaccgctgaggccgagtatgttgccgcagggcagtgttgcgcgcaactactttggatgaggcaaacccttcgggactttggctacaatctgagcaaagtcccactcctatgtgacaatgagagtgctatccgcatggcggaaaatcctgttgaacacagccgcacaaagcacattgacatccggcatcactttttgagagaccaccagcaaaagggagatatcgaagtgtttcatgttagcaccgagaaccagctagccgatatctttaccaagcctctagatgagaagaccttttgcaggctgcgtagtgagctaaatgtcttagattcgcggaacttggattgaattgtagcatacatgtatttatgcttttgatcatgttcctttttgcattttgttgtttagtatggtgctcaagttgtacaaacactccctggacctcacaagtccgttgcaaagtgatgcacagttttagggggatatgtgttacaacttgaccctttgagactaaccatatgcttgagtttgcttgttttagtctcgaaggagaattaaaagggaaaaggtggacttggaccatgcaagacttcca

SEQ ID NO: 141820 - DNA, 109 bp, Zea Mays
gtgtttgatctcttgtggtattgtgttttgttgagactcctctctagccacttggcgattattgtgctaacacttaacaagtttttgtggctataagtttaagtttcac

SEQ ID NO: 141821 - DNA, 591 bp, Zea Mays
atgcaggcggcatgcaaccgtgccaagtgggcgcaccccttcaactccaacgcgcccggcatggaggcccaggcccacacgtcatgcaaccggcgcgccggttgctacgtgcgagcaactgcaccgccactcgcgccactaccgtgcctcctcgactgcggaaccagtaccgcgactcgaggcaaccctgcgtatgacccaacagtgccagccaggcacatcgatcacgggacaggcgacacctttggcaggagaagcgggcgacgcttcgccttcgccataatgaccgcgtcaaaaaaagggaccgggaaagggggataccccgaaagggatccttctccgcgaaagaaacgggccccgagccccctactgatcagaggttcgaaggctggcccctcggaggggttcaacagccgcctcagagcgctcgggctccgcgcccactactggtcagaggttcgaaggccggcccctcggaagggttcaacggccgcctcaggccactcgggcttcgcgcccactactgatcaggggttcgtaggctggccctcgaagggttcacagccgcctcagacgcagagcgagggatga

SEQ ID NO: 141822 - DNA, 287 bp, Zea Mays
cctcgccctacccagggctcggaccgaccacgtcataggaggggccatcattaccctacccctagctaactctggctacggggaacaagaccggcgtcccatctggctcgtcccggtaaacaagtaatgatgacgccccgcatgctccaagacgatggcggctctcagcccccttacgaaagcaaggagacgtcagcaaggactcgacagccccgacagctgtcctttcgccagactccagcactcctccgacggccacgacaccacacgaaccgggtgccaaaacc

SEQ ID NO: 141823 - DNA, 826 bp, Zea Mays
gttggcctcctcgtcgccatagagcatggctccggcctcaagggcctgctcgccttcatcgtctggtaataaaaaggaattaggccgagcccccaccagtaaaaatctctctctgtatatgtcactgcagcacccataaagcccaccacggcgccaccgacagcgccaccaacccccacacccacctccacctgcaccacggagcatggcagcgcggagagacaggagcttaggcgcaaccacgacggcgtggcgaagcttgggcgtgctcgtgatggctcgaaggaggggaggggacaccgcggacaatgacggcgacggaagccgtcgtcgacgctatgctcgccgccacgagccgtgccttcacgagcacctttgccatcgccatccagatccagctgtacttccgcagggctccagctctcctccgacggccacgacatcacatgaacagggcagcaacacctctccgacagccacgacagcatgtacataggccactagctcctctctgctagacacgttagcacattgctacaccccccattgtacacctgggccctctccttacgtctataaaaggaaggtccagggctctcgtacagaggcttggccgcgcgggagaacaggccgacgcataaggctctcgctctctcccacgcgaacgcttgtaaccccctactgcaagcgcatccatccgccctaggcgcaggacaacacgaaggccgcggtttccccttactgttctcccccctttgtgtcccgtctcgcgccgacccatctgggctgggacacgcagcgacaatttactcgtcggtccagggac

SEQ ID NO: 141824 - DNA, 2602 bp, Zea Mays
cggcaacgagcaccaccaccgcaaccatcgagcccacctcgacgagagggtgtgccgaggctaccacccaaggcgtgggggacgctacgacagtggggaggatcggagcccctcgcccgaaccacccggtccgcaggctttcagccgggccatacgacgggcgccgttcccgacccggttccgaaccccgactaccatcacaaagtactcgggggagacgaggccggaactgtggctcgtggactaccgactggcctaccagctgggtggaacagacgatgacaacctcatcatccgcaacctccccctgttcctctccgacatcgctcaagcctggctggagcatctgcctccggggcagatctccaactgggacgacctggtccaagccttcgccggcaacttccagggcacgtacgtgcgccctgggaactcctgggatctccaaagctgccgccagcagtcgtgagagtctctccgggactacatccggcgattctcgaagcagcgcaccgagctgcccaacgtcactgactcggacgtcatcggcgcgttcctcgccggcaccacctgccatgacctggtgagcaagctgggtcgcaagacccccaccagggcgagcgagctgatggacatcgccaccaagttcgcctctggtcaggaggcggttgaggccatcttctgaaaggacaagcagccccagggccgccagccggaagacgtccccgaggcgcccgctcagcgcagaaccaagaagaagaacaagaagaagtcgcaagcgaaacgcgacgccaccgacgcggaccttgtcgccgccgctgagtacaagaaccctcggaaacctcctggaggtgccaatctcttcgataagatgctcaaggagccatgcccctatcatcaggggcccgtcaagcacacccttgaggagtgcgtcatgcttcggcgccactttcacaaggccgggccaccggcggaaggtggcagggcccacaacaatgacaagaaggaggatcacaaggcagaggagttccccgaggtccacgactgcttcatgatctacggtgggcaagtggcgaacgcctcggctcggcaccacaagcaagagcgtcgggatttctgctcggtaaaggtggcggcgccagtctacctagactggtccgacaagcccatcaccttcgaccagggcgaccaccccgaccgcgtgccgagcccggggaaatatccgctcattgtcgaccccgtcatcggcaacgtcaggctcaccaaggtcctcatggacggagccagcagcctcaacatcatctacgccgagaccctcgggctcctgcggatcgatctgtcctcgatccggacaggcgcgacgccttttcacaggatcatccccgagaaacgcgtccaacccctcggacaactcgatctgcccgtctgcttcgggactccctccaacttccgaagggaaaccctcacgttcgaggtggtcgggttccgaggaacctaccacgcagtactggggaggccatgctacgccaagttcatggtcgtccccaactacacctacctcaagctcaaaatgtcgggccccaacggggtcatcaccgtcggccccacgtaccgacacgcgtacgaatgcgacatggagtgcgtggagtacgccgaggccctcgccgaatctgaggccctcatcgtcgacctggaaagcctctccaaggaggcgctagatgcgaagcgccacgccggcaacttcgagccagcagagacggttaagtccgtccctctcgaccccagcaatgacgcctccaagcagatccggatcggctccgagctcgaccccaaataggaagcagtgctcgtcgactttctccgcgcgaacgccgaagttttcgcgtggagtccctcggacatgcctggtgatagtcgcctagaggggggtgaatagggcgaaactgaaatttacaaatataaacacaactacaagccgggttagcgttagaaataaaaaccgagtctgcgagagagggtgcaaaacaaatctcaagcaaataaggagtgtgacacaaggatttgttttaccgaggttcggttctcgcaaacctagtccccgttgaggtggtcataaagaccgggtctctttcaaccctttccttctctcaaacggtccctccgaccgagtgagcttctcttctcaaatcaaaaccgggaacaaaacttccctgcaagggccaccacacaattggtgcctcttgccttgattacaatggagttttgatcacaagaacaagtgagaaagaaaagaagcaatccaagcgcaagagctcaaaagaacacgacaaatctctctcgctaatcactaaagccttgagtggaattggagaggatttgatctctttggtgtgtctagaattgaatgcctagctcttgtaagtggttgagaagtggaaaacttggatgcaatgaatggtgggtggttgggggtatttatagccccaaccaccaaactagccgtttggtggggctgactgtcgtatggtgcaccggacagtccggtgcacaccggacatgtccggtgcgccagccacgtcaccaaagccgttgggttccgacc

SEQ ID NO: 141825 - DNA, 2346 bp, Zea Mays
cggctaccgcgcatagagacccgggcagacgagagggcttgtggggtcccggtcgatttcttcttcttgctacgcaagtcgaggtctccccgccgcgaccgcgagatccccctccggcaagtcaggaaataaaataaagtgaggcagcaacacgagcacgggccgtggctcaatatctccagattttcccgaaacccttgtcccatttccttccatattatttacatataccctctgtccttgtcgcggcgatgctctgttggtaatcttggaggcgatcgatgtcgacaggccgtgacgtcgtccgatgattctccctctccctcgtcgccttcgttgtcatcttcgcacgttcgtttggttggacacttggacttccctcgcacgcttgaaggttgaagcagctgctcccgcagatggcggcggtgtggtctaggatcgggaggggagcgcagctgtcgctgtcgctgtccctgtcgaggaccttctacgacggcgcgtcggcggcttccacgctgcgcagtgctgccgcgctgtcccgcgcccggggccagcacgcgtcgtcgctccacagcctcgcgggaaggtccgccggccacctcctccagccgccgagcaggggcatcgtgaccacgcccgcgaggcttcacccggcgtcgtccgcggcagtggtggcagagctctcggacgcggaggcgagggagtccgaggccgtggcggcgccgcctcgccagatgccgagcctcggcccgacgcggcccggggagaagccccgcgtcgtggtgctgggcaccgggtgggcggcgtgccggctgctcaaggacgtggacacgcgcgcctacgacgtcgtgtgcgtgtccccccggaaccacatggtgttcacgccgctgctggcgtccacgtgcgtcggcacgctcgagttccgctccgtcgtcgagcccgtcagccgcatccagtcggcgctcgccacccgccccggctcctacttcttcctcgcctcctgcaccggcgtcgacaccaaggcgcacgaggtgtactgcgaggccgcgtccagcgacggacagctgccctgccacccgtaccggttcaaggtcgcctacgacaagctggtgatcgcgagcggcgccgagccgctcaccttcaacatcaagggtgtccaggagcatgccatcttcctccgcgaggtgagccacgcgcaggagatccgcaggaagctgctcgctaatctcatgctggccgagaatccaggcttgtctgcggaagagaaggagcggctcctgcactgcgtggtggtcggcggaggacccaccggcgtcgagttcagcggcgagctcagcgacttcatcacacgcgacgtgcgccagaggtacgcgcacgtcaaggactacgtcaagatcaccctcatcgaggcaaacgaaatcttgtcatcgttcgatatcggactgcggcagtacgcgacgaatcacctgtcaaagtatggagttaatctggtgcgaggcattgtgaaggaggtgaaggccacggagatcaccctgagcgatggcacccgcgtgccctacggcctgctggtctggtccacgggcgtcggcccgtcggagttcgtcaggtccctgcaccttcccaagtccccaggcgggagggtcggcgtggacgagtggctccgcgtgcccacggcgccggacgtgttcgcgctgggcgactgcgcgggtttcctggaggggaccggcaagccggtgctcccggcgttggcccaggtcgcggagcgggagggccggtacctggcgcggctgctcgggaggatcgcggcgcagaacggcggcaaggcgcactgcgccggcaaggccgacctcggggagccgttcgtgtacaagcacatcggcagcatggcgtccgtcggccggtacaaggcgctcgtcgacctcagggagaacaaggatgccaagggggtgtcgatggctggcttcctcagctggctgatgtggcggtcagcgtacctgacgcgggtggtgagctggaggaacaggttctacgtggcggtgaactggggaacgacgcttgtgtttggcagggacaacaccaggattggctgacgacgtttagcagcttaagctggtgttcctctggatagtaccacgggaacaagagactgcctgtcattgttgttcttttgtttgtaattcaacacgtgctgagagatttctattggcttccatactctctctctctctattggtcagatgaagtcatgaagtgcagacttgcaaatgtaagtcaccagtttcttttttaaaaaaaagattaaagatatgatgccgatggagcttgtacaacagacgaaaaatacat

SEQ ID NO: 141826 - DNA, 375 bp, Zea Mays
atgacctccaccacgtcatcacccccacgcccgtccggacccctatccccagcatcgcagcgcctcctgcacgaggtcgctgcgcttgtcgatctgatggcgacccccatggcaaaggagcagaattctcaggtgggtggtggaggaggagagggagggaggacgacgaggctgcctggccgagcccacgaggggaaggatctcgagctcgccatcgatgacttcgacgaggagttgatcgaccctgagctacgctactcgttccagcgcaacagcaagtccattcagcaaaccttggcgctcctcatctatcgcagcctcttcggcatcgccatcagacttcctgtcatgctgctccgaggtaggcgtgcctga

SEQ ID NO: 141827 - DNA, 222 bp, Zea Mays
cgttgtctgcttatgttgaaagttagccatgttgtacaccaggaatataatgatcacgcacaggacgaacagatgcaaccgcagtttcatcttaggacacctatcgccccccttaccattcttatttttccaggcactaattttctgtgtacaactggaaacagatggatcgcttcttatggtgtcaagaagcaactcaagcaagtcaggatcatttcgtga

SEQ ID NO: 141828 - DNA, 1906 bp, Zea Mays
aggcccggccctcggcttgatcccagcctttcttctcccgttcacagttcaccccacttgctctctttctcccaagtagcaacgaccgcgcgtcctccgccgccgcactaaaccctactccatgtacccaggtctgcgtcgggcccttgccggcgatgagaacccgtcagttccaaagatggctcgtcgtggattgatggaacaggacttaagcaaactggatgtgacgaagcttcaccccctgtcacctgaagttatctcacgccaagcaacaatcaatatgggtaccattggccatgtggctcatggaaagtccactgttgttaaagctatatctggtgttcagactgttcggttcaagaatgagctggaacgtaacattactataaagctgggttacgctaatgcaaaaatctacaaatgtgaggatgacagatgtccgcgaccaatgtgctacaaggcctatggaagcggaaaagaagatagccctctatgtgatgtgcctggatttgaaaacactagaatgaaactcctgagacatgtttcttttgttgattgcccgggacacgacattctcatggctacaatgcttaatggagctgctatcatggatggagctcttcttttgatcgcagcaaatgaaagttgtccacagccccagacatcagagcatcttgctgctgttgaaatcatgcgtcttcaacatatcatcattctgcagaacaagatcgatcttatccaggaaagcgcagcgatgaatcagcatgaagcaatccaaaaattcatccagggaacaatagctgaaggtgcacctgtggtgcctatatccgcccagctgaaatacaacattgatgttatctgtgaataccttgtgaagaaaatccccatccctgaaaggaactttacctcacctcccaacatgattgttattcgctcctttgatgttaacaagcctggttcagaggtcgatgaaatcaggggtggtgtagctggtggtagtattctcaggggagtcctgagggtgaaccagaagattgaagttcgccctggcattgtcatgaaagatgagactggaaacatcaagtgcaccccaatctactcaaggattgtctcactgtacgctgagcagaatgaactccaatttgctgtcccaggagggcttattggtgtgggaacaaccatggacccaactctaacacgtgctgacagactggttggccaggttcttggtgaagtaggttcactacctgatgtttacgtagagcttgagatcaatttcttcctactccggaggctgttgggtgtgaggacgaaaggtacagagaaggcagggaaggtgtcgaagctcaccaagggtgagatcctcatgcttaacatagggtccatgtccacaggcgcccgtgtgctcgctgttaagaacgatcttgccaagctacagctcaccgcgcctgtctgcacgagccgaggagagaaggttgctctgagccgtcgcgttgagaagcattggcgcctcatcggatggggccagatccaggcaggtacaacacttgaagtaccagcgtgcccggtgtaaagcgtcatactcagacgtgagctgaagttgtgtgcaaaagagaaaaaaaaatgagtttgttgttagtcctgtccctgcgttactgcagatccaaagtcctgggtcactctaattttattttgtttcgttcaattttggaggccgtttgcattatgattcctgtgaacattaccaggtcggaaaccagtattgtgaacattatgagtacggcatatggatcagcatttgccaatttcttctttcgcaccaaaatttagacttgccttcatatggtttgtgcctcaagaagtggctgtatgcctgtatatataagactgtctgcaactctctaaa

SEQ ID NO: 141829 - DNA, 127 bp, Zea Mays
cagcagcacataagaagaaaacacaccaagtttcggattttttgtgcaatgacgcgtcctctggaatttctacaagtttgccataaaatcatataaatggttttggaaaatgagaagtcctatttcc

SEQ ID NO: 141830 - DNA, 526 bp, Zea Mays
gtgcaaacggtctaaccatttctaaaactcgtctgtatatacattacagtccaataattcagctgaaacatagattacatacgcagctatcttgtgcatgcatgcatgcgcacaacctgcaggtgcctagtactagatggcgccaatgacgggcggcggctttcatatctagcaaccaacccattgcaagagaagatctatacacaacagctgcggctcaattcggaaatcctctatctacgtatgtagtactaggttactagctagctagtatatgaacactgaccatgcgtgtgcatatatgaatcaagcatacgatgatacgattatctacatgcatatgcaaatacaattatcgtacgtgcccctatatttttacccctgttaactacatgcccatgtgaaccgtgcatatatacatagtaaagcagctgttaattttgttttctgaagggcatgtcatgaactgtgcatgcaggctaaattattttatgcagggctcaatttgtagatatagagacgatgc

SEQ ID NO: 141831 - DNA, 1919 bp, Zea Mays
gtctactcgcatcccaatctccgtcgtcccccgcggccccgcctcactccttacgccgcactccacctccacatcgccgcccacacccgaccgcgtggccggcctcatgtgggagcgcggcaggccgccccgcaagccgcgcccgtccccaatcctcgtgccgccgccaccgtcgtcgccgcctccccgcctgaacctcctcctcccgagatccctcctcgcgctcgccgcgcgcgccatgccgtcgcgccgcccctccccggtcctcctcctcctcctcgcgctctcgctcgccctcctcttccttctcctctccccttccttcccctccacctcccgcttctctcgctccctcagctctggctccgctttcgcctcctcatctccggcgtcaacctccgccccgcctgcacccgtcaagatctacctgtacgacctgccggccaagtttacctacggcgtcgtccgtagctataaggctgcgcgtgcgacatctggctccgcggacgccgctgctactctgcccgacgagcaactgcggtacccgggacaccagcactcggcggagtggtggctcttcaaggacctgctccgacgcaggccgcaggaccgccccgtggcacgcgtggacgacccgagcgacgccgacctcttctacgtgcccttcttctcctctctcagccttgttgtcaaccccatccgctctccgctggcagcaaacgcctctggggcggggacagcgtacagcgacgaggccttgcaagaggagttgctagagtggctggagcggcaactttactggcagcgccacagggggagggatcacgttttcatctgccaggatcccaatgccctttacagggtggtcgatcggatcagcaatgccgtactcctggtttctgatttcggcaggttgcgcagcgaccaggcatctctcgtcaaggatgtcatcctgccctactcacatcgaatcaactccttcaagggtgaggtcggggtggatggtcgcccctctttgctgttcttcatgggcaataggtaccgcaaggagggagggaaggttcgtgatgcactttttcagattcttgaaaacgaggatgatgtaaccataaaacatggaacacaatcgagggagagtcggcgtgaagctacacaaggaatgcactcatctaaattttgcctgcatcctgccggagatactccctcagcatgcagattatttgatgcacttgtcagtctgtgtgttcctgttatagccagtgattacattgaacttccattcgaagatattatagactacaataaaatatcaatatttgttgggacaagcaaagcagtacagcctggatacttaacttcaactcttcgaagaatcagttcagagaggattctggagtaccagagggaaataaaaaaggtcagacattactttgagtacgaggatccgaatggaccagtgaatgagatttggcgccaagtatcccttaaagcaccactgataaagttgttgactaaccgcgacaaacggttgcttgaaagaggcaccaatggaacagattgttcgtgcatctgctctacaactccaactgacataactgcggccagttaaacaagatggaactcatcggcctacaagctctgtgcctatttcctgtgatcacattgcctgaattttttaggttgtacagttccatgtaaaacgagattaccagccactatttttgaacagtaaatttactaattaccacaatccttgagtttttactagatttgtataggaggagcggatagtcaggaaccttacagtgccctttttgtattgtaagttacattagctattttttgttgtcggcagttcgctgccctagtttttcgacctacataagcatcaatccccgtgccagtgcgtggaccaagtt

SEQ ID NO: 141832 - DNA, 456 bp, Zea Mays
gtaaggtaccagaaccacataccttgctttcctagaaacttaccaggttctagcaccaggaagcttgcttccaccagatctgttgctactcacaagaacgtggagaaggtgcaacagcagatgatcgtgtgatcggatttggcggcaactgtggctgaacaagcagccactaatcgggtggttttgagtaaaaaaattggaggagacagatcgcgtggtggctcaaatgcgcctggaacaaatgggcaaggagttgggagaatcatctggtgcatcgcaggagttgggtggacaacaacaacagattcctcaaattttcaaagccgctcaggagaagggtgatccaatgcatggtggtaagggagggatgcatggtttacaacgtgaacctcgaccacatggggatcatcatcatcaggtgcacaaatgggtgagcgggaatgatatttgggattt

SEQ ID NO: 141833 - DNA, 1772 bp, Zea Mays
aacggcgagaccccgtgctaggctctccagtcaccagcgttatcagctgagccgtcccctctcgcttcgcttggcttaccacgcatcagtgatcaccgagtcactgacgccttgcccgaaaccaaattattgaccgacaacgcgatgctccaaggggtgctgtcccgcgcgcccgccaccgacgctgcggcagcaatgaaggccaagcgggcgggcgcgtcccccggcgaagaggaggaaggggacggccgttctgcgcgggggaagcgacagcagctgctcgggcttggccccgccaccgctttggcgtcggcggcggcggcggaggaagggccggagacgcgaggcctgcggctgctcagcctgctgctgcggtgcgcggaggcggtggccatggaccagctgacggaggcgcgggagctgctccccgagatcgcggagctggcgtcgccgttcgggtcgtccccggagcgcgtggcggcctacttcggtgacgcgctgtgcgcgcgcgtgctcagctcgtacctgggcgcctactcgccgctcgcgctccgcccgctggcggccgcgcagagccgccgcgtggcggtggcgttccaggcgtacaacgcgctgtcgccgctcgtcaagttctcgcacttcacggccaaccaggccatcctgcaggcgctcgacggcgaggactgcctccacgtgatcgacctggacatcatgcagggcctgcagtggccggggctcttccacatcctcgcgtcccgcccgcgcaagccgcggtcgctccggatcaccgggctcggcgcgtcgctcgacgtcctcgaggccactggccgccgcctcgccgacttcgcggcctcgctcggcctcccgttcgagttccgacccatcgaggggaagatcgggcacgtcgccgacgccgcggcgctcctcggctcgcgccagcggcggcgggatgacgaggccaccgtggtgcactggatgcaccactgcctctatgacgtgacggggtcggacgtgggcacggtgcggctgctccggagcctgcgcccgaagctgatcaccatcgtggaacaggacctgggccacagcggcgatttcctgggccggttcgtggaggcgctgcactactactcggcgctgttcgacgcgctgggagacggcgccggcgcggccgaggaggagtccgccgagcggtacgcggttgagcgacagctcctgggcgcggagatacgcaacatcgtggccgtaggggggcccaagcggacaggggaggtgcgcgtggagcggtggagccacgagctgcggcacgccgggttccggccagtgtccctggccgggagccctgccgcgcaggccaggctgctcctcggcatgtatccgtggaaggggtacacgctggtggaggaggacgcgtgccttaagctgggctggaaggacctctccctgctcaccgcgtcggcgtgggagccggcggacgacgctgccgcttctgcgcccaccggttaacgagtacaagacaagatttttgcagcaggtagattatgattttggaattcaatttcatgcctgctgccagcctcgcagccatccttggtggactggtcgtcttctcttcttgctgccgccctgctcgtgtaggcgtcttgtgagtttgtttttgtgatataatcgtataggcttcggcattcctttcgttctcctacctccagtatcaattaccaaatcaactttggattttgaatatttagtatactgcagctttgagtcagaaaaaa

SEQ ID NO: 141834 - DNA, 2372 bp, Zea Mays
gatcgatgacgcaccggaacagtgcaggtgcagcgaaagaggagcgcgccgtcgctgtcgacggccgtgccgagcgccagcagacaagcggcgacgctacaaaacaacgcgccaaccaaccgccccactgctgaccctttccaacctccaagctccctgccttctgccggccggtcggcagcggtggtagcggccaccaccccagggtatggccgcccgctccctcctcctctacgcgctgctgctcctggccctcgccaccgccgcaccgtcccacggcctcactcaagcggatgttgcgaagcgattgaaggaggtgctgtcggagaggaaccgagggcatgagatgctcgattcgtggaatggggatggggacccgtgttctccgtctacctgggaaggcttctcttgcgaacccaaggatggtgcccaggtcgtcgtcaagttgaacttttcttcgaagaaactgcaagggccgattcctgcagagattgctaacttgacggagctaaatgaaatacatctgcagtataataacttcactggatttattccggcatccttttctgctttcagacacctgctgaagctgtcggtgatttgcaaccccttgttgaacaataagcagcctgatggattttctagtggcgtaaatttcagctatggaggatgtgccacccaagagtactatagctcaccagctgaagagtaccaaagcccacctgcagttgccagtcagaaagtatatgttattggtggtgtcgccggaggatctttggcatgtactgttgcactcggatcattctttgtttgttttaacaaacgtgaacggcgttctccaaaaaaggattgctcttctacaacaaatcctgtttttcaagaatgcagcatccataacactacaaatcctgcagtacaacagttgtccctcaaagcaatccagactgcaacaagcaactacaaaactatgataggagagggtgggtttggagcagtttatcgaggtgcattagcaaatgggcaagaagttgcagtaaaagtccgctcaagttcatcgacacagggaacacgtgagtttaacaacgagttaagacttctttctgctgtgtggcatgagaatttagtcccacttatcggctattgctgtgaaaaagatcaacagatattggtctatccgttcatgtccaatggctcactacaagatcgtctttacggtgaggcatcaaaaaggaaagttcttgattggcccacaagactatctgtttgcattggtgctgctagagggctagtatatctgcacaattttgcagggcgttgtatcatacacagagatattaaatcgagcaacatacttctggatcacagcatgtgtggcaaggtagccgactttgggttttccaagtacgcaccacaggaaggtgacagcaatccatcaatggaagtgaggggaactgctggatatttggaccctgaatactattccactcaggtgttatcaaccagaagcgatgtcttcagtttcggagtagtcctgttagaaattgtgacaggaagagaacctcttgatgtcaaaaggcctcgtcatgaatggagcttagttgagtgggcaaaaccatacatcagggagtacaagatcgaggagatggtggaccctggcataaaagggcagtattgctcagaggccatgtggagagtgctcgaggtcgcatctgtgtgcaccgagcccttctcaaccttcaggccgaccatggaggacgtcctgagggagctggaggacgctctgatcatcgagaacaacgcgtccgagtacatgaggtccatcgagagcactgggactctgggctccaaccgctatctgtccatcgacaggaagatgttcgcgtcagggtcagcgcgaatcgagtcgatgaaggggaatctgcaagcaatgccctcgcttccgcggtaactagacgccgcattgtgatttcgtagcgggcgtcgtcagggtgtgatccatgctcaaggcacatctaaccacgctgaggcctgactgagcacctgagatgggcatagacatgaagggatagtctgtactctgtaccatgtacagagcccattcagtggtgagagcacagatcagcgatacctacactgggaaatgccttctgaagccaatgtgctagttttgcctgttgaatttcccaaaagcaggcgaatgtgtgggcacaaactattctttggaccattataaacacgtaaaatgtgtcgagggaatccctcaagaaatcgaatattcagatctgtaccgtcacttcattatgtgaactattgctcgcttgttgtaattgtcattcttgcctaataaaccgatcaacagatgaattttctcc

SEQ ID NO: 141835 - DNA, 986 bp, Zea Mays
gttactagttgatatgctagatcacctgtatcaaatccttcacatttttgttcatcatgttttggtgttgtttttgttttcttctagatactattccactcaggtgttatcaaccagaagcgatgtcttcagtttcggagtagtcctgttagaaattgtgacaggaagagaacctcttgatgtcaaaaggcctcgtcatgaatggagcttagttgagtgggcaaaaccatacatcagggagtacaagatcgaggagatggtggaccctggcataaaagggcagtattgctcagaggccatgtggagagtgctcgaggtcgcatctgtgtgcaccgagcccttctcaaccttcaggccgaccatggaggacgtcctgagggagctggaggacgctctgatcatcgagaacaacgcgtccgagtacatgaggtccatcgagagcactgggactctgggctccaaccgctatctgtccatcgacaggaagatgttcgcgtcagggtcagcgcgaatcgagtcgatgaaggggaatctgcaagcaatgccctcgcttccgcggtaactagacgccgcattgtgatttcgtagcgggcgtcgtcagggtgtgatccatgctcaaggcacatctaaccacgctgaggcctgactgagcacctgagatgggcatagacatgaagggatagtctgtactctgtaccatgtacagagcccattcagtggtgagagcacagatcagcgatacctacactgggaaatgccttctgaagccaatgtgctagttttgcctgttgaatttcccaaaagcaggcgaatgtgtgggcacaaactattctttggaccattataaacacgtaaaatgtgtcgagggaatccctcaagaaatcgaatattcagatctgtaccgtcacttcattatgtgaactattgctcgcttgttgtaattgtcattcttgcctaataaaccgatcaacagatgaattttctcc

SEQ ID NO: 141836 - DNA, 2897 bp, Zea Mays
ctatctttctctctctcctctcccactgccgttccccaaactcagcctcggcttctcttctctggacggggggcggctgccggcgtcgaccttcgcgaggaaggagaggaggccgttggatcccgctggattcgattggattaggacgggataaccgcgggcagtgagcgatgggcgaccttgctgatctcgcgggtgcgggcgaggcggcgcgttcgcatctcgccgccggcggccagcgggacaggctggcggctctgctggagctcgcggcggccgacgacgtcgcgggtttccgcgaggcgctcgcggggggaggcggcgagggcgacacggcggagctggcggacggagtggggatgtggtacggccgaagcaaggcgtatgagccgcgcacgccgctgatggtcgccgcgacttacggcagcgtggaggtggtgtcgcttctgctcgcccttggttgtgtcgacgtcaaccggcgccccggcgtcgacggcgccactccgcttcactgcgccgcctccggcggctcgcggaacgctgtggccgtcgtcaagctgctcctgggtgccggcgccgacccggtaactcccgactccgccggtcgcttgcctgccgacgtcatcttgtctccacctgcttcgcccgacgccttgggcgatctggagatgctccttggccgccgccgagggctcgctgtcgcgacctcggtgccatcgctctcgtcgtccccgccgctctcgtcctcgccggatgagagcaacaggtcgccgtcctcgcggtcgtcttcgttgtctccgattaccgtcgaccgtgccaagaaggagtacccggtggatccgacgctgcccgacatcaagagccgcgtgtatgcctccgacgagttccgcatgttcgcgttcaaggtgcggccatgctccagagcctactcgcatgactggacagagtgtccgttcgtgcaccctggcgagaacgcccgccgccgggatcctcgcaagcacccatacacggcggtgccctgccccaacttccgccgccctggtggctgccccagcggtgatagctgcgagttctcccatggtgttttcgagagctggctccacccgtcgcagtaccgcacaaggctctgcaaggagggcgcagcttgtgcccgccgcatctgcttcttcgcccacgatgaagatgagctccgccatgtgcctcacaatagtggtgcaggtctgctgtctccccgtgcctcttcatccattgacatgaccgctgctgctgctgctctagggcttctacctggatctcctaccaggcactttgtgccaccacctctgtcaccatctgctgccaacaatggtggaggtgctgctgctcattggctccaaggtagcaggctgcgctcttctttcaatgcaagagatgcacaggctgatgaccttggctcgctcctggaatgggaatctcaataccttggagcgctcagcctcccacaaagcagccgatcccagccccgtctttctactggtctgactattcgtccaacagcagttgctccatcctacctcgaagagatgtatgcttcagacatggctatgtcgccaaggttcaccaatgaccaaggtcactcagtcttctcaccagcacacaaatcagctcttctaaacaagtttcatcatcaacagaagggccttttgtcgcctgtcaataccaacaggatgtactcaccaaggggccttgatccatcaattatccattctccatttggtggcatgtctcctcggtcccctcggactatggagctaacatctcccctaagtgtccgtgttggtgttggagctgctgttactccgcgtgatatgttggatcagttttcttccctgaacaagcaccaggtgccatctgtgggatcgccacggaatcttaatgcctcatggggcaacattggtaccccaaagagtaaggtcgactggggtgtggacgacgacgaactagtgcgcttgaggcaccctgtgcaacatggaaatacagaagacgaaccagatgtgtcttgggtgcagtcactggtaaaccatgctgagctgaatggcaagaggggtgaaatggcaagcatggcttctccatcgattaacaagcctgacctgagcttttagggtgactcgctagatcagtgttattgcttcttggcttgagcagcaagatgcacttggagccgaagtaactgtcaaagaggccttttgctctcaaggtggatgaaaccatatttttgccgcgttagtttccgagaagaatagttatttgtcctagtaaataataatattctttttttatttcttgaaattttttgttcgcaaagtcggagatggtgtggtcttcaggaaagcatttgctcacaaattggtagctgaaagaagctgtcgagtattggtaaacagcctcgttaccttggaggtcctaactagtattcttttgattagttcagatgaggtgaaaattcatatggtcgaccgtgagagtcgacagtaattgtgttgatctctgtaacaagagaggttatagatttttttacccccatttgtcaatgaacaatttcataaatacattgatatttccagtttattgttcttctgatgaatacgtttgtacctatgtttttttccctattttctaccatggtagttttgtatctgtgtcaattctattacaataaagtcccaaatttggacacagttcttggttcttgccatgcaggactctggaaacaaattgctcaagtgtcttagacacgctcttatcttctgtcgtaatgattttatcatgcatttcagaaacattttgtggaaattgaaatgtccagattgtataagtaattcccttctcgcggtaaaagtttcgtgggtcgatgtctg

SEQ ID NO: 141837 - DNA, 2923 bp, Zea Mays
ctatctttctctctctcctctcccactgccgttccccaaactcagcctcggcttctcttctctggacggggggcggctgccggcgtcgaccttcgcgaggaaggagaggaggccgttggatcccgctggattcgattggattaggacgggataaccgcgggcagatgcgctgaactattgccgtgtgcagtgagcgatgggcgaccttgctgatctcgcgggtgcgggcgaggcggcgcgttcgcatctcgccgccggcggccagcgggacaggctggcggctctgctggagctcgcggcggccgacgacgtcgcgggtttccgcgaggcgctcgcggggggaggcggcgagggcgacacggcggagctggcggacggagtggggatgtggtacggccgaagcaaggcgtatgagccgcgcacgccgctgatggtcgccgcgacttacggcagcgtggaggtggtgtcgcttctgctcgcccttggttgtgtcgacgtcaaccggcgccccggcgtcgacggcgccactccgcttcactgcgccgcctccggcggctcgcggaacgctgtggccgtcgtcaagctgctcctgggtgccggcgccgacccggtaactcccgactccgccggtcgcttgcctgccgacgtcatcttgtctccacctgcttcgcccgacgccttgggcgatctggagatgctccttggccgccgccgagggctcgctgtcgcgacctcggtgccatcgctctcgtcgtccccgccgctctcgtcctcgccggatgagagcaacaggtcgccgtcctcgcggtcgtcttcgttgtctccgattaccgtcgaccgtgccaagaaggagtacccggtggatccgacgctgcccgacatcaagagccgcgtgtatgcctccgacgagttccgcatgttcgcgttcaaggtgcggccatgctccagagcctactcgcatgactggacagagtgtccgttcgtgcaccctggcgagaacgcccgccgccgggatcctcgcaagcacccatacacggcggtgccctgccccaacttccgccgccctggtggctgccccagcggtgatagctgcgagttctcccatggtgttttcgagagctggctccacccgtcgcagtaccgcacaaggctctgcaaggagggcgcagcttgtgcccgccgcatctgcttcttcgcccacgatgaagatgagctccgccatgtgcctcacaatagtggtgcaggtctgctgtctccccgtgcctcttcatccattgacatgaccgctgctgctgctgctctagggcttctacctggatctcctaccaggcactttgtgccaccacctctgtcaccatctgctgccaacaatggtggaggtgctgctgctcattggctccaaggtagcaggctgcgctcttctttcaatgcaagagatgcacaggctgatgaccttggctcgctcctggaatgggaatctcaataccttggagcgctcagcctcccacaaagcagccgatcccagccccgtctttctactggtctgactattcgtccaacagcagttgctccatcctacctcgaagagatgtatgcttcagacatggctatgtcgccaaggttcaccaatgaccaaggtcactcagtcttctcaccagcacacaaatcagctcttctaaacaagtttcatcatcaacagaagggccttttgtcgcctgtcaataccaacaggatgtactcaccaaggggccttgatccatcaattatccattctccatttggtggcatgtctcctcggtcccctcggactatggagctaacatctcccctaagtgtccgtgttggtgttggagctgctgttactccgcgtgatatgttggatcagttttcttccctgaacaagcaccaggtgccatctgtgggatcgccacggaatcttaatgcctcatggggcaacattggtaccccaaagagtaaggtcgactggggtgtggacgacgacgaactagtgcgcttgaggcaccctgtgcaacatggaaatacagaagacgaaccagatgtgtcttgggtgcagtcactggtaaaccatgctgagctgaatggcaagaggggtgaaatggcaagcatggcttctccatcgattaacaagcctgacctgagcttttagggtgactcgctagatcagtgttattgcttcttggcttgagcagcaagatgcacttggagccgaagtaactgtcaaagaggccttttgctctcaaggtggatgaaaccatatttttgccgcgttagtttccgagaagaatagttatttgtcctagtaaataataatattctttttttatttcttgaaattttttgttcgcaaagtcggagatggtgtggtcttcaggaaagcatttgctcacaaattggtagctgaaagaagctgtcgagtattggtaaacagcctcgttaccttggaggtcctaactagtattcttttgattagttcagatgaggtgaaaattcatatggtcgaccgtgagagtcgacagtaattgtgttgatctctgtaacaagagaggttatagatttttttacccccatttgtcaatgaacaatttcataaatacattgatatttccagtttattgttcttctgatgaatacgtttgtacctatgtttttttccctattttctaccatggtagttttgtatctgtgtcaattctattacaataaagtcccaaatttggacacagttcttggttcttgccatgcaggactctggaaacaaattgctcaagtgtcttagacacgctcttatcttctgtcgtaatgattttatcatgcatttcagaaacattttgtggaaattgaaatgtccagattgtataagtaattcccttctcgcggtaaaagtttcgtgggtcgatgtctg

SEQ ID NO: 141838 - DNA, 264 bp, Zea Mays
tggtcccatgataagaattacacaggacttcaatatgaacaaaacacgttctctacaactgtacacatggtggccactgcttgggagccagtgtctagaaggatcgctaggatcacatggaacctcagaaagtgcggcgaccacttccgcctcacaacgaagaagtacactgtcataaatatcaccagaaagagccacccagggcacagagtcatggtgtcgatgaagcaagcctatgtcggaaaatggaccctcgacaagtaa

SEQ ID NO: 141839 - DNA, 3739 bp, Zea Mays
gattcgcgtgtggtgaaagctactggtagatcgcttgacggaattcggaagccactgaggcgagcggcgagcgcacaccgtcacaagcaccacgccgccgctactgactgacccgaccatcactcacccaatacttggaggtgcgagatggcagcgtcaggatcgggaggcaacgagcccggcgggcggccttggacggcgaccagcacgtgggtcctcggtcccgccggcgggaccgcggaggacgctgtctcgttcgagacctccgactacgacgccgaggcgtcaccggctggcgtcgtgctctgccgcccgccggccgacgcggagggcgacgtgcattcctgcccctgcgagctcactgttagtttcagggggaagtatgagattcacagggtatatgtgcgaagcacagctcggatatatgaactataccactctcctgatgcaaagggcaccggcaaggattatctatgcaccgtgcgttgtggacttgctgttaaagaaccgcagccctatggcgaagaaagtatgtcccagcggactggcagtgctttaaacagtgccaagcgtgaacatgaggcaaaaagtgtaagcagtggtagtgatgaagatagttgggttgatgtcaatattccagaatctcctgcgggaaataaaacactaacatctcaagaaaggaatgtgattcgtacctgccaagtaaatactatggcacactatgaagctactgccgagatgactgatgttaacccatgtgcatcccttactatacgtcttctatcacttcagtcaaatacgtcagtgcacattgaggaaatctacatatttgctgatcctgttgaatccaccaatgatgtttcagtaagaggtcctggaaacatgggaggcagttctttgctggcaatgcttgctcctggccttatgcaaatgtctaagtcaagaaatttgaaaattgatggtagttatttttctgacaaatcaagggatcaagatagcgtcacatgtgaaagggttacacaggaagcagggctgtgtagcacaaatgattcaaaatatacgtctgcagggatagaaagtggaatgggccctacaattggtgttacagtatctgatgaaaaaagtagccaaagcgagttccagttcaaggagcccaattctcttccactgcctgtacaaacattagatagcacacaagcgccttcagtgaaggatcggcgagaattaaacacaggtcatcccctcatgaatgaaaactttactccttataatcatattgagagaaagctggatactctgctgtcaaaggtagagaaggtggaattatattgctctaggtttgaggacagcatgataaagccccttggtagcattgaggcaaggcttcagcgactggaggaacagtttagttcgttctctctggatattcagtctttgagaggttcttctgcatttatgtcagcaccagatggtatgcctaatacaaagagctcgcaggaggaagcacctaatgatgctaatgatagaagtacttctacaactgacaggaagccaggtttagttgttagggcgccagattttatgtcagatgattcctgtggttgtaatgtaataactaatggaaaccaggttagttgccatgggcctaatgtggtgccaaggctacttgtgaaggtccctgattttatttctcaagctgagttaactgatggaaacctccatgatggacatgctctatcttctgaaaaggagtgtaagccttccccgggtttaattgtcaaggttcctgaattcctagatgatgatgatgatgatgacgataatgacagcgacgacgaagtggaagggaagaaacaggcagaagtttgtggtgatggtgatgctcacgcatggtctgatgatactctgaagaaaaacacatccagcaacaccaagagcaaaaaaactgtatctatcaatggggcattggcgtccgcattggaggcattactcacttccaccataggaccaccatcttcaaaacctgctgtttgcgctaccagtaatttaagtgctgaaaatattaatgattccttcagttgctcccgttatcctggaaaaagtggcgagatgcccactaaatatggttcagttgaccaatttctgggtacatctggtgatccaaatttggtcggtgccttcatatcttttcaggatattgatacgactcataattctctgtcaaaggaaatgttggatagcgaggttgagataaatgaacataactgtgatctcaatacagaaaaggtggcatttgttgcaatcacagaaccattggatgtttcctcacagactgataaaattgacgaatctatttgtgatggaagttggatgaacagacaaaacaatggttctaattttgatacaatgccatatatcatgaacattgaacctttggatccttctaagcctcctacagtttttggacctgttgatagtggagttcaggtgaatgaagatagaccttccatatccttgctggagtttcttgcagcaaggaatgcaaactcttgcaagaatgatacttcggaggtatgccttggtaacgaagctgctgaaaaactgtcttttgagagaacatcggctggagctggtaaaaactcgaaaaataccagtcaacttctagtgaagaaagctcttgagattgacgcggacgagagattttttttgtctagtgtacccatcggggcaaaatttgaaagaacaagcagtcccgcccccagaactagtgggcacgatattaataatacaaaagaagctgtctcagataaggaatgtggcctggaggatagagagaatggaattaggctctcttcgaggatggactctatattttctcagtgtcatgctacagactccttgtcaagtttgagtagtatggagtcatttagtgcagcacctgccacagaccctgttgttccagggaatgacacatcgggaaatttcgtggaagatcttgcaggcattggagatcatcctgttgcaacactaatatctggggaagatctccaaaaggtttgtgatttgctttatgagttgaaggatgacatgttgggcatggcctccacagcaaagtgtacaaacaagagcagcccgtcccttgaagtcttgcttgctgaatcatctgattctgaagtgcaaatttctgatcttgaggagggtattgccagtggcgctggcattggctcagctggactgtttggtacattctcatcttcagatgacgatgcttctgctgcaggcgagcctttaggtgatgttgccgacctgactacaccatcagagccatatacttctgccttcaatgagcctctggttgacgtggctgacctgacaaacccttcagggacagatgctacttcagtgaatgagcagccttcggctgatgtggttgatccgctacatacttcaaacgagcctttggtcagtttggatgatctgccaaaccctccagagatgtcttttggtgggagcagtggagaacatcctgacagtcttatataggataaggctatgcgacactgatagttcagagatgagcgattgagcggaacatgttcctgctgctgcactagttggtgtgtgctgtacagtgatgactgttttcttcgtgcagaagtttctgtacataaataagtctttgtgtcctcaatagtttatgctaaatactacgaaagcaaagtaactttggtttcgggtt

SEQ ID NO: 141840 - DNA, 1146 bp, Zea Mays
aatcacccctcgttgacctagtaaactccggtatctcgcctgtctgatggccgccacaaccgccgccgacgcattcccctccaccgtctcctcagactcggactccgacgacctacttctcccgaacctcctcccctccaccaccaccgcacccgcaccctcctccccatcgcgcgagcagctccaccacttccaaatcccctccctcccgtcccccatcaccgtccgcgcgctcccgtcacggggcctctcgtttcagctctggccctcggcctccaccctcctgcgagtcctccctgccaccccgtgcctcctcccgcgcccgcccgcgctggggagcccgctcagcgtcctcgagctcggctccggcaccggcgccgcggggctcgccctggccgcggcgctcccggcgcgcaccgtcctctccgacctccccgacgcgctccccaacctccgccacaacgtcgaactcaacgagcacctcctcggctccgccggtggcgcggcctccgtcgtgccgctccgatggggcgacgcctccgcgatggcggacgtggccgtggcgcagacggcgtccccgttcgacctcgtcgtggcgtcggacgtggtgtactacgaggagttggtggaccccttgatagagacgctgcggttctttgtgaagggggaggtggcattcgtgatggcgcacatgaggcggtggaagcgcacggacaagaagttcttcggcagggcgagaaagctgttcgacgttgaggtggttcacgaggatccaccgctcgagggctggcgccacgggccggtggtttaccggttcaccgccaagaagcagcacggcaagaagtgaagaaactaccttaaggtaaaggctgcttgcttgcctatctgcatgtgttcatgttgcagcgctgctgctgctgctgtttgtcctcgtttgttgcgtgctagattccaatgttggaaacagaaagtagttccttggaacaatgtgcaactctggaccaaaactgggttgaatttgcaggcatattgatttacattgtatcggtgaggttttgctctggtttactatatactatctagtttgatgagttcaatgtaagtgtcatattacatttttcgaattgaggaatctttattcttctc

SEQ ID NO: 141841 - DNA, 1403 bp, Zea Mays
cgcgatacggcgataccggccgtcgccgtctcatgggctccggctccgactctcacggtctcactctcacctgctataagaaaaagggcccaacaactaccacgtcaaaacgttatgtttattcgatttcgtgtcccgtccgtttgacgaccgagccctccccctgccccccttttccagtttccttctcccttcctgccgctacggcggtggcggcaacgactcgcgcgggccggtcctaggttctcccggagcgggtgggcgggcgggcggttcggcgggatgggcacgccggagttccccaacctgggaaagcactgcagcgtcggcgactgcaaccagatcgacttcctccccttcacctgcgaccgctgcgaccatgtcttttgccttgatcaccgaagttatacatcacaccaatgcccaaatgcaaacatgaaagacgtcactgtcctcatctgcccactctgtgctaaaggtgttcgcctcaatccaagtgaagacccaaatatcacctgggatactcatgttaacactgattgtgatccatcaaattaccaaaaagtgatgaagaaaaagaaatgccctgttcctgggtgcagagagacactgacattttccaacaccatcagatgcaaagattgcaccagagaacactgcctaaagcacagatttgggcctgatcataagtgcccaggaccaagaaaagtggattctggctttccctttgtaagcatgctaaggagaagtcagaaagcggagacacgctcaaatagcagtaacaacaatggttcttcgtggtggagctccagtcttgtgaatgcagcaacgaatttcaaatcatcagccgaagctggaatgcagaagctgagcaccgtgactagccaagccttccagaaggctaaggatgggatcgccccaaatagcagcagcagcagtggtgaccttgtggagcaatgtgttcactgcccagcaagattttccaccgtgggggccttaattgaacatgttgagaaatcccaccagatcaactcacaaccaagtcatggccgagtgacgattgatgtttgcccaaaatgcagcaaggcgttccgggatcctgtgttgcttgtggagcatgttgagaaggagcatggaggaacgtcaagagtgtagtgtaaagcttcgtgtgtactcttaacctttgtaatgtgtaacttttcgttaccttttctcatttcatcaatttgattatactctacacttttgggctcaacatttgcccacaggacaagtatattacgctggattgaaggcaaagcagccattgtccatcattatagaaactgaagtaagatttgttaagaaaatgttaatatctgtcgcaactggtgaaaaaaaaggcagcagctgttcttggcctt

SEQ ID NO: 141842 - DNA, 1283 bp, Zea Mays
acctgcgcccttctcttttcctcctcactcgacaaaaacaaatctccctaatttcagtcatgaaggcccaggtcgcagcagcaactgtcttggtcttgctcctcctgacctttgctgcggaggctcgtacgtgcatgtcgcgaagccaggaacagaaagggaggtgctttcacgatacggattgtgccgccgtctgcgtcaaacagagcttcaccggaggcttatgcaacgggcggccgccgttcaagcagtgcttctgcactaagccatgcaagagagagagagctgatgctacactccggtcgtcaggcctctgatcatgttgtgcttgatccgcatgacagcgcgactctcgcttgtatgcctaggttgatgtgtatgtaataaataaacaaaatagtaaatgacatgtttttcttacatgaaagtcaagcgattttgcttatctgaccggcatgtgtccgcgcgaatcgatttgctctgagatggttttatttctatacatcagagagaaggagacgctcgcgtcgccccccgcgcgggcgaccgagcggacacctaatcctagccgccgcggcgccgccatcctcacctcgcctcttctcgccgcaccgctgcccgagcaggatgccggctgctcgtgcggcctgcggggaaggcggcggcggggccctctcttctcttctccggtggattggggcggacgcggctgcctggtcccccggacctcctcgtcggcgatgacgggctggcggtggaggaggatagggccaccagatccgatattccctcggctggatccggtggccgtgcgacgagaggtgtgtgatgtgcgtggggcggcaggacgccgggcagcggcggcggccggctcgggcggcaccgacggtggtcgtggccagtgcaggtgtctggcgctaggggctacttgacttcgtgctgtggctgcaggccgtggccggctgtggctgccgtggcttggttggctggggcagcgcacggacggcaggctttgtggtgaggcagttcttgcttctcggcggtgatgctgatggtgccgtggtggtgctttgggctgtgacgggcttcttccggtggagtcgatgcgggggcaagaggagcgggctgggctactggcttgggcaagaacatatggcaggtgctgagtcgggcgtaagtcttcactgacgtctatgtcaatggcgatggtggtgacacccttgtggcgttgagtcgggcgtaagtcttcactgacgtctatgtcaatagcgatggtggtgaca

SEQ ID NO: 141843 - DNA, 2052 bp, Zea Mays
acctgcgcccttctcttttcctcctcactcgacaaaaacaaatctccctaatttcagtcatgaaggcccaggtcgcagcagcaactgtcttggtcttgctcctcctgacctttgctgcggaggctcgtacgtgcatgtcgcgaagccaggaacagaaagggaggtgctttcacgatacggattgtgccgccgtctgcgtcaaacagagcttcaccggaggcttatgcaacgggcggccgccgttcaagcagtgcttctgcactaagccatgcaagagagagagagctgatgctacactccggtcgtcaggcctctgatcatgttgtgcttgatccgcatgacagcgcgactctcgcttgtatgcctaggttgatgtgtatgtaataaataaacaaaatagtaaatgacatgtttttcttacatgaaagtcaagcgattttgcttatctgaccggcatgtgtccgcgcgaatcgatttgctctgagatggttttatttctatacatcagagagaaggagacgctcgcgtcgccccccgcgcgggcgaccgagcggacacctaatcctagccgccgcggcgccgccatcctcacctcgcctcttctcgccgcaccgctgcccgagcaggatgccggctgctcgtgcggcctgcggggaaggcggcggcggggccctctcttctcttctccggtggattggggcggacgcggctgcctggtcccccggacctcctcgtcggcgatgacgggctggcggtggaggaggatagggccaccagatccgatattccctcggctggatccggtggccgtgcgacgagaggtgtgtgatgtgcgtggggcggcaggacgccgggcagcggcggcggccggctcgggcggcaccgacggtggtcgtggccagtgcaggtgtctggcgctaggggctacttgacttcgtgctgtggctgcaggccgtggccggctgtggctgccgtggcttggttggctggggcagcgcacggacggcaggctttgtggtgaggcagttcttgcttctcggcggtgatgctgatggtgccgtggtggtgctttgggctgtgacgggcttcttccggtggagtcgatgcgggggcaagaggagcgggctgggctactggcttgggcaagaacatatggcaggtgctgagtcgggcgtaagtcttcactgacgtctatgtcaatggcgatggtggtgacacccttgtggcgttgagtcgggcgtaagtcttcactgacgtctatgtcaatagcgatggtggtgacacccttgtggcgttgctctacctgttgggggcaccattgggaggcatcatgtcccctactgcatggggctctcgagagtgtgagccttgtccatccttggacgtgcgacggtggcgtcattggcgtcgtgccctccttagaggtgccgcatctgaggcccatcttggtcaggtagtggcggtggttggttggtggtgttgctcgcgcacagcagtagaggagtgccggtgggcggagatttctaagtccttggcagatgagtgtgtgctgagcgatcgacgaccgtgcgtgtggcttgagggtgatttcccatggtggaggagttgcaggtgtcgctgaggcttgcagcgggctgcggcttttggcgtggcacagcgttggcgacgacggcgcagttcacgacggcttctttctcttcctctcccagtttgtggtggtgtagtgttttgttgggtgtgttgtttgcgtggtggtggtgttcgcttcggcgtgttactctgtcgtcgttgtgctgagtttggtatggtgtcgccgtgttgatgtcccaatccaaccgcctgttgtctgtcagcccatcttatggagtcggagctgcttatcccttgtgtcgagcttggcaatgataactctagttgggctttgtgtgtggggttgccgttctctaggctgtttgtgtgctctgtataggttttgggcctggttttccttaaaactggatcaattccattcttcttaaatgaaaggcaaagctcctgctattacgttaaaaa

SEQ ID NO: 141844 - DNA, 869 bp, Zea Mays
cgcgggtgctgctgcggaggcccaggaccgaaattgaactgcagttggtgaggtggcggcggaccgggtggcggcgggggcgggggcccagcgtggtagggcggcaccggcatcctgttgtagggcgcctgcggcggcggcgtgtacggattcatctgcgacgggtagccgccctgcggaggcggcggtgcgtacgacctgtaagacgccatcgcgcggcagctagggttcctcggaacccgagccctagcacacagacaccgcgcctgcggacactgctcgctccccttctcctccgtcgccgccaccgcagaagcctctaccacgcgcgaccagctcgccgccgcgcccgccggggccgacggcctgcacgcgctcgccgagcaggtggtgcagctcgtgctcgccgacggctccggcgccagcagcccgcgcgtcgccttcgccgacggcgtcttcgtcgactcctcgctgaagctcaagccggccttcgaggaggtccccgtgggaaagtacagggccgacacccagtccgtcgacttccagaaaagtggtcatatcaaccagaacttatcaaggaagtgtgaagcattagttgtgtcaggtttggcagaatatggtgatgaaatagatgggattgtcccagctgatatcatgaagattcagcctatcctacaatggtcgtgatagatgaggtagattcttttctcttcagaccacatgttgggcttagggccaagtaccaggcaatatgtaattattaaaagcacattatgtgccattattgtttcagaaattccatagacaacatcttcattaatattgaattttactgaattatctaccaaactggcttctaatcattagaa

SEQ ID NO: 141845 - DNA, 946 bp, Zea Mays
cgcgggtgctgctgcggaggcccaggaccgaaattgaactgcagttggtgaggtggcggcggaccgggtggcggcgggggcgggggcccagcgtggtagggcggcaccggcatcctgttgtagggcgcctgcggcggcggcgtgtacggattcatctgcgacgggtagccgccctgcggaggcggcggtgcgtacgacctgtaagacgccatcgcgcggcagctagggttcctcggaacccgagccctagcacacagacaccgcgcctgcggacactgctcgctccccttctcctccgtcgccgccaccgcagaagcctctaccacgcgcgaccagctcgccgccgcgcccgccggggccgacggcctgcacgcgctcgccgagcaggtggtgcagctcgtgctcgccgacggctccggcgccagcagcccgcgcgtcgccttcgccgacggcgtcttcgtcgactcctcgctgaagctcaagccggccttcgaggaggtccccgtgggaaagtacagggccgacacccagtccgtcgacttccagaaaagtggtcatatcaaccagaacttatcaaggaagtgtgaagcattagttgtgtcaggtttggcagaatatggtgatgaaatagatgggattgtcccagctgatatcatgaagattcagcctatcctacaatggtcgtgatagatgagattcttcttgcaaacaagggagattgacctaaaattgcaaaacagttggtggatgtctacgcgcgcagtttaaggtttggatgcgtttcagctttctatagttgtttatgcttattgtgtgaatgatttgttagcctttatctttccttttttcttattaatataatgttgcaaaactctccatgtttgagaaacaaaaatcatgtcttccattatatttaagttttattacccatcacatgggcatctca

SEQ ID NO: 141846 - DNA, 1820 bp, Zea Mays
atggggctgggggctgcgatggcactgggcgacccaccggcggactacgcatccatcgcggcggtggggctgtttgtggcactcatgtgtgtcggcatcatcgtcgggcacctgctcgaggagaaccgctggatgaacgagtccatcaccacgctcttcatcgtgttaagccaagatgagacaccattcttgtacagcctcgtgtttggtgaaggtgttgtcaatgacacaacttctgttgtgttgttcaatgcaatccagaactttgatcctggaaatatcagcggtgccaaattactgaacttcattagcagtttcctttatttgttcggctccagcaccattcttggagtagcttctggacttcttagtgcttataccattaagaagttgtactttggcagcccggtaaagtctatcgctttgagcaacaccattttagccttggtgctggtttcaagagctgcttttgttttcccactatcctttctatcaaatttgaccaaaaaaactccaaatggaaagatatcttttaggcagcaggttattgtttggtgggcgggtctcatgagaggtgttgtgtctattgcgttggcttacaataaggcgtttgacttaatgtttccaaggttctgtggaagtgcgaggcattttgggaggtgtgcgaggcattttgggagggacatcatcatgcccaacttgaagtcgtccgtgaccacaacagcgagcgcggtggagtacatggatgaagtattgaaggcgttgccgctaggtgaggccaggaatgaggattcacgaacactgcaattcaattatggttcattcaaacataaggcattggataaatccttaactaaaaaggttcctaaaaatcgtttgacttcaaatactaaactaacacaatgttgctctattgtagggatttttgaagcactaactgcattccccttctccccttctcccttcctgctgtgcgaagccgtgccccaaaccctctaccatcttatttcagttcccactctctaccatcttccaggaaaaaacactagcaatcttacatgagttccaagttttgcaggtcgttgctgtttgtgaatgtggtttggattatgacagacttcagttctgtccgacagatatgcaaaaaaagtactttgagaaacaatttgagttggctgaagcagtaaagctgcccattttcttcacatgtgtgctgctggtgaagacttctatgaaatcatgacacaaaatttgcacagattccctggtggggttacacattccttcactgactcaacagaagatcaggataggctactttcttttgagaagatgtttatcggtgttaatggttcctctctgaaaactaacggaaatcttgaggttgtacgaggcattcctgtcgagaggttgatgatggaaacagattctccatattgtgacataataaatactcatgctggaagccagtatgtaaaatctgtctggccatccaagaagaaagaaaagtatgagccagattcaacagtaaaaggtcgcaatgaaccttgtttagtcaggcaagttcttgaggtagtggcgggaagcaaagaaatttctgacatagaaggcctgagtagaactctgtaccacaacacatgcaggctcttctttcctcaggatcttgacgcgtctactaatgcgcagcttgagagtggtactgccgtccaggattgctgatgtcagagtgattttttttaaaaaatgtttccttttggttggcgtttggtttcgtacaacttccaatatgcctatgaaatgtttttggtcttataattttc

SEQ ID NO: 141847 - DNA, 770 bp, Zea Mays
gtgcgaagccgtgccccaaaccctctaccatcttatttcagtccccactctctaccatcctccagggaaaaaacactagcaatcttacatgaattccaagttttgcatgtcgttgctgttggtgaatgtggtttggattatgacagacttcagttctgtccggcagatatgcaaaagaagtactttgagaaacaatttgagttggctgaagcagtaaaactgcccatgtttcttcacatgtgtgctgttggtgaagacttatgtgaaatcatgacacggaatttgcacagattccctggtgggttacccatttctttcactgactccgcagacgatcgggttaggctactttcttttgagaagaggcaagttcttgaggtagtggcgggaagcaaagaaatttctgacatagaaggcctgagtagaactctgtaccacaacacatgcaggctcttctttcctcaggatcttgacgcgtctactaatgcgcagcttgagagtggtactgccgtccaggattgctgatgtcagagtgattttttttaaaaaatgtttccttttggttggcgtttggtttcgtacaacttccaatatgcctatgaaatgtttttggtcttataattttccctcgctgccaattttgccatgtttcatgagcctgatgacatgtcaggcaagtcctgactatgtacaagtaccctactgagactatgccctaaaatcatttagggctgagcatgtacaagtacagtttgatggctatgttgttc

SEQ ID NO: 141848 - DNA, 387 bp, Zea Mays
atggctggcatctcggagatggaacaatgtctggctgagaagttcgacgggaccatcaagttgtcggatacaacactcaaggaacatccaaaaaggatgactcgactagatgaggtcaccaacaagttggtcagcatcgagaagaagcaagatgaacaagacaagtcaatgggttgtattcaggccaaattcgacatctcgatgaaatcattggcgcagatgcagcaaaaacagtctaaagagtcgggtatgatgggtcatccttccgccactgttcgcatgccgagagatggattgatgggggccaggccacctcctattggggctcctctgaatggctcttctgttggaccttccattcccaaccaaatattgattctattctga

SEQ ID NO: 141849 - DNA, 177 bp, Zea Mays
atgcccctcaatgacgccaccgacctcaccgccatcgtcacgcgggagggctctggttgctacgtcgtcgcggggcttcgctggtcccgacgcttcgtctcatcatcgatacctatcaattacaggttgcaaaatcagagcaggaagataagaccaagcgattggcgtaccttgtga

SEQ ID NO: 141850 - DNA, 544 bp, Zea Mays
ggtcccgacggagtcgagcgccccggccgtccacaacgcctggaggaagcgctttatcggggtgacgtagatgtggatgaggaccaccgacaagcctagccccgcggagccgccagcgtaccggaggtcggcggcgccggtgacggcggaggcggtggggttcccctccggcaggaacgccgcggaggccgccgccacgaaggacgccgtaaccgtcaccagccccgaccggtacagcaggacctcaaagacgtcagagtcctctagggtccagggaccgtaggcgccgtcgtagatcgtggcctgctcgggtggcagcaccgcgccgggcccgtccccgatggctcagaacctcgcatcgacgccatgaccgccgaggaggtagggcggtggtctcttggtgaagcatagggcgaggctcagatgaggtgggaaagagacgctccatggtgagaggagcgcgacggcggccatgtcgttgaagagcagagcatgggggagtggatcgtgtggttgcgtaggtcggtgcagagatttctaaagg

SEQ ID NO: 141851 - DNA, 306 bp, Zea Mays
atggtactcctctacctcgaccagccggagatctgccaggtggcccgcctcaacagcgccttccacggtgcagcctcggcggactgcgtctgggccgccaagctccccgccaactaccgctaccttgcggccctaacagcggccgccgatgacgagggctgtggcgatggagatgccagcggcaagcgcttgaccaaaaaggagatttacgctcgtctgtgccgatccaccctctttgatgccgcagaaaggtggatgctggtgatcatcccgatcgtctttgtctgccagcgccgcagaagcgcc

SEQ ID NO: 141852 - DNA, 902 bp, Zea Mays
tttttctttcttcctttttttcacttcttctatatctaaatttgtaatgtcagtttttaaaaacatttttttcgacaacactgttatatgatcaggtagtacaagcaaattgtttttttaataatttatggtttgtctttctatggtatcaaacgtctttactttgccgccaacatagataaaacactagcaagttttagatttttttatagcatctaaaattttaggaattttttttggttacaaggaaacgtgcagtgacacattcatgcagaagcactgaagcagtgatcctgaaggcagagggtgatgatgacatgaggtcaccggcagccggcctcgagctccgtgtcccggctgctgtgctcttctgacatggaaggccgagatgaccaacccgtggtactgcagctccggccggccggccggccggttcccttccctcggaagtcggagaaccctcacgccgtcaacagccagcttgcagttggtggtgtgtggcggagatcgatggatggcgcgcgctaggacagagctgagctgagcacccggcggcggcctgcctcccgtcccggcccaccggcggctccaccgctccacggcgtggtgccagggccaccagccaacgtcgaaagacacgacgcagggccaaaaggcatagcagcttcagcgtacggcgtaccttgctcttggacacgacgcaacgcccgtcacccacaccggcacgagcagactggtctcgggctctcggctggcctgcagacgctctctctcgccatggacggcgccgcagcgcccgactggtacgcttcttctcagccagcgcggagggcactctcctcttcgtcttcacccggcggccgggaggcacattggacttcacggacgcagaaagaccaagg

SEQ ID NO: 141853 - DNA, 1050 bp, Zea Mays
accctacactgtctgtcctgtcaccaactcaccagtcaccactcaccaccaccccgctctttgctgcttcgcgctgtggagctcaacggcggacggacggccatgtcgtcgtcgtcgtcgccacgccacccttgcttcggcgccgccctcccggagcgcctcggctacgtgcagtgcaaattctgcgccaccatcctgctggtgggcgtgccgatcggcggcagcctgcagctgctgaagacggtggccgtgcagtgcggaagctgctgcggcatcctctccgtcgcgctgccgcccgacgaggcgccggcgccggcgtccgtcgagctgcttcccctgatgcaggaggccggcggcgttgatccgccgcccagggactccgacgagagcagcggagaggaccggggggagacaacggaggctgctaccgttgccgacaaccatgccgccttccctgcggttaacaaacctccacttaggaagcaacggacgccgtcggcctacaattgcttcatcaaggaggagatacagaggattaaggcaagagacccgggcatcacccacaaggaggccttcagcgctgcttctaagaattgggctcacttacctaggatccagaagacgggaggctgatggatctgctgctgctgcacgcggtttccagatttgcacgctgcaaagagagggaaacagattacctgcgacctgatccacgttgttagcttcagatgagataaatccatggatttcaatgttgtacataaacctttggcacgtggtgtggtgactgaaattacaatcatgcgataaatgcagcattgtttccagatcttatcagttgcggtactgacacaactaggatagcaccaaacctgattaatacagtaagcatgactgctgcttgatgataaatagtaaaaaatggttctccggaattggcagatatattaataaaaactttgcctgaccagatgtagcggtaaagcgatttaattagcatacataactctgttgcttttctcttcagcacaaacaggaaaagaaaaaaaa

SEQ ID NO: 141854 - DNA, 798 bp, Zea Mays
gtgcatttcattagggacggatccatcgttgtatccggaagccatgacgggagctgcaagatctgggacgccaagagcggggcttgcctcaagacggtcatcgatgaaaagaagcccgcagtgtccttctccatgttctcgcccaatggcaagtttatcctcgttgccatgctcgataactcactgaagctatgcaattttgccaccggcaagttcttgaaggtatacagtggacatgtgaacagacaatactgcatacagtccgcgttttctgttacgaatggaaaatacattgtcagtggatcagaagacaactgcgtgtacatatgggacctccaagggagaaatatccttcagaaattagaaggccatacggacactgtcatctcggtgtcctgccatccaacagagaacaagattgcttctggtggccttcataatgataggactgtaagattatgggttcaagatagctgatcaacttgcaggtgtggactacgctcataaacagcacttgcctatcaatgagaaaatatgtctgcttcccatggatatggatcgctattccagatacgtttacaacttacacaaagacattaaccatgcgagctttgttttaatctgatgtgttatcctaagttgtgaatgctgaataaatcaacatctagtcatctctaataatgttgtgatatgttatgcccaacggctgtattccaatcaatattgatttattttgcaaagttcgccactttaagatgcaagatactttgtttttagctgtctagaaggcagtcactt

SEQ ID NO: 141855 - DNA, 947 bp, Zea Mays
gtgcatttcattagggacggatccatcgttgtatccggaagccatgacgggagctgcaagatctgggacgccaagagcggggcttgcctcaagacggtcatcgatgaaaagaagcccgcagtgtccttctccatgttctcgcccaatggcaagtttatcctcgttgccatgctcgataactcactgaagctatgcaattttgccaccggcaagttcttgaaggtatacagtggacatgtgaacagacaatactgcatacagtccgcgttttctgttacgaatggaaagtacattgtcagtggatcagaagacaactgcgtgtacatatgggacctccaagggagaaatgtccttcagaaattagaaggccatacggacactgtcatctcggtgtcctgccatccaacagagaacaagattgcttctggtggccttcataatgataggactgtaagattatgggttcaagatagctgatcaacttgtaggtgtctgcttcccatggagatggactgtaagactacgctcagaccagacctaaacagcacttgctatggatatggatcgctattctagatacgtttacaacttacacgcaaaaaagacattaaccatgcgagctttgttttattttgatgtgttatcctaagttgtgaatgccgaataaatcaacatctcgtcatctctaataatgttgtgatatgttatgcctaacggctgtattccaatcaatattgatttattttgcaaagttggccactgtaagatgcaagatactttgctgttagttgtctagaagacatgtcgcttagattacttgtttgctgatgtcagtagataggtatttctgccaaaagcacaagagtagttttgacagctatttgtatctttgtaaatggttcttatctgtcaccatacactatggcagagagtagtatttatcacca

SEQ ID NO: 141856 - DNA, 1634 bp, Zea Mays
gatgcgacgctcctcggagagcagcgcctcctcctgcgcggtcttcttcggcgcgagggcgggcgggacggagggcgccgaggaggaggcggcggcggaggagctagggttagggttcgccgccgccgtctgagctgcggcgtcgaggttgctggggtcggaaccggtagcagctgcggcggaattcgcggagggcgccgacgtgccggccttggcgaggagctggcggtgctcgtcgcggcgcttctggagctgcttctgctccagctccgaccgccgcacgaagctcttgcccccgaagtcggccgtcgccgccttccgcttcttctccagttcccgcttcagcagatccattacgcccgccgcccagttcggcttcgattctccgagaggcggtgcggcgtgccggtgctgcggatacctgccgtgtagcgtatttgaccgttcctgcggtgttttgggcagacttatatgcaaggtgcaagtccgttagatatagataaccatcatcaaggtgccggaatacagttagatcgatctaacggatagagctgactgcttgcatatgcgctagtacaaatagagcgccgcagtgaatccggcccaattcactttcccatcgcgtgaagaggttgccgttaccgaccatgtcgcagcagccggcgccggcgccgccatatcggccgtataggcaggtgagggaggcgacgccccatagccgggcgatctcctgcgtgcggttctccccctgcgggcgcctcctcgcgacagcctccctcgacggaacggtagcgctgctctccccgtcctcactggccgtaatcgccgtcctgcgcggccactctgacggcgtttccgacctgtcctggtccacggagtcgttctacctctgctccgcctccgacgaccgcaccatccgcatctgggacatccggcccgtcctcgccggtggcgcccaggcagccgccgtctccggcgcagaccgctgcgtccgcgtgctcaaggggcacaccaacttcgtgttcagcgctaacttcaacccgcagaccagctcgcagatcgcttccggaggatttgattgtaccgtgcgcatatgggacgccacgagcggccggtgcacccgcgccatcgaagcgcactctgagcccgtcacctccgtgcatttcattagggacggatccatcgttgtatccggaagccatgacgggagctgcaagatctgggacgccaagagcggggcttgcctcaagacggtcatcgatgaaaagaagcccgcggtgtccttctccatgttctcgcccaatggcaagtttatcctcgttgccatgctcgataactcactggtatgaccaactagctcgttgttgattcataatagtactcatttatgttctgaactttgttgttcgttgcgttcattatgaaattcgtttttcgaccgttgtagagaaaataatactcatctaatgatcaacttctcgtacagtataaagtctttgtgatgagaaaatatctagatttagccataatcatagttcacaagaagatcatagatatagttcacaagaagatcatagatatgtctttcctcacgcactatcaactgcagattactcctaatcatttaggatggg

SEQ ID NO: 141857 - DNA, 2101 bp, Zea Mays
gatgcgacgctcctcggagagcagcgcctcctcctgcgcggtcttcttcggcgcgagggcgggcgggacggagggcgccgaggaggaggcggcggcggaggagctagggttagggttcgccgccgccgtctgagctgcggcgtcgaggttgctggggtcggaaccggtagcagctgcggcggaattcgcggagggcgccgacgtgccggccttggcgaggagctggcggtgctcgtcgcggcgcttctggagctgcttctgctccagctccgaccgccgcacgaagctcttgcccccgaagtcggccgtcgccgccttccgcttcttctccagttcccgcttcagcagatccattacgcccgccgcccagttcggcttcgattctccgagaggcggtgcggcgtgccggtgctgcggatacctgccgtgtagcgtatttgaccgttcctgcggtgttttgggcagacttatatgcaaggtgcaagtccgttagatatagataaccatcatcaaggtgccggaatacagttagatcgatctaacggatagagctgactgcttgcatatgcgctagtacaaatagagcgccgcagtgaatccggcccaattcactttcccatcgcgtgaagaggttgccgttaccgaccatgtcgcagcagccggcgccggcgccgccatatcggccgtataggcaggtgagggaggcgacgccccatagccgggcgatctcctgcgtgcggttctccccctgcgggcgcctcctcgcgacagcctccctcgacggaacggtagcgctgctctccccgtcctcactggccgtaatcgccgtcctgcgcggccactctgacggcgtttccgacctgtcctggtccacggagtcgttctacctctgctccgcctccgacgaccgcaccatccgcatctgggacatccggcccgtcctcgccggtggcgcccaggcagccgccgtctccggcgcagaccgctgcgtccgcgtgctcaaggggcacaccaacttcgtgttcagcgctaacttcaacccgcagaccagctcgcagatcgcttccggaggatttgattgtaccgtgcgcatatgggacgccacgagcggccggtgcacccgcgccatcgaagcgcactctgagcccgtcacctccgtgcatttcattagggacggatccatcgttgtatccggaagccatgacgggagctgcaagatctgggacgccaagagcggggcttgcctcaagacggtcatcgatgaaaagaagcccgcggtgtccttctccatgttctcgcccaatggcaagtttatcctcgttgccatgctcgataactcactgctatgcaattttgccaccggcaagttcttgaaggtatacagtggacatgtgaacagacaatactgcatacagtccgcgttttctgttacgaatggaaagtacattgtcagtggatcagaagacaactgcgtgtacatatgggacctccaagggagaaatgtccttcagaaattagaaggccatacggacactgtcatctcggtgtcctgccatccaacagagaacaagattgcttctggtggccttcataatgataggactgtaagattatgggttcaagatagctgatcaacttgtaggtgtctgcttcccatggagatggactgtaagactacgctcagaccagacctaaacagcacttgctatggatatggatcgctattctagatacgtttacaacttacacgcaaaaaagacattaaccatgcgagctttgttttattttgatgtgttatcctaagttgtgaatgccgaataaatcaacatctcgtcatctctaataatgttgtgatatgttatgcctaacggctgtattccaatcaatattgatttattttgcaaagttggccactgtaagatgcaagatactttgctgttagttgtctagaagacatgtcgcttagattacttgtttgctgatgtcagtagataggtatttctgccaaaagcacaagagtagttttgacagctatttgtatctttgtaaatggttcttatctgtcaccatacactatggcagagagtagtatttatcacca

SEQ ID NO: 141858 - DNA, 2104 bp, Zea Mays
gatgcgacgctcctcggagagcagcgcctcctcctgcgcggtcttcttcggcgcgagggcgggcgggacggagggcgccgaggaggaggcggcggcggaggagctagggttagggttcgccgccgccgtctgagctgcggcgtcgaggttgctggggtcggaaccggtagcagctgcggcggaattcgcggagggcgccgacgtgccggccttggcgaggagctggcggtgctcgtcgcggcgcttctggagctgcttctgctccagctccgaccgccgcacgaagctcttgcccccgaagtcggccgtcgccgccttccgcttcttctccagttcccgcttcagcagatccattacgcccgccgcccagttcggcttcgattctccgagaggcggtgcggcgtgccggtgctgcggatacctgccgtgtagcgtatttgaccgttcctgcggtgttttgggcagacttatatgcaaggtgcaagtccgttagatatagataaccatcatcaaggtgccggaatacagttagatcgatctaacggatagagctgactgcttgcatatgcgctagtacaaatagagcgccgcagtgaatccggcccaattcactttcccatcgcgtgaagaggttgccgttaccgaccatgtcgcagcagccggcgccggcgccgccatatcggccgtataggcaggtgagggaggcgacgccccatagccgggcgatctcctgcgtgcggttctccccctgcgggcgcctcctcgcgacagcctccctcgacggaacggtagcgctgctctccccgtcctcactggccgtaatcgccgtcctgcgcggccactctgacggcgtttccgacctgtcctggtccacggagtcgttctacctctgctccgcctccgacgaccgcaccatccgcatctgggacatccggcccgtcctcgccggtggcgcccaggcagccgccgtctccggcgcagaccgctgcgtccgcgtgctcaaggggcacaccaacttcgtgttcagcgctaacttcaacccgcagaccagctcgcagatcgcttccggaggatttgattgtaccgtgcgcatatgggacgccacgagcggccggtgcacccgcgccatcgaagcgcactctgagcccgtcacctccgtgcatttcattagggacggatccatcgttgtatccggaagccatgacgggagctgcaagatctgggacgccaagagcggggcttgcctcaagacggtcatcgatgaaaagaagcccgcggtgtccttctccatgttctcgcccaatggcaagtttatcctcgttgccatgctcgataactcactgaagctatgcaattttgccaccggcaagttcttgaaggtatacagtggacatgtgaacagacaatactgcatacagtccgcgttttctgttacgaatggaaagtacattgtcagtggatcagaagacaactgcgtgtacatatgggacctccaagggagaaatgtccttcagaaattagaaggccatacggacactgtcatctcggtgtcctgccatccaacagagaacaagattgcttctggtggccttcataatgataggactgtaagattatgggttcaagatagctgatcaacttgtaggtgtctgcttcccatggagatggactgtaagactacgctcagaccagacctaaacagcacttgctatggatatggatcgctattctagatacgtttacaacttacacgcaaaaaagacattaaccatgcgagctttgttttattttgatgtgttatcctaagttgtgaatgccgaataaatcaacatctcgtcatctctaataatgttgtgatatgttatgcctaacggctgtattccaatcaatattgatttattttgcaaagttggccactgtaagatgcaagatactttgctgttagttgtctagaagacatgtcgcttagattacttgtttgctgatgtcagtagataggtatttctgccaaaagcacaagagtagttttgacagctatttgtatctttgtaaatggttcttatctgtcaccatacactatggcagagagtagtatttatcacca

SEQ ID NO: 141859 - DNA, 2075 bp, Zea Mays
gaaacgtttccctaaaacacgggggcgcacgggggtgtcacgatctcccccgggagaagcggatcttgcggagctctcatgtccgccgggagggcgacctgtcagtgattggacagtgcagctgcacctcgtcccggcagcatgctgcccgcgtccgcgtcttttctgctgcccacattccccaacgccgcgcccgtaccgtgtaccggtggtggtcgccctcccctcctcgtcctcccagcttgtcctcttctttccaccagcttgcttttggtcgctccaacgccgccgctacgtgctaaaccatgggggaaagggaagggtgagaggctagtgctgagccgcgcctgctagcgggactagtttactgctgctgagggaacaccctgttgtggagcaggtgagtgagctccttttagtcggggtcaggtgaactcacaggcaaaacggccgcccattggattggcgcctgtccgcctcttcccctttcgttgtgcctattcgttggcgtgcactacccgtctggtcatttcgtcctccgttgggcttgtgctgctgcctgctagtggttctcgatttctcctgggaaaagttttcaggtagaacacgcgtacatttggcaaatcggcaggtgttatcttgtgatatcgtctgcaaagatgagattgtgatggatcctatccaagattgcttcggtccctggaggatttaggagtcctagaatccaaatgcagaaaccagtctcctgacagaaaaaaggacagttgcgcacgtggtgttcgtcaaaaagccgcaccgcactgagggagtcgcagcttgcgaccatcagaatcgtcacaatgagagattttgcatcttgcctaaaccaaagtgccgtccaggttgcgcattcctcttcctcaagtgggcagaacttcgtgcagtctgcgtacgtggcacgcctgcgtgacaagccttgcgtggtcaccgtcacttggagcaaggtggccatggggcaggctttcgccattgccatccatgactactccaaccgttgcctctgcaaggcagaggtgaagccctggctgttctccaagaggaagggttccaaggtcatggaattggatagtggcaatgtggagatcatctgggacctgtcagctgcaaagttcgcagcagggccagagccactcgaaggcttccatgttgctctgctctatggtcttgaagttgtccttgttttaggtaacctaagcaaggaggaggatcaccgggttttgtcagatgcttctcattgtgatgcagtcatgatagctaggaaagagcacatttatgcgaagaagatgtattccgcgaaagctcgatttttggacattggtcagattcatcacatctccatagagtgtgacatggcaggggtgagggatccctgcctagagattaggatcgacaagaagaaagtgttgcacttgaagaggctggcatggaaattcagagggaaccagactatttatgtcgatggacttccagtggaggtgctatgggatgtgcatgactggctatttggttccacaaatggatgcgctgtatttttgtttcaatcaggccagtccatggaaaaaatcttgttcagaacatgctcacagaatgaaaaggaggctgaagcacatcgtcttggtttcacattgatattaaaagcgtggaagactgagtaagcactaggctgaaacgtgatggcaggtttcttcaaccactctgctcttaatgttgaattagtaagagtaggaatctaggatctagcaagtgtaacaagatccttggcaagaattctgtgcttgttacatatgctgtcctagcggtagttgagattttgaatatgcatatgatctttgatatatcatcaaagctagttagataggatgtgggactctggtgctcaggtcatttgacataatgtctcacaatttatactttttgatgggaagttcaggatagaatattgaaaatgatgtctacacttctgatgtctttgcaattgttatgccacgactcacgtgtttaaaattacactcggtacatatggcattaaattgagc

SEQ ID NO: 141860 - DNA, 2068 bp, Zea Mays
gaaacgtttccctaaaacacgggggcgcacgggggtgtcacgatctcccccgggagaagcggatcttgcggagctctcatgtccgccgggagggcgacctgtcagtgattggacagtgcagctgcacctcgtcccggcagcatgctgcccgcgtccgcgtcttttctgctgcccacattccccaacgccgcgcccgtaccgtgtaccggtggtggtcgccctcccctcctcgtcctcccagcttgtcctcttctttccaccagcttgcttttggtcgctccaacgccgccgctacgtgctaaaccatgggggaaagggaagggtgagaggctagtgctgagccgcgcctgctagcgggactagtttactgctgctgagggaacaccctgttgtggagcaggtgagtgagctccttttagtcggggtcaggtgaactcacaggcaaaacggccgcccattggattggcgcctgtccgcctcttcccctttcgttgtgcctattcgttggcgtgcactacccgtctggtcatttcgtcctccgttgggcttgtgctgctgcctgctagtggttctcgatttctcctgggaaaaggtagaacacgcgtacatttggcaaatcggcaggtgttatcttgtgatatcgtctgcaaagatgagattgtgatggatcctatccaagattgcttcggtccctggaggatttaggagtcctagaatccaaatgcagaaaccagtctcctgacagaaaaaaggacagttgcgcacgtggtgttcgtcaaaaagccgcaccgcactgagggagtcgcagcttgcgaccatcagaatcgtcacaatgagagattttgcatcttgcctaaaccaaagtgccgtccaggttgcgcattcctcttcctcaagtgggcagaacttcgtgcagtctgcgtacgtggcacgcctgcgtgacaagccttgcgtggtcaccgtcacttggagcaaggtggccatggggcaggctttcgccattgccatccatgactactccaaccgttgcctctgcaaggcagaggtgaagccctggctgttctccaagaggaagggttccaaggtcatggaattggatagtggcaatgtggagatcatctgggacctgtcagctgcaaagttcgcagcagggccagagccactcgaaggcttccatgttgctctgctctatggtcttgaagttgtccttgttttaggtaacctaagcaaggaggaggatcaccgggttttgtcagatgcttctcattgtgatgcagtcatgatagctaggaaagagcacatttatgcgaagaagatgtattccgcgaaagctcgatttttggacattggtcagattcatcacatctccatagagtgtgacatggcaggggtgagggatccctgcctagagattaggatcgacaagaagaaagtgttgcacttgaagaggctggcatggaaattcagagggaaccagactatttatgtcgatggacttccagtggaggtgctatgggatgtgcatgactggctatttggttccacaaatggatgcgctgtatttttgtttcaatcaggccagtccatggaaaaaatcttgttcagaacatgctcacagaatgaaaaggaggctgaagcacatcgtcttggtttcacattgatattaaaagcgtggaagactgagtaagcactaggctgaaacgtgatggcaggtttcttcaaccactctgctcttaatgttgaattagtaagagtaggaatctaggatctagcaagtgtaacaagatccttggcaagaattctgtgcttgttacatatgctgtcctagcggtagttgagattttgaatatgcatatgatctttgatatatcatcaaagctagttagataggatgtgggactctggtgctcaggtcatttgacataatgtctcacaatttatactttttgatgggaagttcaggatagaatattgaaaatgatgtctacacttctgatgtctttgcaattgttatgccacgactcacgtgtttaaaattacactcggtacatatggcattaaattgagc

SEQ ID NO: 141861 - DNA, 830 bp, Zea Mays
agggaatgaaggaacagtgcaagtaaagctgcggtgcggacttgagatcgagtgacttcacccggccggcgtccgcgcaccaagcaagctaaacaacaaccacagcaggccgccgcccggccggccatggcggcgtggatgcggtcgctcttctcgccgctcaagaagctctggatccgcatgcattccgcgcacagcaagagaaggggcatctacatcctgtacgaggacgtcaagtcgtgcccctgcgaggacgtgcacatcctctggtccatcctcgtcgactcgtcccactcccgcccgccgccgatgcgcctagaccatcactgactcgctcgtccctccggccgccgcgcccacgccgttgagcaaggcgactgattggtccgagttcgaccgacacaatgaaactgtcggtgtgtgcacatacataaagatgacgaccacgaccagtgccggcggccggtatagttcaccttcttcagccgtgatacacgtgtggtctttatttgatccacggacacggagatggtgtgcgtcgtaggtgatgagctcctccgttcatcctgcgctgccgcctcttccgtcctccagaagagcaggtgcagtgcagagcaggcgtccctctccctcaccgacactgcggagcggttttttcttccttttcctttctccttcttcgctttgtttttggaaaaggaacggcacggtctgccggtctggtgtggtgatcaggggtcaatgggccgcgtgtgcatctgtctagcttgtaaatacaaaagacaaagagccaaagaaaaatatatatatatatatgatgtgtatatata

SEQ ID NO: 141862 - DNA, 1427 bp, Zea Mays
aggcgatctagagattcgtcattccatttatggattcccagttgttgaactttgagttagacaatgaacctggagacagagaatcgtcttgcttctttgctaattgaagaggcgcggagattgcagttagaggctgacagggaaggtgttcatgcatatcttcgaaaacctaatgttaggcatcgtccaaattcaaggtttctcacagccacagttcgtggagttcagcaagcaaaccgtgttgtggaggttaatgaaatgtggcgtgccagggcaaaggaactggagttggagtcaaagatgaaaagcaaaaatagcagaagtaacaatcgtgatgattttagaggagagaagcccaaaagtgatttgagaaatcatagctctggctcaaggtttgaacaagaagggaccacttatagtaattcttactcagaacgggaggatggtctcagtgatgatgagattgaaagatttcttcattcaagggcgaaacgaggacgtggggctgttggttctaggatggacgagcctggtccatatcttgattctttgtcccgacatcaggacaacggacctagtcctgacatacgtgtggaagaaaaatgggaacgccaagtacaaggtccagagaagccttcatttttgagatccaagtctcctgatagtcattggcataaggatacttcggatggaagggcatcaagctctgaaccactgagtaaaaaagagaagaaaaagaagtcggagaaaaaagataagagagacaaaaggaaggaaaaggacaggaagaaacacaaacatcgccatcaccgcaatcacaaaagccgaagacgggagtgaattgagtgatgttagctggtagctaggggtgtaggggtggtaatggatcacgatccaaatgttttttacattaagttagggtccttaattaattttagtttaaaagtgaatataaatagagtttgattttaatccaattcgattcttcaattttatagtgtaaaatttagagttcattaccacctttactggtaatagaacagaaaaatgtgcgcaacggttgtgccctaaaacgagctagcagattgtgctctgtaacttgaaacatgcattgtatggaaatctcgatattgtgtagcaatggagtatggttcttacaatacattgttgttgtgaagttgtgatgtcataaagtttgttgaagttttgtcactttgaagtagcatggttaacatctcaagaattgttgattttttccccttttgttgattgatcatctgagcctgctcttcaagcacgtgaatttgttagttggggtttataacagaataaccctgcgtagacagatcactgcacattttatgtgatcatcgtttggttacggagttgcttatcaggttccattggacgtatcataacagttgtct

SEQ ID NO: 141863 - DNA, 1333 bp, Zea Mays
ccacaccatgtgtgtgcccagattcccctaaataggtgtctcgcctctggcatcagtcccctcttccccttccttctcctcggtccctatccgctgctgcgaacagcagaagctgcggcacggaggtgcgctcttcccggcggtggagttgcagctgcagggggaagaagcgagctagagctgcagggatgataagcgccaagtccaacgccgccgtgtacccgtgcccggagtatgcggaggtcgaccccaccggccggtacggacggttcagcgacgttcttggcaagggcgcgtccaagattgtgtacaaggcgttcgacgagtaccaggggatggaagtggcgtggaaccaggtgaagctgcacgacttcctgcagagccccgaggacctggagcggctctactgcgagatccacctcctcaagacgctcaagcaccgcaacatcatgaagttctacacctcctgggtcgacgtctcccgccgcaacatcaacttcatcactgagatgttcacctccggcaccctccgccagtacaggcagaaacaccggagggtgaacatgtgggcggtgaagcactggtgccggcaaatcctcagcggcctgctgtacctccacagccacaatccgcccatcatccaccgggacctcaagtgtgacaacatcttcgtgaacggcaaccagggcgaggtcaagattggcgacctcggcctcgccgccatcctccgcaagtcccacgctgtccactgcgtgggtacaccggagttcatggcaccggaggtgtatgaagaggagtacaacgagctggtggacatctactcgtttggaatgtgcgtgctcgagatggtcacctttgagtacccgtacagcgagtgtacgcacccggtccagatctacaagaaagtgatctctggtactaagccagaagctctgtacaaggtgaaagatccaatgctgaggcgctttgtcgagaagtgcctagtatcgtcatctcagagactgtcagcaagagaactgcttgaggatcccttcctacagggcgatgacgtggctgtttctttggatggtggagattatcatgtaccgaccaagtacgtacggcagccttcatatctagggcatacctatagcaatggctccatggtgagtaatggattctcagaaagcatggatgaggacgctctgagtgaagactgcgaggatgatgacatgaaaggccaagatggcattgacctgttcaacgagaatgaggatgaacctcttggcaatgtggacataacaatcaaagggagaaagagtgaggatggaggcatacgaatctctagattccg

SEQ ID NO: 141864 - DNA, 129 bp, Zea Mays
ggttcggtaggaacggccaaagatggttaacaggaaacgtagcaagtgtagtgaccttgtttgcaagagaaagaaaatgttacactgctttttattttatatagggtaccttaagagggaaatattgtc

SEQ ID NO: 141865 - DNA, 2131 bp, Zea Mays
ttgagcacaccaccatttgtatatgtataaaccagagatcgccggacatgttgccatggcgccgctcgatcggacattattattattattcttattattgtcgctggatccaacagcttcccggcctgctaatctacataaatcgcttagacagttgggtgtgtactgttttcagcatctctcacaaaaaaaagtctccggttcgacctcctgcctctgctgctcgcatggccagcctcgtgcaccaggcgtccatgccggcgatggcgccgccgccgccgccgtgcgacgacgagttagtcccgcagggcttcagctgcttcggccgctcgctgtcgcgggcgtcgtcgtcgagccgcctggagtacagggcgctgcagggcgaggagaagcgtaacgccgcgcaggacgcgcggtcggcgcgcgccaagctgcgctggaaggcggtggcgcacgagctcatggccaagggcggcggcggcggcggcggcggcgcgcggcggaggaagcagcagctgggggccttcagctacgactcccggagctacgcgctcaacttcgaccagggcgccgacgagtagcagcagcgtgctgagctcgctagctgctgcgggcggcgggcctgctcctgcttgcggccggctgaccctacgcgcggtgcggatcggagcccgaaacagcgggggttgcacgtgcgtgcggtgcgacccgaaggagcagccacgagtgaccgcccagcgagggaacaatggcgatctaatctactacccaaggaagaagcatgggttttactgtgtaaagatctactgctccgtagtagaaatcaagtccggtcattattgctcttttcttttcttttctttttttcattcagatggcacgaccatgtttgggcgattcgtcatggaatgttcgcctcctcagagcagtttcatcaaatgttcaaatgtgagccaggttgcttcaaggacaaaatgaacttgtttctatgaacaacacataaatattgaaatattaattaatcagacggaaattgagattaactaacgaggtcttcaaatatgcctagctgttacagcaccttggaaaatgagcatgcaacttgcgccttgaaaaaactaaccattcacatagccagtgacatccttcttaccagtcgaacatgtcagctttgccttaattattagtggttttttttctcagttttgcccttttgttctatagcactggaggggtaaaactgagaaaaaaaacacgactaaaggtaaaactgagcacacaaccaaaatcgagggcagcaccataaaaaacccaaaatttggcatcgatcttgatcaatgttaattgggtttaaatctagaattctgctcagtacaagcaaatcatctaaatggagagactcttgagctttggccacgagctttacgacatcagcaacaaaccaaacaaaaggacacttcgtgagagaacacgtcggtggctcggtgccagcatcgacggagccccaccagacaccgcagtaccgcaccgcactgcccatggacgcacacgcacgcctcccggcgcgcccaccccgcccgcgtgcgcgtgcgcgtgcccctgtccgcctcccgtttgccgcctccaccgcaacgcggcgcgcggggtggtggtgccctcgcgatcctcgtgtcgatcccagcggcaggggtgcctgtgcctttgcttctcctggccgttgcccgcgcctcgcggtcgcgcacctgaaccggagccccgcgtcaaatctagggttgcatccgcgccgccccctcctcccgagactcccagcggctggaaccagaacgagggtgacaggcgacgaaagctgcgagggacgccccctcgtcgaatgcactggcgaccgttccgtcgaggagcagccggagcacgcaggaggttagtttaggcacgtatcgcctctgacccccctcttttcccattagacggttcgatccaatgtgattgctgctggctgatcgggttacgcggatgcgtgtaaattgagcggaattcacgttttaatcccatttctacggagtagtagaaccccataatcctattcgtattcgcttcagttggtgacgaatgcttactatgggtttctatctct

SEQ ID NO: 141866 - DNA, 1342 bp, Zea Mays
gacggagccccaccagacaccgcagtaccgcaccgcactgcccatggacgcacacgcacgcctcccggcgcgcccaccccgcccgcgtgcgcgtgcgcgtgcccctgtccgcctcccgtttgccgcctccaccgcaacgcggcgcgcggggtggtggtgccctcgcgatcctcgtgtcgatcccagcggcaggggtgcctgtgcctttgcttctcctggccgttgcccgcgcctcgcggtcgcgcacctgaaccggagccccgcgtcaaatctagggttgcatccgcgccgccccctcctcccgagactcccagcggctggaaccagaacgagggtgacaggcgacgaaagctgcgagggacgccccctcgtcgaatgcactggcgaccgttccgtcgaggagcagccggagcacgcaggagttgagggaaaagctttgaaaatgtcatccaccgtgccgaagtcatcaaatatcttctggcatgattgtccagttggcaagactgatcgccagaagctactcaagcagaaaggttgtgttgtctggattacaggccttagtggttcaggtaaaagtaccttggcatgtacattaggccgtgagctccacacaagagggaagcttgcatatgtccttgacggtgataacttaagacatggtctgaacaaggatcttggcttcaaagctgaagaccgtgctgaaaatataaggagagttggtgaagtagcaaagttatttgcagatgcgggccttgtatgtattgcaagtttgatatctccatataggagagaccgtgaatcttgccgtgcattgttgtctgatagtagcttcattgaagttttcttgaacatgtccttggaattatgtgaagcaagagatccaaagggcctctataagcttgctcgtgcaggaaaaataaagggttttacaggaatagatgacccttatgaagcaccactgaattgtgagattgagatcaaagaggtagatggtgtatgccctccgcctgctgagatggcagggcaagttgttacttaccttgaggagaaaggcttcctgcacgagtaggctgaatccaagcaacatctggggaagatttcagtaagactagcgcagaataagtcaaaggcgctggcagttacggtatagcagttgcatagattggcctcaatgccttagtattttctttccgtacttcctctgccacaggctccatgcaatttcattcagatgagcctggatggttcctaatttctttgacctctagagtagattacttgtaatgcaactctgataaccacttggggcagtatcgatgtggcaatcgcaatcctcacggca

SEQ ID NO: 141867 - DNA, 2187 bp, Zea Mays
tcaacctctccttcccgaagcaaccccaccgttccacccccttttctgccttcctttccccgtgcaacaaacgcaaacgcgacctaacgaatcgaatcaaattcgccgtccacctcgtcggcgtcggcgcaccggcctcgagcccagccccccgtccgagtccgatcagccaccagagatgcagcacgggagcggcgactacgcctcctccgccccctccggccactactaccagcaccagtacgcggcccccggctcgaacccctatccaatcgccacggacgccacggcgccgggggcagtgtcggggggctacgcccccgcgccgtcctactctctcggcggcggctaccctgaccagccgccctccgccccggtctactcgcaggcaccctctgccccggcctactcgcaggcaccctccgctccggcctacacgcagccgccgccccagccccagcacgcccccggatactcgccttacaacaccaatctcaacacctacccgacagaggcgtattatacctacacgccgccgtccacccagaccgcggccccaccgcctgcggaggccaactccccggcgctgccctacgacgccccgtactacgggggtgggtaccagccgccggccgcggggtacgacaacgatgattacctgaacgagggtgcctacgcttacagcgccggcggtggctcggagccgtacggggcgcgcggcacggcccctgcgcggtcgggatccgcgctgtttgatgactatgggcggtctatcagtgccccatctgatgactatgggcggtcgatcagtgccccatctggatgggaggagcagcagccgtggggcagtggcggcggtggcggaggtagtgggagctatggggtgatcgcaaaggcccttccaaaggcggaaacgcgtgaggatgcgagtggtggtgcacagaagtttcgggttaagctgctgccagagggtgctgggaactctactgacgtgctttgccagattggtctagatggaattcgcatgcttgatccgagtacaagcaggaccctgaggatttatccactcgattcactgacaagatgggaggttttggatgcaactatatttgcattctgggcgaagacatcagtggatattgaaccaaagagaattaggctgaagtcaagcagttatacttcaaatactatgcttgacactgtaacagcagcaacagtgcagtttaaggagataggtgcagatgcaagaagcagaggagcaatagaaactggcaaacccttggtacaatcaaatgagaaaaagaaaggttttgattggatgtttacaaaacctgttgatgaagtgaaagaccattgggtcccagatgaggttgccaagaaatgccactcgtgcgctgttgattttagccctttcaatcgcaggcatcattgtcggaactgtggtgaaatcttttgtgacaaatgcagccagggaaggattgctctgacggctgaggataatgctccacttgtccgagtttgtgatagatgcatggctgaggtcactcaaaggcttagcattgctaaggatgttgccaacagatctgcaactgttcaaagtcatgaagatcttgcaagaaaactgaaggaggaaatggagaaaaaccgcaagtcatcagcatctggtggtggtgcgcctggtaccagaatgagggaagtcgcgtgccctacctgcacagtccatcttcaggttcaggttcccacatctggctcagagacagtggagtgtggagtgtgccagcatgccttccttgtcagcgccaattgatacaccggggagaagatgcatatgctaaagaaattattctgttgacgattattcctttttttattatgctgtatacataataggtgtgtgttctgtcaggccgtacatgtttccttgattgtgttggtgatcacggttaggatatgttacttttttccctgtacatgggtggattccaattcgggagtattgcggtgctgggtgtatgcacagaatattataccattagattatacttggtagagattgaagactatgctcacgcacgcgtgtcacgtccgcattatgcatgcttgaagttttatcatgcttcttctttagtagtacctttgtgccccttcaaagccaaaaaggggctctcttttgaagcaaatttcgta

SEQ ID NO: 141868 - DNA, 1823 bp, Zea Mays
caaattcgccgtccacctcgtcggcgtcggcgcaccggcctcgagcccagccccccgtccgagtccgatcagccaccagagatgcagcacgggagcggcgactacgcctcctccgccccctccggccactactaccagcaccagtacgcggcccccggctcgaacccctatccaatcgccacggacgccacggcgccgggggcagtgtcggggggctacgcccccgcgccgtcctactctctcggcggcggctaccctgaccagccgccctccgccccggtctactcgcaggcaccctctgccccggcctacgcttacagcgccggcggtggctcggagccgtacggggcgcgcggcacggcccctgcgcggtcgggatccgcgctgtttgatgactatgggcggtctatcagtgccccatctgatgactatgggcggtcgatcagtgccccatctggatgggaggagcagcagccgtggggcagtggcggcggtggcggaggtagtgggagctatggggtgatcgcaaaggcccttccaaaggcggaaacgcgtgaggatgcgagtggtggtgcacagaagtttcgggttaagctgctgccagagggtgctgggaactctactgacgtgctttgccagattggtctagatggaattcgcatgcttgatccgagtacaagcaggaccctgaggatttatccactcgattcactgacaagatgggaggttttggatgcaactatatttgcattctgggcgaagacatcagtggatattgaaccaaagagaattaggctgaagtcaagcagttatacttcaaatactatgcttgacactgtaacagcagcaacagtgcagtttaaggagataggtgcagatgcaagaagcagaggagcaatagaaactggcaaacccttggtacaatcaaatgagaaaaagaaaggttttgattggatgtttacaaaacctgttgatgaagtgaaagaccattgggtcccagatgaggttgccaagaaatgccactcgtgcgctgttgattttagccctttcaatcgcaggcatcattgtcggaactgtggtgaaatcttttgtgacaaatgcagccagggaaggattgctctgacggctgaggataatgctccacttgtccgagtttgtgatagatgcatggctgaggtcactcaaaggcttagcattgctaaggatgttgccaacagatctgcaactgttcaaagtcatgaagatcttgcaagaaaactgaaggaggaaatggagaaaaaccgcaagtcatcagcatctggtggtggtgcgcctggtaccagaatgagggaagtcgcgtgccctacctgcacagtccatcttcaggttcaggttcccacatctggctcagagacagtggagtgtggagtgtgccagcatgccttccttgtcagcgccaattgatacaccggggagaagatgcatatgctaaagaaattattctgttgacgattattcctttttttattatgctgtatacataataggtgtgtgttctgtcaggccgtacatgtttccttgattgtgttggtgatcacggttaggatatgttacttttttccctgtacatgggtggattccaattcgggagtattgcggtgctgggtgtatgcacagaatattataccattagattatacttggtagagattgaagactatgctcacgcacgcgtgtcacgtccgcattatgcatgcttgaagttttatcatgcttcttctttagtagtacctttgtgccccttcaaagccaaaaaggggctctcttttgaagcaaatttcgta

SEQ ID NO: 141869 - DNA, 1823 bp, Zea Mays; identical to SEQ ID NO: 141868

SEQ ID NO: 141870 - DNA, 1802 bp, Zea Mays
cgggagcgagcggcgcgccagccaaagcaaagcaaaaacgacacaccaacgggcggatttttaagtccgccttcccccgtctcctctcctctctgtctccctcgtgccctcgccctccttttttttagtttacccgccgtcccgcgcgccgccgtttcggttgctcggctagagggactagggagtgccagcgagtccatggcagcggcgagggcgtgcatcgtcgcgctggcgctggtggcggcgctcttcgtggccggatcggcggcggcagcggcggggaatgccggaggccggccgcagctgtcgctcaggcagcggcgccggcagctgctgcggcagcggcaggtgcgcagccacctcaagaggctcaacaaggcgccgctcgccaccatcgagagtccagacggagacatcatagactgcgtgcatatctccaaccagcccgccttggatcatcctttcctcaagaaccacaccgtccagatgcggcctgcataccacccggaaggtctgtacgacgacgagtccaaggttgcatcgcagcggaacgcgcagacgatcacccagatgtggcatcagaacggcaggtgccccgagggcacgataccgatcaggcggaccaaggaggaggacgtgctgagggccagctccgtcaggaggtatggcaagaagaagcgcaggagtgcccccaaccccatgtcggttgaccctgacatgctcaacgagagcgggcaccagcacgccatagcgtacgtggagggggacaagtactacggcgccaaggctaccatcaatgtgtggcagccgaagatcgagcaggccaatgagttcagcctgtcccagctctggatcctgggaggctccttcggccaggacctcaacagcatcgaagcaggatggcaggttagcccagacctgtatggggacaacaacactaggctcttcacctactggactagcgatgcctaccaggcaacaggatgctacaacctgctgtgctcggggttcatccagataaacaaccagatcgccatgggcgccagcatcttccctatctccaactacggcggctcccagtatgacatcaacatcttggtctggaaggtaaactccaaatagagctctcacatgccgagcaagcatgctagaaatcaaactcgtggtggtggtgggggtgggtggggccggagaatccgtgcccacctgtctcttggttccttttttttctcaagggttttttcaggctcgcttcagtcaagggctcacaactgtagctctggccccctcccccagtctgtttgtggacgcactcgcggtcgcggagtgacggttgggcccccacccatgcacgggcaagatctgtccgcggatgcaacaaccactgatgataatggttgccgttttttttaaaaaaaaaatagatagattttttgcacaggaataaattcaccacttgatgaataacgagcgcggtaatttaggcaagaaattcgcattgtgcatgcatgcaggaccccaaggagggcaactggtggctgcagttcggcaacgactacgtcctggggtactggccgtcgttcctcttctcgtacctggcggacagcgcctccatgatcgagtggggcggcgaggtggtgaactcggagcccgacggcagccacaccagcacgcagatgggcagcggccacttccccgaggaagggttcggcaaggccagctacttcaggaacgtccaggtggtggactccaccaacaacctcaagccgcccaggggcgtcggcaccttcaccgagcagtcc

SEQ ID NO: 141871 - DNA, 2102 bp, Zea Mays
cgggagcgagcggcgcgccagccaaagcaaagcaaaaacgacacaccaacgggcggatttttaagtccgccttcccccgtctcctctcctctctgtctccctcgtgccctcgccctccttttttttagtttacccgccgtcccgcgcgccgccgtttcggttgctcggctagagggactagggagtgccagcgagtccatggcagcggcgagggcgtgcatcgtcgcgctggcgctggtggcggcgctcttcgtggccggatcggcggcggcagcggcggggaatgccggaggccggccgcagctgtcgctcaggcagcggcgccggcagctgctgcggcagcggcaggtgcgcagccacctcaagaggctcaacaaggcgccgctcgccaccatcgagagtccagacggagacatcatagactgcgtgcatatctccaaccagcccgccttggatcatcctttcctcaagaaccacaccgtccagatgcggcctgcataccacccggaaggtctgtacgacgacgagtccaaggttgcatcgcagcggaacgcgcagacgatcacccagatgtggcatcagaacggcaggtgccccgagggcacgataccgatcaggcggaccaaggaggaggacgtgctgagggccagctccgtcaggaggtatggcaagaagaagcgcaggagtgcccccaaccccatgtcggttgaccctgacatgctcaacgagagcgggcaccagcacgccatagcgtacgtggagggggacaagtactacggcgccaaggctaccatcaatgtgtggcagccgaagatcgagcaggccaatgagttcagcctgtcccagctctggatcctgggaggctccttcggccaggacctcaacagcatcgaagcaggatggcaggttagcccagacctgtatggggacaacaacactaggctcttcacctactggactagcgatgcctaccaggcaacaggatgctacaacctgctgtgctcggggttcatccagataaacaaccagatcgccatgggcgccagcatcttccctatctccaactacggcggctcccagtatgacatcaacatcttggtctggaaggaccccaaggagggcaactggtggctgcagttcggcaacgactacgtcctggggtactggccgtcgttcctcttctcgtacctggcggacagcgcctccatgatcgagtggggcggcgaggtggtgaactcggagcccgacggcagccacaccagcacgcagatgggcagcggccacttccccgaggaagggttcggcaaggccagctacttcaggaacgtccaggtggtggactccaccaacaacctcaagccgcccaggggcgtcggcaccttcaccgagcagtccagctgctacgacgtgcaggacggcagcaacgccgactggggcacctacttctactacggcgggcccgggaagaactcaaactgtccatagcccaagactgactgagctgagccgccgcctatcacactcactaccagagccgcctaaccttaacacacctcagctgtatcattcatgcatccggtcaattagtttatactgcctcagatttttaacttttttttttgttttcgttttgtttcgctctttcttgcttctacctaccccctagtttactgactcgtaccctaggtgagtgagcgtgtgtgttgttgacatgtgagattgttctctctctctctctgcctcagagagagtgagatgaaggagagatgtcggtcgtctggttctagggaagagaggaggactgtggcccgttttctgaagagaaaaacaaggcctcatggttgctgtgccttgtgcctgtcaaataattttgtttgtttcatcccatgctggactggactgctaatcctttgttttctgttatgaaaagtgggcaatcgagtgcttagctgttgggtagacgtgcaaagatgccaacttttccgtgcgcccgccgagtctgtctgttgcccacttgtgtcacctggaaaagtgcgtgtgcgggtgatcattttatatgtaaatgtgtttgttattaatattattatagcagcgtgtggtgc

SEQ ID NO: 141872 - DNA, 1040 bp, Zea Mays
cggaacccgacaaatggccagccagccgcgcgtcgtgcggggcccttcccggtcgtccccagccagccagccccccaccgcctcacgcaacctacctggccgcgccaagcgcggggggccctctccggcctgcgcccctgcccgcctctataaaaccctcgtccctccgcagcgtccttccccacctccatccagctcgagccagcccgtcgcctgcgcgcatctctctacacttctactgcttcatactctcgtagagagatcccgcgcggcccaataaaaacccgactcgctagctacactacacactcgcagatggccggcctcaggatgaagttcgtcgccgtcgccgccatggccgccgcgctcgtggcgtccgccgcagccgccgaggcccccgccccggcccccgcctccgacgccgcggccgccgtgcccctcgccgcggcctccctcgccgccgccgccttcggctacctcttctgctagatccgcgctggacgcgtggtttctgcttgatttgtgattcgtctggcgcgagtggagtccgtgtcgtgcgcgtgtctgtgtgagttgtttcggcgggcgtgtgtctgtatgtatggagtcggtggcggaggaggaggtgtgcgcgtggtggtacgtgcgtcgacgctccattgtttgtggcggcgatcatgtgcctgccccgttttctggttatcaatgagatgatttatttgattctttccagcctgagcaccaagtgcacacaattaattttacggtaatatcgtgtgcccatctagcgttcaatctgaggtataagattctctatctgcgggactgcggccaacgaaggttatctagcgtgcagtatgaggtatttgcgaccaacgaatttgtctcggcaatttcaagtggttctttgccttctgcaaagaaaaaacgctagtgataatctgatagattatatggcatttgctgcatgccttcaattcgtgcatccaagttcagtggggacaataaagaaataaaaatacggtaatacaattgagaaa

SEQ ID NO: 141873 - DNA, 463 bp, Zea Mays
acttctactgcttcatactctcgtagagagatcccgcgcggcccaataaaaacccgactcgctagctacactacacactcgcagatggccggcccccgccccggcccccgcctccgacgccgcggccgccgtgcccctcgccgcggcctccctcgccgccgccgccttcggctacctcttctgctagatccgcgctggacgcgtggtttctgcttgatttgtgattcgtctggcgcgagtggagtccgtgtcgtgcgcgtgtctgtgtgagttgtttcggcgggcgtgtgtctgtatgtatggagtcggtggcggaggaggaggtgtgcgcgtggtggtacgtgcgtcgacgctccattgtttgtggcggcgatcatgtgcctgccccgttttctggttatcaatgagatgatttatttgattctttccagcctgagcaccaagtgcacacaattaattttac

SEQ ID NO: 141874 - DNA, 609 bp, Zea Mays
atggccaccgtgatggccagcgaaaccgtgacgagcaccgcgttgccaatgcccgtggccatgagcgcagtcaggctaatcttactgaatcccccgttgctagaagaaacacccacactggcgtccggagattcagcggcagtagcactagtgctcgagttacctgatgaccggcctagagcatcgtacgcatggacacattgtggcagaggcggaccacagagagcaagattgtcaccgaaagcggagctcgggaacctggacaggtcgccggagatctccccggcgagcctgttccccgacacgttgaagctcctgagcatcgggacgcgcagcgcttccaggcctccacggaagccgttgtgctctgctctcagggtgcgtagagcggccagcgagatgctgaggcttccgctgagcttgttgtgggagacgagcaggtgcctcagccacgggctcgccgtggagttgtccagcggggggagggtgccggacagggagttgttcctgacggcgagcaccctgattcggccgagcccgagcagcggcgccacggtgccggccagcgaggcgctgtccaggaagacccccgccaccctgcccctgtag

SEQ ID NO: 141875 - DNA, 1889 bp, Zea Mays
ctcacacgatactttccccctccactagggttccccgtccgttccccctcggccgcatcaggtaaattactggtctatccgccccgcattcgatctgatcccgtgattcaagcccttgtgcatcgatccgggactcctccacctgcagatctccgcggcggagtttcgtaccgtatttgtctttgcaacattcgagttgattattttggaggagtcgctctctagggttgattgagcgctgttgttttttttgtgcgacgacggtggtgtgttgattggatgttgaaagaattgtagctgtttgaggcggcaaccaagggccgcggaagcatctgtgtcgagccatggataaggggatcttcaccaacgatggctccttcatggagaggttcaagcagatgcagcaggaggcgcaggagaagaaggccgctgctgcctctgcctcatcggctcccaagcatgcgaaccccaagcaggggtttgctgttgcggcaaacaagaggccattcgagctgaagaacgctgctccggtagcctcagctggtaagctggcctttagtctcaagaaggccaaggtcgccgttgcacctgtgtttgcagccgacgaggaggatgaggatgctgtggatgttgagagggaggagcccgccaaacgccagaagtctgtgcaagctgatgctcctgcggcagctgccgcgtccggggctgttgtgagacaagtcgctgacaaactggcaagctttgttgccaaaaacgggagacagtttgagaatatcacacgacagaggaatcctggagatacaccattcaagtttctatttgacaaaaactgtccagactacaaatattatgagtttcagcttgctgaagaggaaagggctcttgctcagtcaaaggaggctgaagcatcgaaagctaactctggcactgcaagcttcaaggcaccaggtggtacttatagaagctcatttgaacagaagtctaactatcagacacctgcatcagctttgtacggggcatatgagggtagttcttcccaaggaagctcttctagttatggtgatcatacagctccaccatcagatcctgtagcattgatggaattctatgcaaagaaggctgcactggaagaacggaagaggccaccaaggcagtcgaaagatgaaatgccgccacctccttctcttcaaggtcctcctaagaagggacaccacatgggtgatttcattcctcaagaagaacttgaaaagtttatggcacggtgtaatgatgctgcagcacaaaaggctaccaaagaagccgctgagaaggctaagattcaggcggacaatattgggcacaaacttttatctaagatgggttggagggaaggtgagggtcttgggagcgagagaagaggccgtgcagatcccgttatggctggagatgtgaagaaggatcatcttggtgttggggcagtccagcctggtgaggtcacatctgaagatgacatctatgagcaatacaagaagcggatgatgcttggataccgctataggccaaaccctctgaacaatccaaggaaatcatactactgatgtgggggagttcgtctgaggggagatgtaaggcgctgctttgctgcaattttgctcacagaactaatggttaggggatatcactaacagcattgaaagtttttgttcatcaacagaaatgtcaagaagttcgttattcagcatatttcttggaatgccacagatgcaaggcttccgggggttctacaaagctttgttctttgtgtagtgtgtttatctttgtgggtttaaatgtctgttcaaacgtgtatcatgtttcagactgttgtattgctttcttggatcacccttttttctgatctcatttcagtt

SEQ ID NO: 141876 - DNA, 2122 bp, Zea Mays
ctcacacgatactttccccctccactagggttccccgtccgttccccctcggccgcatcaggtaaattactggtctatccgccccgcattcgatctgatcccgtgattcaagcccttgtgcatcgatccgggactcctccacctgcagatctccgcggcggagtttcgtaccgtatttgtctttgcaacattcgagttgattattttggaggagtcgctctctagggttgattgagcgctgttgttttttttgtgcgacgacggtggtgtgttgattggatgttgaaagaattgtagctgtttgaggcggcaaccaagggccgcggaagcatctgtgtcgagccatggataaggggatcttcaccaacgatggctccttcatggagaggttcaagcagatgcagcaggaggcgcaggagaagaaggccgctgctgcctctgcctcatcggctcccaagcatgcgaaccccaagcaggggtttgctgttgcggcaaacaagaggccattcgagctgaagaacgctgctccggtagcctcagctggtaagctggcctttagtctcaagaaggccaaggtcgccgttgcacctgtgtttgcagccgacgaggaggatgaggatgctgtggatgttgagagggaggagcccgccaaacgccagaagtctgtgcaagctgatgctcctgcggcagctgccgcgtccggggctgttgcttatagttaactaaattgacattgctgggaaggatgtgattgagggagttggaggctctactgcagtaatttgcattgccttgtcatgcactagatattaatcagttctttaagtgacatgcagccccacccccaccaaatgatatgacagtgagacaagtcgctgacaaactggcaagctttgttgccaaaaacgggagacagtttgagaatatcacacgacagaggaatcctggagatacaccattcaagtttctatttgacaaaaactgtccagactacaaatattatgagtttcagcttgctgaagaggaaagggctcttgctcagtcaaaggaggctgaagcatcgaaagctaactctggcactgcaagcttcaaggcaccaggtggtacttatagaagctcatttgaacagaagtctaactatcagacacctgcatcagctttgtacggggcatatgagggtagttcttcccaaggaagctcttctagttatggtgatcatacagctccaccatcagatcctgtagcattgatggaattctatgcaaagaaggctgcactggaagaacggaagaggccaccaaggcagtcgaaagatgaaatgccgccacctccttctcttcaaggtacatacacaacattattctccttgttgaaagaatgtagaagcttcaatgtttattccagcacaactaattcctgtgcaggtcctcctaagaagggacaccacatgggtgatttcattcctcaagaagaacttgaaaagtttatggcacggtgtaatgatgctgcagcacaaaaggctaccaaagaagccgctgagaaggctaagattcaggcggacaatattgggcacaaacttttatctaagatgggttggagggaaggtgagggtcttgggagcgagagaagaggccgtgcagatcccgttatggctggagatgtgaagaaggatcatcttggtgttggggcagtccagcctggtgaggtcacatctgaagatgacatctatgagcaatacaagaagcggatgatgcttggataccgctataggccaaaccctctgaacaatccaaggaaatcatactactgatgtgggggagttcgtctgaggggagatgtaaggcgctgctttgctgcaattttgctcacagaactaatggttaggggatatcactaacagcattgaaagtttttgttcatcaacagaaatgtcaagaagttcgttattcagcatatttcttggaatgccacagatgcaaggcttccgggggttctacaaagctttgttctttgtgtagtgtgtttatctttgtgggtttaaatgtctgttcaaacgtgtatcatgtttcagactgttgtattgctttcttggatcacccttttttctgatctcatttcagtt

SEQ ID NO: 141877 - DNA, 1847 bp, Zea Mays
ctcacacgatactttccccctccactagggttccccgtccgttccccctcggccgcatcaggtaaattactggtctatccgccccgcattcgatctgatcccgtgattcaagcccttgtgcatcgatccgggactcctccacctgcagatctccgcggcggagtttcgtaccgtatttgtctttgcaacattcgagttgattattttggaggagtcgctctctagggttgattgagcgctgttgttttttttgtgcgacgacggtggtgtgttgattggatgttgaaagaattgtagctgtttgaggcggcaaccaagggccgcggaagcatctgtgtcgagccatggataaggggatcttcaccaacgatggctccttcatggagaggttcaagcagatgcagcaggaggcgcaggagaagaaggccgctgctgcctctgcctcatcggctcccaagcatgcgaaccccaagcaggggtttgctgttgcggcaaacaagaggccattcgagctgaagaacgctgctccggtagcctcagctggtaagctggcctttagtctcaagaaggccaaggtcgccgttgcacctgtgtttgcagccgacgaggaggatgaggatgctgtggatgttgagagggaggagcccgccaaacgccagaagtctgtgcaagctgatgctcctgcggcagctgccgcgtccggggctgttgccccacccccaccaaatgatatgacagtgagacaagtcgctgacaaactggcaagctttgttgccaaaaacgggagacagtttgagaatatcacacgacagaggaatcctggagatacaccattcaagtttctatttgacaaaaactgtccagactacaaatattatgagtttcagcttgctgaagaggaaagggctcttgctcagtcaaaggaggctgaagcatcgaaagctaactctggcactgcaagcttcaaggcaccaggtggtacttatagaagctcatttgaacagaagtctaactatcagacacctgcatcagctttgtacggggcatatgagggtagttcttcccaaggaagctcttctagttatggtgatcatacagctccaccatcagatcctgtagcattgatggaattctatgcaaagaaggctgcactggaagaacggaagaggccaccaaggcagtcgaaagatgaaatgccgccacctccttctcttcaaggtcctcctaagaagggacaccacatgggtgatttcattcctcaagaagaacttgaaaagtttatggcacggtgtaatgatgctgcagcacaaaaggctaccaaagaagccgctgagaaggctaagattcaggcggacaatattgggcacaaacttttatctaagatgggttggagggaaggtgagggtcttgggagcgagagaagaggccgtgcagatcccgttatggctggagatgtgaagaaggatcatcttggtgttggggcagtccagcctggtgaggtcacatctgaagatgacatctatgagcaatacaagaagcggatgatgcttggataccgctataggccaaaccctctgaacaatccaaggaaatcatactactgatgtgggggagttcgtctgaggggagataaatgtcaagaagttcgttattcagcatatttcttggaatgccacagatgcaaggcttccgggggttctacaaagctttgttctttgtgtagtgtgtttatctttgtgggtttaaatgtctgttcaaacgtgtatcatgtttcagactgttgtattgctttcttggatcacccttttttctgatctcatttcagttacaagttggaaccataaggt

SEQ ID NO: 141878 - DNA, 1231 bp, Zea Mays
cacacgatactttccccctccactagggttccccgtccgttccccctcggccgcatcagctgtttgaggcggcaaccaagggccgcggaagcatctgtgtcgagccatggataaggggatcttcaccaacgatggctccttcatggagaggttcaagcagatgcagcaggaggcgcaggagaagaaggccgctgctgcctctgcctcatcggctcccaagcatgcgaaccccaagcaggggtttgctgttgcggcaaacaagaggccattcgagctgaagaacgctgctccggtagcctcagctggtaagctggcctttagtctcaagaaggccaaggtcgccgttgcacctgtgtttgcagccgacgaggaggatgaggatgctgtggatgttgagagggaggagcccgccaaacgccagaagtctgtgcaagctgatgctcctgcggcagctgccgcgtccggggctgttggtaattatttatatttattaatttcttgctgttttactgttagcttgtttagtgaaggcgttctatgggttgtagtttccaattttccatcgcatgattaggtttaaacatgtgataaggcttctaattcagtaaccgagacagaacatcagtgatatattaccttatagcttttcatgcaattagtgttttttcatcgaattcagtcacggatttagattatctcattgaatttgacgcaaatcatttcacacgcatgcgacataccttagtatttttactattgaagtgagttctaatttctgatatctgttcccaaagtattacagctggtgcagatgattgcattatcagtttctatgtagagtttttttattccatttatttgatggtgttgtcctggaagtattgcgattctgaacacatttgataatgaaactaagtaataactatatggtttgaatttaattttcttacatactgattattgaaatctctaaaggaccgtttggatggtcggtaatatttgagttctttatggttactaaaatataccataacatttaaagcttcaaggtgtttcgatacaacgatgtagttttacatccaattaccatgttattttgagttcttgaagaaaacctattcaaaactcattttccccatttttttttaaaaatcaaagcacacctcacattacctttggcaccattgtgagttatgaagcattggcctgtctaatttcatgcgaaagggcc

SEQ ID NO: 141879 - DNA, 1609 bp, Zea Mays
cacacgatactttccccctccactagggttccccgtccgttccccctcggccgcatcagctgtttgaggcggcaaccaagggccgcggaagcatctgtgtcgagccatggataaggggatcttcaccaacgatggctccttcatggagaggttcaagcagatgcagcaggaggcgcaggagaagaaggccgctgctgcctctgcctcatcggctcccaagcatgcgaaccccaagcaggggtttgctgttgcggcaaacaagaggccattcgagctgaagaacgctgctccggtagcctcagctggtaagctggcctttagtctcaagaaggccaaggtcgccgttgcacctgtgtttgcagccgacgaggaggatgaggatgctgtggatgttgagagggaggagcccgccaaacgccagaagtctgtgcaagctgatgctcctgcggcagctgccgcgtccggggctgttgccccacccccaccaaatgatatgacagtgagacaagtcgctgacaaactggcaagctttgttgccaaaaacgggagacagtttgagaatatcacacgacagaggaatcctggagatacaccattcaagtttctatttgacaaaaactgtccagactacaaatattatgagtttcagcttgctgaagaggaaagggctcttgctcagtcaaaggaggctgaagcatcgaaagctaactctggcactgcaagcttcaaggcaccaggtggtacttatagaagctcatttgaacagaagtctaactatcagacacctgcatcagctttgtacggggcatatgagggtagttcttcccaaggaagctcttctagttatggtgatcatacagctccaccatcagatcctgtagcattgatggaattctatgcaaagaaggctgcactggaagaacggaagaggccaccaaggcagtcgaaagatgaaatgccgccacctccttctcttcaaggtcctcctaagaagggacaccacatgggtgatttcattcctcaagaagaacttgaaaagtttatggcacggtgtaatgatgctgcagcacaaaaggctaccaaagaagccgctgagaaggctaagattcaggcggacaatattgggcacaaacttttatctaagatgggttggagggaaggtgagggtcttgggagcgagagaagaggccgtgcagatcccgttatggctggagatgtgaagaaggatcatcttggtgttggggcagtccagcctggtgaggtcacatctgaagatgacatctatgagcaatacaagaagcggatgatgcttggataccgctataggccaaaccctctgaacaatccaaggaaatcatactactgatgtgggggagttcgtctgaggggagataaatgtcaagaagttcgttattcagcatatttcttggaatgccacagatgcaaggcttccgggggttctacaaagctttgttctttgtgtagtgtgtttatctttgtgggtttaaatgtctgttcaaacgtgtatcatgtttcagactgttgtattgctttcttggatcacccttttttctgatctcatttcagttacaagttggaaccataaggt

SEQ ID NO: 141880 - DNA, 593 bp, Zea Mays
ccacgaagtagcgttggctgttgcaaaagcaaccgtttcaagtttcctccctagtgcacccaggaaatcgccagcacctcccctgttccctctctgtctctggctctctctcctctccgcccctttttatcgcccgatctcacacattttggaaagaggagagagagggagagattagaggggagcgccctgcccaagcaaagagaaaccgcggcgcgagaagagggaggaagggcagacgggcgagcaggatgagagagatcatcagcatccacatcggccaggccgggatccaggtcggcaacgcctgctgggagctctactgcctcgagcacggcatcgagcccgatggcaccatgcccagtgatacctcggttggcgtcgcacatgatgccttcaacacgttcttcagcgagaccggttctggcaagcatgtgccgagggccatcttcgtcgaccttgaacccactgtcattgatgaggtgaggtcccttgacatcgaaaggccaacctacaccaacttgaacaggtttgatggtgctatcaatgtggatgtcaccgagttccagaccaaccttgttccatacccacgt

SEQ ID NO: 141881 - DNA, 1041 bp, Zea Mays
gagcgccctgcccaagcaaagagaaaccgcggcgcgagaagagggaggaagggcagacgggcgagcaggatgagagagatcatcagcatccacatcggccaggccgggatccaggtcggcaacgcctgctgggagctctactgcctcgagcacggcatcgagcccgatggcaccatgcccagtgatacctcggttggcgtcgcacatgatgccttcaacacgttcttcagcgagaccggttctggcaagcatgtgccgagggccatcttcgtcgaccttgaacccactgtcattgatgaggctatctatgacatatgcaggaggtcccttgacatcgaaaggccaacctacaccaacttgaacaggctgatctcacagatcatatcatctctaaccacctccctgaggtttgatggtgctatcaatgtggatgtcaccgagttccagaccaaccttgttccatacccacgtatacatttcatgctttcctcatatgcccctgtaatctctgctgagaaggcttaccatgagcagctctctgttcctgaaatcaccaatgccgtctttgagccctcaagcatgatggccaagtgtgacccaaggcatgggaagtacatggcttgctgcttgatgtaccgtggtgatgttgttcccaaggatgtcaatgctgcagtcgcaaccatcaagaccaagagaactgtccagtttgtggactggtgccccaccggattcaagtgtggcatcaactaccagccaccgtctgttgtccctggaggcgacctggcaaaggtccagcgtgccgtgtgtatgatcagcaacaacactgccgttgctgaggtgttctcgcgcatcgatcacaagttcgaccttatgtacgccaagcgggcgttcgttcactggtacgtcggtgagggtatggaagagggtgagttctccgaggcccgtgaggacttggctgctcttgagaaggactatgaggaagtcggcgcagagggtgcagatgacgagggtgacgagggcgatgactattgagtagccggt

SEQ ID NO: 141882 - DNA, 252 bp, Zea Mays
aatcacggaccgtccggccctccatcagaccgtccggcaccctacgccggacagtccggagttacacagagcccaccacaagggtcacaggtgttgtctgacgtggccggacagtccgaggatagtaccggaccgtccgatccacccgcggaccgtccgactgtgcaggtcggaccgtccggggcaccagaagtcacctgtgatccgcctagtgcggaaggccgacataaatataatcggccacccaagccc

SEQ ID NO: 141883 - DNA, 2056 bp, Zea Mays
atggccgaggagctcccactgtcccgcacgcgcgcgcccgttgcgttgcttctccgtctccccgaattctccctccgtctcggccgtcggcactcatctactgtccagtgtccacacaccaacgcgcgcgcggcgcggcggtatggcttgcgcggccgctcccagccccctccccggcgtccccgctcgccgcagcaccacggcgccctgcgtggtcttcgccgtgggcccccacccgccgcgattctacagaccttttaaaccctccacgggaggcgcgccacgctccagcctgcgcgtcgtggcctctagctccaaggcggacccagtagaggagagactcccagtcgcgccgctcgcggatgttctagtttcggccaacgcctcctcgcccagtccgccggtggagcctcagccccaagtaagcaccggcacatggaaatggaggggctacaacattcgctaccagcacgctgggacagcaggccctgcattggttctggttcatgggtttggggcaaacagtgaccattggcggaaaaatatgtctgttctagccatggcacacagggtatatgctatagatctaattggttatggctattctgataagcctaacccacgtgagatcgaagagaacttttatacttttgagacatggggagaacagctgaattcattttgtgctgaagttgtccagagtgaagttttcttcatatgcaattcaattggaggagttgttggtctgcaggcagctgttatggaacctaaaacatgtaagggaattgttttattggatatttcactaaggatgcttcatatcaaaaagcagccatggtttggaaagcctttcatcaaatcttttcaaagtctcctaaggaacactattgttgggaagctattttttaatgctgttgctacaccagaatctgtgaaaaatattctttgccagtgctatcatgacacatctgcagtgacagatgagctagttcagattattctacagcctggtcttgatcctggagcagtggatgtattccttgagttcatctgctactctggaggacctctacctgaagagttgcttccattggtgaagtgtccagttttggtagcatggggggagaaggacccatgggagcctgttgagcttggaagagcctatgcatcttttgatacagttgaagattttgttgtcttgccagatgttggacactgccctcaggatgaagcacctgagcttgttaatccacttgtcgaatcatttgtccagcgccatacttagcacatgggcgagcatctttcagggccctgcctgaggcagggcgggaggagcggccgacctgggcccccatctcccaggggcctaccgtacacaaagttcaataggaatataggatagaaacggatattatttactataccaatatatttttgagtttgttaggagaatggattgctgtcccaatatatttgttgtttatcggatattatttactataccaataactgtggcatcagctgaaaggagcttctcaaagcttaagttattgaagaattatttaaggtctacaatgtctcaagaaaggttaaacgaactagcaactttatgtattgagaagaaattattagatgatgtcaatattgaagccatcattgaggattttgcatctagaaatgttagaagatatttttaagttgatctctacaatatatttgaggtaataatcttacttctattttttactgctcaagtctttctgtggtacatcaaatataattagttgatatatataatagtaaaaaatagtttttatggtgttgagacctctatttataatcttgtcccgggcccctcaaaagtcaggaacggccctggcatctttctatgtttattaatgccctttcccagcagggcctcgtgctggaaaatgtgaacgtaaggttatgttatttacaaatgggtcctgttatagctactgtaagtgcttcccactgctaaactgttaacaaaagacatgtttgcctggaactgactgcaaactgtttttggagg

SEQ ID NO: 141884 - DNA, 2332 bp, Zea Mays
gatcccatacattgccacttgtcggggaggagagtccggagctgagacggcgagctgcctagctccgttcctgctctatatctcagctcctccgttctgtcctgtggccccgagctgagctgccaaggatacgtacgtacgtacgtcttgagggaggctgccggtcgccctcttctctcgtcgacctcgtcggggttatgcggaggagcaggtcgtgcttgtcctgcgtgcccatggggacggcggcgctgcccattgagaaccacttcgtcgctccggctgcgctaccgtcggtgcccgcctcagattcagaggacggaggatttggcaagggcagcatagaccttggaggcctagaggtgcgccaggtcaccacgtttgccaaggtctggtccaccacacagggcggccaagacggcctcggcgccaccttcttcaagccctcgccggtgcccgccggcttctccgtgctcggccactacgcgcagcccaacaaccggcctctcttcggccacgtcctcgtcggccgggacacgtctggcgccggcggtgcgctcctcgccgcgccagtggactacgccctcgtctggtccagcccggacggcgccggccacttctggctccccacggctcccgagggctacaaggccgtcggcgtggtggtcacggccgcggcggacaagccttcacccgacgaggtccggtgcgtccgcgccgacttcaccgacgcgtgcgaggccgaggactcggtgtggagcagcgacaaggacggcttcagcgcgtccaccctgaggccggcggtccgcggcatcgaagcccgcggcgtgcacgctggcacgttcctcgcccagagcagcgcgacgccggcggcggcggcgggcgtgtcaacgacgctggcgtgtctgaagaacaacagcgcgagctacacgtcctccatgcccgacctggcccagctgaactccctcctggcggcctacgcgccgcacgtgtacctgcacccgaacgagccctacttcccgtcgtcggtggcgtggttcttcgagaacggcgcgctgatgtaccagaagggcagcagccagaccccgacgccggtggccgccgacgggtcgaacctcccgcagggcggcggcaacgacggcgggtactggctcgacctgccggcggacgggaaccagcgggagaaggccaagaggggagacctcgccggcgcgaaggtgtacgtgcaggcgaagccgatgctcggcgggacggtggccgacctcgcggtgtggatcttctacccgttcaacgggccggcgcgcgccaaggtcggcctcatcccgtcgatcccgctcggcgagatcggcgagcacgtcggcgactgggagcacgtgacgctgcgcgtcagcaacttctccggcgagctcctccggatgtacttctcgcagcacagcgcgggcacctgggtggacgcgtcgcggctggagtacctcgacggcggggacggcggcgggagcaggccggtggcatacgcgtcgctgcacgggcacgcgttctacccgaacgcggggacggtgctgcaggggaactcgggcctgggcatcgggatccggaacgactgcgccagagggagcaggctggacaccggcgcggggcggtgcgaggtggtgtcggcggagtacctcggcgtcaaggagccggcgtggctcgggttcgagcgcgagtggggcccgcgggatgagtacgacatcgggcgcgagatcaaccgcgccgctaggctcttgccacgttcggtgagggagcggctagccaagctggtggagaaggtgctcgtcggggagggcccgacggggcccaagatgcatggtaactggagaaacgacgagagggaagcctgataaaggcttcgtatccttaactgtacgattcgtgaggtatatacggatcagacggtttgcgattgaaaggatagcgtgctcattagaggagctaaaaggattggttgtgtcattgtgtgtgtgcgtgcctgcgtggcagtgtatttccatctcagctgtatgtaggcaacgactgctatgcaagcagtccttctgtgcaagcgtgcaagcaaatcatctcatccattagatcatgatccaaccgtaggtcatatttaacacttaaaccctttcaccaccagctcaataatctttataaaaaaaatcctaacaaaccatggttgtatctatggttggatcgtaatctaattgataaaatggtttgtttgcacgcttgcacagaaggactatttgcataacagtcgttgccgctgtatgtattcgataatgtgtagcattgtttggtttgctgttta

SEQ ID NO: 141885 - DNA, 2216 bp, Zea Mays
gatcaaaagctcccgtctctcctgcttactacacctttcccaccttttttccctgttaaaaaatatccgccgcgtcccctccaggcctccagggaactatcggatctcgctgagctcgtcaatcaccgcatttctttactaatcgccccttctcgaagagattaatctttagaagcgcttaaccatgaagtgttttgagttgagcttccaagaaacagagggaagctagagagcctcgaaaggatcctcggattctctacgggctgccatgggagaggggagatagcttcccttttccaatcaccctctcactggagttgcggcagccgtccagtcttcagtcccccagtgtgtgctcctacccattgtcggcggcggccgccgccgcgcttttcttgagagtttctgagaagtgtcccagctcacagctaatcatatccttgggcacaagaatatgtcgtccaagagactacatggcgtgtttacccttcttatgctcatggttttcaatgtttcaggggcatttgttggtatcactattggcaatgacatgtcaaacataccaccagcaacagatatagtgtctatcctcaaagcaaaaaagattcagcatgttcgcctgcttgattcagaccatcaaatgttgaatgcccttgcaaatactggaatagaagtgatggttggggttccaaatgatcagctacttcgtgtgggccaatctcgttccacagctgctgattggattaataagaatgtcggtgcttacattccggcgactaacatcacatatattgctgtgggtaatgaggtccttactaccattcccaatgcagcacttgtactcgtacctgcactgcaattcctccagtcagcactgttggctgcgaacctcaatactcaagtgaaaatttcaagtcctcattcaatggatgtgatctcaaaggcctttccaccctctgctgcgactttcaatttgacatggagctcaataatgtctcaatatcttcagtttctcaagaatacgggatcttcgtttatgctgaatgcccaaccatactatggctatgtcggagggcaaggcgtatttcccttggagtatgcactattccgctcacttaatccgaacagtcaaatctcagatcctaacaccaatctcttttataccaatatgtttgatgctataattgatgctacctacaactcaattcaagcaatgaattttacgggcattcctgttttagtcacagcttctggttggccatggcgtggtgggccaagtgagaaggctgctactgttgataatgctttggcctataatacaaacctcatacatcatgtactgaacaattctggtactcccagccaaccgaataatcagccaagcacctacatctttgaacttttcaatgaggataatcggtcagggcctgtatcagagcaaaattgggggattatgtttcccaatgcaaccactatatattctctatcatttgaggacgtggccacagctattcctgaatcaccagctttgcgtggggtgttttgtgtggcaaattcaagtgcatcccatagtgcactgaagcatagtttggattgggcatgtggccctggttctgcaaactgcagtgcagttcaacctgggcaaccatgctatgcatcagatgatattgtagctgttgcttcttatgctttcaacgattattaccatagaacacagtctagtggtggtacatgcaacttcaatggcaccgcgatgataacatcgactgatccaagccatggttcatgcattttcagtggaagcgctggcgccaacggcagcaacggtggaacagcatccgggcctgtaagcccggacagttttgcttcaaaatcccagtcgtgctggctgactcacctagtagccacattgctgccaattctatttgtagtgatgtaaatcattgtaatcatgtcgcattttggatgagatgcccgcaatttatcgtggatcttgtcattagatacagtagtgactagcgagccatttgttctgctgtattcaggtagatgccatgtaaccttatcccagaatttcttgccctaggaatcagtacttcgtcaaatcatcaattttgaacgccaacttggaaaattgagctgtgacaagccgagaactctctgaaatattggaagttccaaatgatttgtactgcatagtatttagtttctcagct

SEQ ID NO: 141886 - DNA, 2189 bp, Zea Mays
atcggatctcgctgagctcgtcaatcaccgcatttctttactaatcgccccttctcgaagagattaatctttagaagcgcttaaccatgaagtgttttgagttgagcttccaagaaacagagggaagctagagagcctcgaaaggatcctcggattctctacgggctgccatgggagaggggagatagcttcccttttccaatcaccctctcactggagttgcggcagccgtccagtcttcagtcccccagtgtgtgctcctacccattgtcggcggcggccgccgccgcggttcgtcctctcgctcctgctccgcagccacctagcgagttcctctgtgcgcgtatttggtaagagaggacgaatgaatgactcttctttgaggtcaacaatcagcttttcttgagagtttctgagaagtgtcccagctcacagctaatcatatccttgggcacaagaatatgtcgtccaagagactacatggcgtgtttacccttcttatgctcatggttttcaatgtttcaggggcatttgttggtatcactattggcaatgacatgtcaaacataccaccagcaacagatatagtgtctatcctcaaagcaaaaaagattcagcatgttcgcctgcttgattcagaccatcaaatgttgaatgcccttgcaaatactggaatagaagtgatggttggggttccaaatgatcagctacttcgtgtgggccaatctcgttccacagctgctgattggattaataagaatgtcggtgcttacattccggcgactaacatcacatatattgctgtgggtaatgaggtccttactaccattcccaatgcagcacttgtactcgtacctgcactgcaattcctccagtcagcactgttggctgcgaacctcaatactcaagtgaaaatttcaagtcctcattcaatggatgtgatctcaaaggcctttccaccctctgctgcgactttcaatttgacatggagctcaataatgtctcaatatcttcagtttctcaagaatacgggatcttcgtttatgctgaatgcccaaccatactatggctatgtcggagggcaaggcgtatttcccttggagtatgcactattccgctcacttaatccgaacagtcaaatctcagatcctaacaccaatctcttttataccaatatgtttgatgctataattgatgctacctacaactcaattcaagcaatgaattttacgggcattcctgttttagtcacagcttctggttggccatggcgtggtgggccaagtgagaaggctgctactgttgataatgctttggcctataatacaaacctcatacatcatgtactgaacaattctggtactcccagccaaccgaataatcagccaagcacctacatctttgaacttttcaatgaggataatcggtcagggcctgtatcagagcaaaattgggggattatgtttcccaatgcaaccactatatattctctatcatttgaggacgtggccacagctattcctgaatcaccagctttgcgtggggtgttttgtgtggcaaattcaagtgcatcccatagtgcactgaagcatagtttggattgggcatgtggccctggttctgcaaactgcagtgcagttcaacctgggcaaccatgctatgcatcagatgatattgtagctgttgcttcttatgctttcaacgattattaccatagaacacagtctagtggtggtacatgcaacttcaatggcaccgcgatgataacatcgactgatccaagccatggttcatgcattttcagtggaagcgctggcgccaacggcagcaacggtggaacagcatccgggcctgtaagcccggacagttttgcttcaaaatcccagtcgtgctggctgactcacctagtagccacattgctgccaattctatttgtagtgatgtaaatcattgtaatcatgtcgcattttggatgagatgcccgcaatttatcgtggatcttgtcattagatacagtagtgactagcgagccatttgttctgctgtattcaggtagatgccatgtaaccttatcccagaatttcttgccctaggaatcagtacttcgtcaaatcatcaattttgaacgccaacttggaaaattgagctgtgacaagccgagaactctctgaaatattggaagttccaaa

SEQ ID NO: 141887 - DNA, 1104 bp, Zea Mays
gcaagcggtgagacaactccctcgggaggcagcgaggacctccttgacggcgcccctcgacggcgtaccggcggttccacctccatttggcggcgcgcggggggctgcacctcctttgggcggcgtgcgcgaacaagagccgcagcctctcccgcttgtctttgggagggaacgctggcaacctcatcttctttcgacgctagatttggacagtaaagtcccgcagtgacttgccagttgccactgccagagcggtcaccgaatctgaggtctgagcccagcgggccgcggcggctatgtcctcatcctcctccttccccaactcccgcttccccttcgcagccggcgccggggcctccggcggaagcgggagcagcgtgcggccgtggggttcgagcggcgggacatcggtgtcttcatctgggaaacggatacagaaggagctgctggacctcaacgcctccgactgctccgcggggcccaagggcgacaacctctaccactggctctccactatcatcgggccccaaggatcgccgtatgaaggagggatatttttccttgacatagtgtttcctcctgattatcccttcaaacctcccatggtaacattcaaaacgaggatttaccactgcaatattgattccactggtaaagtgcatttggacattctgaaggatggctggagtccagctttcactatttctaaggtgttattggccatcaaagacatcatcagcaatccagatccatactccccgcttatgatgagcatttcacgtcagtatctgactgatagagctaaacacgatgaaatagcagctgagtggacaatgagatttgcaagataggggatctatttgtatctaagcatggttgacattgtaaaaaaacaactcttaatgtggcctgagatggtgaatgttggcaacggagccatgtttggtttggtgtgacgtgacataaatgtgtactttatgcttgagtattatttaactgctccttttaggtgaagaataatcttttagattttgtacttatgccaagttgtacaagcatctattcagaacctgctatctgagtttatttcttgaaatgatttct

SEQ ID NO: 141888 - DNA, 1235 bp, Zea Mays
cttctcagaccatagacaatggccaccgaactagatgtgagcaagtctcgccgcttcgacattgccatgtcgaggcgaacccggcgatcgacaagcctggtagcctgctttcaagatcagtatacaccatccctggcacagcatcgccaccaagagctgaaggcgtttctgcaatgccaggatgaagagctgaaggcactccagcgatgcgaggatgcagagcacaagacactgtgtttgaatgaagacgaggagctgaagattccacaagtaccaatgcagtatgaagatgacaagcaagagacgccagagcaatatgaagatgggcaggagaaggagtcgcagcaatatccagaccaagagcaggagataccagattcatgtcaagacgatgagaagacaccgaaccagtatctagacgaagggaagatgctagagcagtatcaagatgaagatgatgagctgccatcacaataccaagaccatgagctggtgacacagaagctacctgaggaagatgaggggactgcatcagagcgattccaagacgaggagaggaaggaacttcatcagcaccaagaggcagatgagcagacgtcacagtctgaggacgaggaggagcccaagtctcagcaggaacgccatgacgtcgagcagaaggcaccgaagcaattccaagtcttgaagaaggtagccgcgccaccacgtcctgtggagaacgtgccccggttctccctccaggagcttatacggcagaagcagcagcttccaaccggcgaggcgatggctaccagcaaggtaggcggccgtggggagagtgtcctcgctgaccatatggtttcaggagcaggtgcagcagccgcagagggcacggcactggcgatggtgataaagcgacccgagggagggaagaagcccatgggcatgatacgccggtgcgtcaaggccctgaaccagatgatcaaggccaagcacgggtccaagaagaacctgcatttctagtgttcaacagagtttcttagtagattgcacatctctgaataatgcacgcgcagttggggagaaccacaattttgggcatggtgcagggtgtgaaagatctggcgagaaactttttacgctctggtctatactgtcttcctatagcaataaactgtggaacttttaatagctgaagatcacaaatctgctactcctatgcgagaagatggtctactcagtgatgctctacgcga

SEQ ID NO: 141889 - DNA, 91 bp, Zea Mays
aacatgtctaacacataattataaagtttatagtacaaatctctatttaatttgtgctacaaatacacattttatattggaagaactatag

SEQ ID NO: 141890 - DNA, 441 bp, Zea Mays
atggccaggaaacaactccacggggcatggggctttgatttatacggggcatggggctttgatttatttggaggggaagagagcagaggggcgcagaagagggcgaaggccgacgacggccatcaacacattaatagtgttggcgttcacaaagaagagtggggagatgaagaggaaaaaggggcggtcatttccgttgcacggggaggcggagaggcatggggaggtgagacgtcgggcggcgcagggcaggcggggcgccggagcaccggggcggtggcggcgccgcgccgtgctacgcacgcgcgagagcacggtacgtgcagccgggcaaatgaagggaagcaggggccacgtgactgggagagaaggggaggggagacagggagaggtcgagaggaggggcacgagatgggcctagtggtccggctggccgactag

SEQ ID NO: 141891 - DNA, 1461 bp, Zea Mays
accctccacgtcagcgcgatccggcgcgccagagccaaacgagcagattctcccgcgccgcgtggcacgaggcggccgcgcccgctatcccctcgcggataaagccggacccactccggcgcgcgcgcaccacgagatcccttaaactgccgggcatcacccaccagcccaccgccaccacacagctcccacgctcaccgacgccacagcttgtgcgcgcgcaatggcactcgtgtccgcctcctcgtcctccaccaccgccgtcgcggcgctccccaggaatgggcagcagcgggcgtcgtcgtcgttgttctcctcctcctcctcttcctccttcctcgtcggcaagacgctgctgaggcaggccgaggcagcccggccgtcgttcgccgtgcgcgccgcggcggattccgacaggccgatctggttccccggcagcacccctccgccgtggctcgacggcagccttcccggcgacttcggctttgatccctggggcctcggatctgacccggagagcctgcggtggaacgtgcaggcggagctggtgcactgccggtgggcgatgctcggcgcggcgggtatcttcatcccggagttcctgaccaagatcggcgtcctcaacacgcccttctggtacaccgccggcgagcagcagtacttcaccgacaccaccaccctcttcatcatcgagctcatcctcatcggctgggccgagggccgccgttgggctgacatcatcaagcccggaagcgtcaacaccgatcccatcttccccagcaacaagctcaccggcaccgacgtcgggtaccctggtggcctgtggtttgacccgctcggctggggctccggctcgccggagaagatcaaggagctgcgcaccaaggagatcaagaacggacgcctcgccatgctcgccgtcatgggcgcttggttccaggccgagtacaccggcaccggccccatcgacaacctcttcgcccacctcgccgaccctggccacgccaccatcttccaggccttcacccccaaatgaggagctctgatgaacttggcagttcgaggagtgctaccacacatgcatgcattgttaggtttgatggccgatatggaactttttctttttgttgggggcggactactgggtagactgtcaacgatgatgatgatgatgatgaaatgttcgtggtgcgatgcatggtgtacttgtactatgttgtaactaatgtaaaaatgcgatggtcgttagatgctatgtcctcttaattaaggcggacctacatgcaagtaaggatgcaaataagggtattcagtatttaattgaatactcattattttttgcaaaaaaatatgtatacatgtatatgttactagccagttgttcatactttgctaccattgttatatatcatataaataggtattgaaatatttgtttaaatataattattgtttatttct

SEQ ID NO: 141892 - DNA, 1469 bp, Zea Mays
accctccacgtcagcgcgatccggcgcgccagagccaaacgagcagattctcccgcgccgcgtggcacgaggcggccgcgcccgctatcccctcgcggataaagccggacccactccggcgcgcgcgcaccacgagatcccttaaactgccgggcatcacccaccagcccaccgccaccacacagctcccacgctcaccgacgccacagcttgtgcgcgcgcaatggcactcgtgtccgcctcctcgtcctccaccaccgccgtcgcggcgctccccaggaatgggcagcagcgggcgtcgtcgtcgttgttctcctcctcctcctcttcctccttcctcgtcggcaagacgctgctgaggcaggccgaggcagcccggccgtcgttcgccgtgcgcgccgcggcggattccgacaggccgatctggttccccggcagcacccctccgccgtggctcgacggcagccttcccggcgacttcggctttgatccctggggcctcggatctgacccggagagcctgcggtggaacgtgcaggcggagctggtgcactgccggtgggcgatgctcggcgcggcgggtatcttcatcccggagttcctgaccaagatcggcgtcctcaacacgcccttctggtacaccgccggcgagcagcagtacttcaccgacaccaccaccctcttcatcatcgagctcatcctcatcggctgggccgagggccgccgttgggctgacatcatcaagcccggaagcgtcaacaccgatcccatcttccccagcaacaagctcaccggcaccgacgtcgggtaccctggtggcctgtggtttgacccgctcggctggggctccggctcgccggagaagatcaaggagctgcgcaccaaggagatcaagaacggacgcctcgccatgctcgccgtcatgggcgcttggttccaggccgagtacaccggcaccggccccatcgacaacctcttcgcccacctcgccgaccctggccacgccaccatcttccaggccttcacccccaaatgaggagctctgatgaacttggcagttcgaggagtgctaccacacatgcatgcattgttaggactttagacgtggcactgggcggcgaagcgaagagcaagcgagccgccatttcggcgtgttcaatcgggtcggtcatcaatgttgagccgtcaatgacagccatgtccgttcgtcgcgtggcgaagcagagcagtgaatgaagtggccgttcctaacacgagcggcagtactactactctgcccggctaatgctacatcgacgtttaaatcaaataattgaaatatttttttttcctattctcgtctcattatctgatctcacttgaccctgatgagatgagagtaggcctagataagatccttcatctctttccaaaatctgtccgctttaggacttgtttgggtaatcttgattggagtggattgaggtggt

SEQ ID NO: 141893 - DNA, 1311 bp, Zea Mays
ccagagccaaacgagcagattctcccgcgccgcgtggcacgaggcggccgcgcccgctatcccctcgcggataaagccggacccactccggcgcgcgcgcaccacgagatccccacacagctcccacgctcaccgacgccacagcttgtgcgcgcgcaatggcactcgtgtccgcctcctcgtcctccaccaccgccgtcgcggcgctccccaggaatgggcagcagcgggcgtcgtcgtcgttgttctcctcctcctcctcttcctccttcctcgtcggcaagacgctgctgaggcaggccgaggcagcccggccgtcgttcgccgtgcgcgccgcggcggattccgacaggccgatctggttccccggcagcacccctccgccgtggctcgacggcagccttcccggcgacttcggctttgatccctggggcctcggatctgacccggagagcctgcggtggaacgtgcaggcggagctggtgcactgccggtgggcgatgctcggcgcggcgggtatcttcatcccggagttcctgaccaagatcggcgtcctcaacacgcccttctggtacaccgccggcgagcagcagtacttcaccgacaccaccaccctcttcatcatcgagctcatcctcatcggctgggccgagggccgccgttgggctgacatcatcaagcccggaagcgtcaacaccgatcccatcttccccagcaacaagctcaccggcaccgacgtcgggtaccctggtggcctgtggtttgacccgctcggctggggctccggctcgccggagaagatcaaggagctgcgcaccaaggagatcaagaacggacgcctcgccatgctcgccgtcatgggcgcttggttccaggccgagtacaccggcaccggccccatcgacaacctcttcgcccacctcgccgaccctggccacgccaccatcttccaggccttcacccccaaatgaggagctctgatgaacttggcagttcgaggagtgctaccacacatgcatgcattgttaggtttgatggccgatatggaactttttctttttgttgggggcggactactgggtagactgtcaacgatgatgatgatgatgatgaaatgttcgtggtgcgatgcatggtgtacttgtactatgttgtaactaatgtaaaaatgcgatggtcgttagatgctatgtcctcttaattaaggcggacctacatgcaagtaaggatgcaaataagggtattcagtatttaattgaatactcattattttttgcaaaaaaatatgtatacatgtatatgttactagcc

SEQ ID NO: 141894 - DNA, 1733 bp, Zea Mays
aactttccctgcaagaatggatcgcgagaccaagaacagtagaccaaagacaaaggaaggcgagggccaccatccccaaaacccgtaaaaaaacccgaattgacaaattgagtcgacggggaaggaaataaagaaggggaagagcacgcgccgccgccagcaccgcgtccgccatggccgcctcctcccgccgcgcgtctcaattgctggggtccgcggcctcccgcctcctcctcgggcggggcttcgccgcggcagccgccgcggcgccctcgccggcggtcttcgtcgacaagagcacccgtgtgatctgccagggcatcacggggaagaacggcaccttccacaccgagcaggccatcgagtacggcaccaacatggttggtggagtgactcccaagaaaggtggaactgaacatttagggctcccagtgtttaactctgtagcagaagctaaggctgaaacaaaagccaatgcatctgttatatatgttccaccaccatttgctgccgccgctataatggaggcaatggaggctgagctcgaccttgttgtctgcattacggaaggaattccccagcatgacatggtgaaagtgaaggctgcactaaatagacaatctaaaactcgattgattgggccaaattgccctggtatcattaagcctggtgagtgtaaaattggaatcatgccaggttacatccacaagcctgggcgtattgggattgtatctcgttctggtaccttgacatatgaagcggtgtttcaaacaacagctgtaggcttggggcagtcaacttgtgtaggcattggtggtgacccattcaatggcacaaattttgttgattgccttgaaaaatttgtcgatgaccctcagacagaaggcattgttctcatcggtgaaattggaggtacggctgaggaggatgctgcaacgttcatccaggaaagcaaaacacaaaagcctgttgttgcattcattgctggacttacggcacccccaggccgtcgcatgggtcatgctggagctatcgtggcaggaggaaagggtactgcccaggacaaaatcaaggcactcagagaggctggtgttaccgttgtcgagtcaccagcgaagattggttctaccatgtttgaaatcttcaaacagcgtggaatggtagaatagacacagtggtacagtagagagacattgagaaaccgctttttgatgcttgcgggcaatcgcgagcaattcctcggtagatccttctccctggccacaaacaaaactactgaggttttcttttcgtacttgtcttatctttggaagatgtcctggccttcttcacttggataacctttcgctgagctcatttcaataagacgtttcggagccatggaaatgctatgtcgcttggagtcaatgtggatgcctaatttcaaatttttattcttcatacatttcattctaggtttacttttctgtttgcttgtattatattatcagcgctacattgcccacacagctgtggaagattgctttgcttgtgtcatgtttaataggtttctcacgactccgtgttggctgatcatcctcactgaatcattgaactgtctacaaatgtcctcattactgaatactccttccagaatgataagtgtattcttgttttccaccacgggaaagctgaatttcattatttgacagtaacaaaattacaaaggtttgtaactaagaaaaaaggaacta

SEQ ID NO: 141895 - DNA, 393 bp, Zea Mays
atggaggtggcccatggaatgacgggcagctcctcagcggtgatggtcgccgccacctcgccctactccttttccatctccggctccacggtggagaccatcaagaccgtgcccacccgccgaggacccgttgcgcaggaaagacttagcaaagcggcagatctagtgagacattgtgtggagacgtgcgctgactcaccatgccgcttcaaggacggagatgccgatggcagagaaggtgctggaggcggcggaaggggcacaagccatggagcgccgcgtcgccgtcaccatcccacgcgagcatcgtcaggaggtggttgcagtgtgcagggagggccgaggacggaggcgctgatggagacgatgatgtcgatggcggagaaggtgtag

SEQ ID NO: 141896 - DNA, 688 bp, Zea Mays
ctccatctcagcgtcgtcgccagaaacgcttcgccgccgattcgcctgggtccataaaaggcttggctctcccatccgtcgtcgcccccatcgcgttgtccctagagaggaagcaaaggcacatgaccgccgtcttcgggtgggacaacgagtccgtcctcctcgatgcgatggtcgttgaggccaccctcatctgtgagtcccatcgcaagaggcgggcctccacctgctccaacgatgacggcatcggatccaacaccaaatatggagatacggttgacagcctgcagcagggctcctctcttccacgctgcgaaggtgacttataggtgtacttagcaatggtgcaaatcatgcccatccacgagatcttggcctcaacgccgattgagaagatgacgttgcaaatatttcagacttgtagagccctcgagcacctccatctcttgttcagttgcttatattagtcatctgttccctatgtttaaatttgatagtagattgaggcaacatataaacttcaggtcaagataagaagagacaaaggaagaacagtcaaatgagaaaccttttcagtcagtatagaatgacatcttttttctttcagttcaggttcagagacacatgcatgtaagaatacattgcagactaatctttgttgtggcatgagtgtgaattattttatttt

SEQ ID NO: 141897 - DNA, 2445 bp, Zea Mays
cgacgtttttggtatgttttttgtcgccgtcaccccgtgccggggccggggccggggctgcctgggcaccggtcggtaggcagatcggggtgacggccgtgacgtgacgcgcgccgccccgccacctcaagtcggcgattgtaaattctgaaaaaaatgcttggcctcccacccgagcgggctccgctcggacctcggagcacccaccacatcactgtacttttttatatttctcctccacgattgcgttgcgtccccgccgctgctccctccgcgctccgctcttcctcccgtcctccgctgcacccctaccttgcctgcctgcctgccctccaagcgacgttccttgtgtccccgactccccgtcgccttcctcgggctgggtcccgactcccgagatatagttgcggcggggtttccttcttcgaaaaagttctgaactagaggagccgcgcggcgcgggcgggcagaaaaccggagaccctcgccggcgcaggtgttaattctgtaatcttgtcaacttcagttaatggttaatatgagggacattgagacatcaaacgacggacaattggacgagcccttagggcgagtgtccataatctcttatggttctgggcatatgctcaatgacatcacatcaagttgttggtttacctatttgctggtgttcttgacggatgtgggactcagtccaggcgatgctgctattgtcatgctttctggacaattggcggatggcttcacaacaatctttgttggggaattgatggatcgctttgggcatttcaaactgtggcatgcaggaggatctattttagtggcaatttccttctcgtctgtttttggtagctgtgttccttgcaaacttatgggaactaattcatctactttggagactgttggatacagcacatttgccactatttttaatgttggttgggcagttactcaagtcgctcatatgtctatggtaaactgcatgtcatcaaatccaactagccgggtttcacttgtaagctgtcgtaatgccttcacgatggttgcaaatcttagcctgtatggcattgctttgttgatatttactatattgcagtcagtgaacgtaatgtttcagtatcgttggattgcttatgtgtccatttccattggatcttgctttgttgtcatcttcttggttggaaccaaagagccaggatcaattcggcactgtgtagataagagtctttccagaatttcatggacctactggttcaagaaagtattgtactaccaagttgctctagtctatactctgactagactggtgactaatgtttcacaggcatttcttgctttctatgtaatcaatgatttagaaatgagtcaatcctccaaagcattggtacctgctattatctacatctgcagtttgatagtatctgtaatattacaggagactagatggtcaagttggcgtcttaagctttacttttcagctggagcagtgctttggatattgtcaggtcttggaattgtttttctaccgagcagaatgcacaacctcatgtatgctatttcaatcataataggagctgcgaatgcacttatgacagtgacaagtattagcatggaaggtgttttagtaggagaagatctaaatggttgtgcttttgtgtatggctcattaagttttgttgacaaagtttcatgtggagtagttctgtatattcttgagtcctatcaaggaagtacagagatcagatcaaatttaggaacagcatttggctattcaattacaagacttggcttgggcttagttccagctgtctgttcgctgctttcatcaatagtggcttataccatggacctccctgaccctgatactcggcggagacctttggtggagccccttctagtataacttcactggtgacctgttacagtttcatcctgaacatttacattaattgctcgatagaatgacactgctgctggagcctgaagatactactgacattataggcaaaggagcaatcgggtacctctggtcaattctctttgacttcatatgtatagtctgaataaattgtggtggaaaacatgtactcagaaacgttgagtagggattagaatttataagtagcataggggcaagaagattagtattgatcatactgcgcttacgagccattctgcaatccaatgtaaatataacttaagcttcattgttcagtacaacgcattgcctgtacggtactacctccattctcaaatatttactacctccattctcaaattagtaaaatgcaatagagaagcatgtagatactttcagttttcaagcaactaatgcaaaaccagagaaacattaccagctctaggcaataaaaaccatggatttaggtgatcattgtaaatttaatgctgatgctttattagatctgacccaaaaagtacaaatga

SEQ ID NO: 141898 - DNA, 429 bp, Zea Mays
caggacccacaaaagtacactacaaagctgtgcaaaatggctccagcgattgccgccatgctcacgatgcttctgctgctcaccgctcatgcctttgcaggtcacgtggaaagcgagcatctgggcggaaggcaagcccaagggctgcaggagcctcccctcgtcgccggcggagcgttcccagatagccaatgtgccgagacgcgtctgtacagagggccgtgcgtggagatgctgtgcgccgccgcttgcctggtgcagatgcgccatggcggacactgcaggggaaacttcgtcaagggccgctgctactgcctctcgtgctcttgatagtcgcctagtgagacgttcgttcacgttcgtgccgcgaatacgtacagcgatgatggaatattggaatggaataagaataatcatagactcttcagc

SEQ ID NO: 141899 - DNA, 101 bp, Zea Mays
ggacagtcggatgaagtaccactctgtacgcagtggactaggaagaggctaggagtagctcacattcccagagaagatactcccacatcattaaaaaaaaa

SEQ ID NO: 141900 - DNA, 1783 bp, Zea Mays
gctaggtctttctaaggtccactgacaaaaccctggctcgttccccgctctacgggcctaaacctcacctcgccggcggccaaaaatcgaagcaccgaaccagcggctgcggcggcggcggtgcggcaagtgttgaccatggcggagctaaagcggttgtcggagagccgtgacctgacgcggattgagcgcatcggcgcgcactcccacatccgggggctagggttggactcgtccatggaggcgcgcgatacctcggagggcatggtcgggcagctccacgcgcgccgcgcctcggggctcatactccagctcatccgccagggcaagatcgccggccgcgctgtgctccttgcgggccagcccggcactggcaagaccgcgctcgccatgggtatcgccaagtcgcttggtgcggagacgcccttcgcctccgtcgctgcctcggagctcttctcgctcgacctctccaagacggaggcgctgacgcaggccttccgccgcgccataggcgtccgcatcaaggaggaggccgagatcattgagggcgaggtcgtggagatctcaatcgaccgccctttgtcggcctctggcgttggcggcagctcagttgctccttctggtgcaactgccgctggtaagtcaggggcggctcacgctgaagaccacggacatggagactgtgtacgagctcgggggaaagatgattgaggctcttgtgaaggagaaggtgcagagtggagatgtaattgcgcttgacatggcctccgggaaggtcaccaagcttggccgctccattgggaggtcgcgggattatgatgccgtaggtccacacaccaagtttgtcaagtgtcctgatggtgagctccagaagcgcaaggaggtcgtgcactgtgttaccttacatgagattgatgtcatcaatagcaggacacagggttttcttgcactgttcactggtgacactggtgaaattcgtgcagaggttcgggagcagattgacacaaaagttgcagagtggagagaggaaggaaaagctgatattgtccctggtgttctgttcatcgatgaagtccacatgctagacatcgagtgcttctccttcctgaaccgcgcgttggaaaacgacatggcgccgatcttagtaatcgcaacgaaccgagggatcacgtctatccgcgggacaaactaccgctcgccgcatgggatcccgccagacttccttgaccggctactgattatcacgacgcatccctacacggaggatgagatccggaagatcctggatatccggtgcgacgaggaagacgtggagatgtccgcggacgccaaggttctgctcaccaagatcggtgtggagacctctctgcggtatgccatcaaccttatcacatctgccgcgctagcctgccagaggcgcaaggggaaggtggtcgagatggaggacattagccgggtgtaccagctgttcctggacgtgaagcgatcgacgcagtacctgatggagtaccagagccagtacatgttcaacgaagtgccggggcaagcagatggagaggacgccatgcaatcgtagatgaactttcctttacatggtgtgtgtgggttatagtatgtaccgcgtggcgtatatttatgatgcgtctttcttgttcaggttgctgttaccctgacccaaggcgcggtgtgtgcggtggactgtttgttagcttgatgtaggtgactatgcaactcaatctatcttattaaattcaccccggttggaaaccgtggtttgtttaga

SEQ ID NO: 141901 - DNA, 1645 bp, Zea Mays
atggcggagctaaagcggttgtcggagagccgtgacctgacgcggattgagcgcatcggcgcgcactcccacatccgggggctagggttggactcgtccatggaggcgcgcgatacctcggagggcatggtcgggcagctccacgcgcgccgcgcctcggggctcatactccagctcatccgccagggcaagatcgccggccgcgctgtgctccttgcgggccagcccggcactggcaagaccgcgctcgccatgggtatcgccaagtcgcttggtgcggagacgcccttcgcctccgtcgctgcctcggagctcttctcgctcgacctctccaagacggaggcgctgacgcaggccttccgccgcgccataggcgtccgcatcaaggaggaggccgagatcattgagggcgaggtcgtggagatctcaatcgaccgccctttgtcggcctctggcgttggcggcagctcagttgctccttctggtgcaactgccgctggtaagtcaggggcggctcacgctgaagaccacggacatggagactgtgtacgagctcgggggaaagatgattgaggctcttgtgaaggagaaggtgcagagtggagatgtaattgcgcttgacatggcctccgggaaggtcaccaagcttggccgctccattgggaggtcgcgggattatgatgccgtaggtccacacaccaagtttgtcaagtgtcctgatggtgagctccagaagcgcaaggaggtcgtgcactgtgttaccttacatgagattgatgtcatcaatagcaggacacagggttttcttgcactgttcactggtgacactggtgaaattcgtgcagaggttcgggagcagattgacacaaaagttgcagagtggagagaggaaggaaaagctgatattgtccctggtgttctgttcatcgatgaagtccacatgctagacatcgagtgcttctccttcctgaaccgcgcgttggaaaacgacatggcgccgatcttagtaatcgcaacgaaccgagggatcacgtctatccgcgggacaaactaccgctcgccgcatgggatcccgccagacttccttgaccggctactgattatcacgacgcatccctacacggaggatgagatccggaagatcctggatatccggtgcgacgaggaagacgtggagatgtccgcggacgccaaggttctgctcaccaagatcggtgtggagacctctctgcggtatgccatcaaccttatcacatctgccgcgctagcctgccagaggcgcaaggggaaggtggtcgagatggaggacattagccgggtgtaccagctgttcctggacgtgaagcgatcgacgcagtacctgatggagtaccagagccagtacatgttcaacgaagtgccggggcaagcagatggagaggacgccatgcaatcgtagatgaactttcctttacatggtgtgtgtgggttatagtatgtaccgcgtggcgtatatttatgatgcgtctttcttgttcaggttgctgttaccctgacccaaggcgcggtgtgtgcggtggactgtttgttagcttgatgtaggtgactatgcaactcaatctatcttattaaattcaccccggttggaaaccgtggtttgtttaga

SEQ ID NO: 141902 - DNA, 175 bp, Zea Mays
aaagaaagaaagaaagaaagctcgcgaatggaatcctcctccgcggcggtggttgtgatttgaaagccatgccaagccaatggggtaggaaagccaagctagcgagagggaaacggaagaaaggcgaccttcgtactgtagcgtagccgttggtttgtaaaaaaaaaaaaaaaag

SEQ ID NO: 141903 - DNA, 3158 bp, Zea Mays
ggggagagacgccacgcgaggggaggaagaggaaaaaaagcagaacagagagagagagagagagagagagagaggtgggaagggaaaaggaaaaggaaaagaaaaaaaagaaatccaccgcccgctgcgccgccgcgcgctgcacacacggtcctccctccctccgagcgctgccggattcagcgaagcaggccagtggctgggacggaggaacgcgagatagatcgagcgccggcgatgccgccaccgcacccgacggacgcggaggcggggcccgagcaggtggcgccgacggaggcggtgcccttggcggctgcggcgccggcgccggtcaagaagaagcggaaccttcccgggacgccagatccggacgccgaggtgatcgcgctctcgccggggacgctgctggccacgaaccgcttcgtgtgcgaggtgtgcggcaagggcttccagcgggaccagaacctgcagctgcaccgccgcggccacaacctgccctggcgcctgcggcagcgcgggcccggcgcggccccgccgcgccgccgggtgtacgtgtgccccgagcccggctgcgtgcaccactccccgacccgagccctcggggacctcaccgggatcaagaagcacttctgccgcaagcacggggagaagcgctgggcgtgcccgcgctgcggcaagcgatacgccgtgcaggccgacctcaaggcgcacgccaagacctgcggcacccgcgagtacagatgcgactgcggcacgctcttcaccagacgggacagcttcgtgacgcatcgcgccttctgcggcgctctcggggaggagaccggcagggcactggcgccaccggcgccgccatcccctcggccgcctgatttggaggctgaggagaacgttgacaacgacaaggaggaggaggagaatgaggattctgcattggccgaggtggaggtgcctcagcgtgtggaggtggcggtgccagaggagccagagccagagccacagcgcattccatctccaccgccattgccacaggagccaccgtgccgtccgtctccacctccattgccgcaggagcaaccgcgccgggtgtccccgcctccgttgccaaaggagccaccgtgccaccatccgactccacctccactgccaaaggagccacagcggcttccgtttcctccggagcagcaggcagttgtggcattggtgccaaatgtggatgagccagaggtggctgctgtgggaactgtggctgccaaattagaggatgaaaccgatcaagatgagactacctgtttccaggaagctgatcaatacaaggatgccgagctcgaggtctccaatctgctggacaaggacaccccgatgcttccttgcttcctcccctcgccctcagaagccattggcaccgatggaagcagcacaacctgcggcgcgggcggcagcgtttccaattccatcgtgccatctacaaccaccaacaccttcgccggtctgttcgcgtccgccacaacgagcaccacttcccagagcagatctctgcgcgacctcatcggtgtggatcccaccttcctttgccttgcgatcggagcgccctctctgttcccgcagacaagcgcaagcaactcaggcaccttcgctccgcccccggcgccacacatgtccgcgacagcgctcctgcagaaggcaacagaggctggagcgacgcaatcgagctcatcgttcttgaaggagtttgggctcgcttcttcgtcatcatcacctcgaccaaagcagcagcaaccccatggaagggttgctgaaaccagcacggacccatggcagtacaggaacagtaatcagcaaatggagatggagcgccaccagagccatcaacggagggagatggagtccagttcgcaaccgtggcagcacccccgcattacccagcagatggagatggagcgccaccaccagcggagtcatcaacagagggagatggagtccagttcgcaaccgtggcagcacccccgcagtacccagcagatggagatggagcgccaccaccagcggagtcatcaacagagggagatggagtccagttcgcaaccgtggcagcacccccgcagtacccagcagatggagatggagcgccaccaccagcggaaccatcggcaaagggagacggagtccagctcgcaacaatggcaccaccaccaccaccacccgaatgaccagatgatggggctggagagctaccggagtaaccagcaaatggagatggatcccagttcgcagcaacggtgggcgcagcaccagaggagcaaccagcagcagcagatggagatgatggagcggcaccacctgagtaaccagcaaatccggagtacccagcaaatggagaggagggcgatggtatccgggggtggtctgggccttggcctcgcatacgaaagtggaaacccaggcttgcccttgcccgacctgatgacgggaccatcgccactgttgggtcctaagcctgcgacgctggacttccttgggctcggcatcggagggaccatgggcggctccacggccagccgcggcctcccggcattgatggttggaagagagctggacatggggccttcggcacaggtgcctcctgctgctgctgcggcgccgtgggaggacgcaaagaggaagaccaacggccgcacgatcctgtgactgtgaggttttctcccccccttttttctctctctgtaatgcctcggcttgcctgcccattctttcagtcgcagctgtgcttttggtggagctagtagaagaagctcggtcggtaacatgcggacctgtacatagctagctcgatgcatctcatcccggttctggaaaaaaaaaactccgcccccgaattgaagctgttattattatagccacaattcgatcccggcaggatggaacctgacctccgatgccccgtcgctttcagatccggtgaggcaacagggttagtagccgtcgtcgtgtgcggtggtaactcggtactgctttcggaaagatccgagattaggacagcgatggaaaggcgttttcactgttactgtcgatgccgctgctaggtcggcacgggttactttactttacctaacctgccgccggtctgcaagcttcatcgggagtactttggagaagctata

SEQ ID NO: 141904 - DNA, 418 bp, Zea Mays
ctctacagcttcttgcgcctctactgctgacgggagggaaggaagcggatctggtgatccgtggtaacgtagttctcaatacgttatcagcacgctctacctcgacgttgctgcgagatcagatctgcatcaactctccgtcacaccggcaggtccccggccttgccgaactgtcctacgcgacaggcttcgttcccgtttgtcgaaccagaaatcacgatctaatgttggtagaatctcgtaatcgctccaccatgtccggtgaggctccactcaatctcgcccgtgcacccgagttcgtgcccgcctagtcacgagaatcctgcgcatcctatggttctagagtgcgaggtgaatgggggcggctcatgtggtcaaagtcgtgatccattcatgtcgtgggcgtgtacgtgcgtac

SEQ ID NO: 141905 - DNA, 961 bp, Zea Mays
caccccagctggtgccttgccctgtggtcctcgctccttgatccactcctcctgcagctcctcctcgcacagcacgtctcctctccccagcctccctctctttctctgtccttggtcctctccccagcagcctccctctctctttctctatccctggtcctctccagataacctgacacagtggtcacgcttgacaaggagagagaaaggcgttgcagcagctgatccgcgcccgcccggccgggagcgcaggcgaaggatggaacaatacgacgggctctttcctcccgcctacgtggactcctcctcatccctcctcctggtgcccaacgccaacggcactgcgcaggaggagagaccgagagcgcggcgcaggaggcgtcgagcagcgaggtgcggcggcggcggtggcgagctggacggaggaggggaccacaagaagcggcggctgaccgacgagcaggtagagatgctggagctgagcttccgggaggagcggaagctggagaccggccggaaggtgcacctgggcgccgagatcgggctcgacccccagcaggtcgccgtctgggtcccgaaacgccgcgccccgcccaagagaaagctgctcgaggaagaagtcggccagtacatatataatattgagcatgcctttcgtgggcacatgcccggctggaaggtgacgaggctgaaggacaagctggtgctcgccgaggaggagctgacacgattcagatccgcgggcaatgacgcggtctccggtgacggcggagacgtcatggcccgtgccgtctgcagcgggagcccgagctcatcgttctcgactggcacctgccagcagcccggaggaggcggcggcggcggcgatcacctgggggacgacgacctgctctatgttcctgactatgcctacgctgacagcagcgtggtcgagtggtttagcctgtatggactgatgtaa

SEQ ID NO: 141906 - DNA, 2045 bp, Zea Mays
tctatatatatgcgtctccttgagcaaatcacaacaccccacgccttgtctctgaactctgatcagagatcaaagaggtagccgttaagttaacgatggcttccgccgacctcgcagaggccatggagcccgggaagaagagcaacgtcaagtatgcttccgtctgtgccatcatggcctccatggcctgcgtcatccttggctacgacattggtgtgatgagtggagcggcgatttacatcaagaaggacctgaagatcacggacgtgcagctggagatcctgataggcatcatcagtctctactcgctcatcggatccttcgctggcgcgcggacgtccgacaggatcggccgccgcttgaccgtcgtcttcgccgcggtcatctttttcgtgggcgcgttgctcatgggcttctccgtcaactacggcatgctcatggtgggccgcttcgtggccggagttggcgtgggctacgggggcatgatcgcgcccgtgtacaccgccgagatctcgccggcggcgtcccgcggcttcctcacgtccttccctgaagtcttcatcaacctcggcatcctgctcggctacctgtcgaactacgcatttgcgggcctcccgctccacctcggctggcgtgttatgctcggcatcggcgcggcgccgtccgccctgctcgcgctcctggttttctgcatgcccgagtcgcctcggtggcttgtcatgaagggccgcctcgcggacgccagggcggtgctagagaagacctccgcctcgccagaggaggccgcagagcggctggctgacatcaaggttgccgcggggattccgaaggacctcgacggagacgtggtcaccgtacccaaggagcgaaacagcggtgagatgcaggtgtggaaggacctcatcttgtccccgaccccggcgatccgacgcatattgctatcggccgtcggcctgcacttcttccagcaggcttctggctgcgattctgtcgtgctgtacagccctagcgtgttcaggagcgcgggaatcaccggcgacaacaagctcctgggcgtcacctgcgccgtgggcgtcaccaagacgctcttcatcctggtggccacgttcctgttggaccgcgtggggcgtcggcctctgctactgaccagcacgggtggaatggtcatctcgctcatcagcctcgggacggcgctcaccgtcgtggggcatcacccggacgccaagatcccgtcggtcgtcgctctgtgcatcgcgtccaccctggccttcgtcgccttcttctctatcggcctcgggcccatcacgggagtgtacaactcggagatattcccactgcagctgcgcgcgctgggctttgcggtcggcgtggcgtgcaaccgcgtaaccagcgccgttatctccatgaccttcctgtccctctccaaggctattaccatcggcggcagcttctttctctactccggcatcgccgcggtcgggtgggtttttttcttcacgtgccttccggagacccgtggtcgtacgctggaggagatgggcaagctgttcggcatgccagacacggacatggctgaagcagacgacaccgcagccaaggagaaggtggtggaaatgtccaccaagtaggcaagtagatggaacgaaaatacaatattcggcggtgctcgggcagataggcaatgattggtgcagcgtcgcttacaagagcagagctcaacccaacacaaacaaaataaggaaaaaaaaactgaagcagcgtggcaagattggcctctgagaatcagagatgtcgtggtgcactagtgctgcaggacagagacggcgtggtccagcaagagacttccgcgagacaggctgccaagtgacagctatgagtcattgttgtcagagtcgcgtgtgctttgtcatgatcgatgatgttttcgtccttattttacaagaaaattccctctcaacgaatgtaaccaacaaaccattctatgtttttttgacccgtcttgtttctttctttgtttttgatatagttcattgcaggaaaaaaaa

SEQ ID NO: 141907 - DNA, 83 bp, Zea Mays
ggactgtccggtgtgcaccggactgtctggtgagccaacggtcggccgggccaacggtcggctgcgcgatccgcgcgagacac

SEQ ID NO: 141908 - DNA, 82 bp, Zea Mays
gagagactccaagttgtggagattcctcgcgaacgggatatagaaaagaaaagcaaacaccgtggtattcaagtgggtcttt

SEQ ID NO: 141909 - DNA, 807 bp, Zea Mays
cccactgcactgcacctcacctcacctcacctcctccctcggcggaaacatcccactgcccagcccctcttcacgtcttccctcctccggcctgtgttactgccctctgtctgctcgaccagcttgggagcctggctgtccgctctccgatcgagtacggaagcctcggcagctggaggatctgtggcctgagcgcccccgccggacgacgggagagaggtacgtgctgctgctttccttcatctccttccttgggtagctggtactactagctcggggcttgtggcgtgtcagcgtgtgcggtttggcgagtgacgacggaagaagctgctgtcttcgctcttgctttgcttcaatcttcaggtacttgaagctcctctgctgttaactctgcatgctcgtgttagccccgcttcgggtgcagaactcgtactggtccacaatccccgtaggttcttcgtacagcacatccagccgcatcattcatgcctcgcttgtgaggaggtcgttgtgggggggaatttcctgtttctgtttttttgagaccatgtcgtcaacccatgaggtcttaggatgctcacgaagtggtggtggttagtacgcggatttctcgatccgctatctaaaaacaacagctgatctacaagcttttgaccacctaattttctggctttttttaagattcttgcgcggggggtgggttggttggttcaacgtgcgggtcaaactccctgtgccggggttggaaaaatcttgtgttgactgttcggaccagtcctcggcatgtactcctgcctgcaggacagc

SEQ ID NO: 141910 - DNA, 2380 bp, Zea Mays
cccactgcactgcacctcacctcacctcacctcctccctcggcggaaacatcccactgcccagcccctcttcacgtcttccctcctccggcctgtgttactgccctctgtctgctcgaccagcttgggagcctggctgtccgctctccgatcgagtacggaagcctcggcagctggaggatctgtggcctgagcgcccccgccggacgacgggagagagcgtgtgcggtttggcgagtgacgacggaagaagctgctgtcttcgctcttgctttgcttcaatcttcaggttctgtttcatcctcatataacagaggactagaagacatccacacgtaccatcaatcaaattgcaaatctctgaatttacctcaaaatcggacgtgcctgttgtcatataccagaagcaattgataacttggagttgtagtagtctaccgtactctctactgaacaagtatggccgaccctccaacttcccgcatggtgcagcaccccttcggcgacatcccaagccagactcccaagcaattcctatactctggtagctcacagcacctctgccatccataccagtcagcttcggacgcccacgtcgcgccgcagcgtcactacaccgtgaggtctcagtctcagtctcagtcaccggatgctgggtctgaagactttgagacgcacagcaggcagtacacgctggactcctcttcggcttccggttgctcagggcacggttctccctcctgtcagagtgtccatgccgggagtcgcagccctgtgtctcactctcatgacgacagccactccggctccaccaatggcaacggatcgcctgcgagcgcgtcgtgtgtcaccgaggaccctactgacctcaagcagaaactgaaggatcttgaggctgtgatgctggggacggacacggacccagagaccgtggacagtctcgagatcgccatagcggaccggctttcggtggagcccgaggagtggaagaacaacatggtgagcgtgcctagaggggacctgaaggagctgctgatcgcctgcgccagggcagtggagcaaaacaacggctactccatcgacctgatggtcccagagctgaggaagatggtgtcggtgtccggcgagccgctcgagaggctgggagcctacatggtggaaggtctcgtcgccaggctcgccgcctctggcagctccatctacaaggctctgaggtgtaaggagcccaggagctccgacctcctctcctacatgcacttcctgtacgaggcctgcccctacttcaagttcggctacatgtcggccaacggcgcgatcgcggaggccgtcaagggagaagacaggatccatatcatcgacttccacatcgctcagggggcgcagtgggtctctctcctccaagcccttgcggcccggcctggcgggccaccgttcgtgagggtcaccggcattgatgatcccgtttcagcttacgcccgaggcggcggcttagagttggtcggcaagaggctgtcacacatcgctggcctctacaaggtgccctttcagttcgacgcggtcgccatctccggcagcgaggtggaggaggggcatctgggcgtcgtccctggcgaagccgtcgccgtcaactttactctagagctgcaccatatccccgacgagaccgtgagcacggcgaaccacagggaccgggtcctgaggctggtcaagggcctgtcgcccagggtgctcacgctggtggagcaggagtccaacaccaacacggcccccttcgcgcagcggttcgcggagacgctggactactacgcggccatcttcgagtccatcgacctggcgctgcccaggggcgacagggagcggatcaacatcgagcagcactgcctggctcgggagatcgtcaacctggtggcctgcgagggcgaggagcgggtggagcggcacgaggtgttcggcaagtggaaggcgcgcctcatgatggccgggttcaggccgtccccgctcagcgcgctggtcaacgccaccatcaagacgctgctgcagagctactcgccggactacaagctcgccgagagggaaggcgtgctctacctcggctggaagaacaggcccctcattgtttcatcggcatggcactagtgttggcctcgtggagaatgttggcctcgtggagaatgtttcttgtgactttctacctcgttgttagtatagatatgcttggctgagcactaaaactatatataggaagcctgtggtggtactgagttgtacaacacctataacctaataacctgatgttgtgaattgtgatggcagtcactaccagcctgataatgtgtagcagtaagttcgagtatatgtttcagttaatcgattttgctttg

SEQ ID NO: 141911 - DNA, 2311 bp, Zea Mays
cccactgcactgcacctcacctcacctcacctcctccctcggcggaaacatcccactgcccagcccctcttcacgtcttccctcctccggcctgtgttactgccctctgtctgctcgaccagcttgggagcctggctgtccgctctccgatcgagtacggaagcctcggcagctggaggatctgtggcctgagcgcccccgccggacgacgggagagaggttctgtttcatcctcatataacagaggactagaagacatccacacgtaccatcaatcaaattgcaaatctctgaatttacctcaaaatcggacgtgcctgttgtcatataccagaagcaattgataacttggagttgtagtagtctaccgtactctctactgaacaagtatggccgaccctccaacttcccgcatggtgcagcaccccttcggcgacatcccaagccagactcccaagcaattcctatactctggtagctcacagcacctctgccatccataccagtcagcttcggacgcccacgtcgcgccgcagcgtcactacaccgtgaggtctcagtctcagtctcagtcaccggatgctgggtctgaagactttgagacgcacagcaggcagtacacgctggactcctcttcggcttccggttgctcagggcacggttctccctcctgtcagagtgtccatgccgggagtcgcagccctgtgtctcactctcatgacgacagccactccggctccaccaatggcaacggatcgcctgcgagcgcgtcgtgtgtcaccgaggaccctactgacctcaagcagaaactgaaggatcttgaggctgtgatgctggggacggacacggacccagagaccgtggacagtctcgagatcgccatagcggaccggctttcggtggagcccgaggagtggaagaacaacatggtgagcgtgcctagaggggacctgaaggagctgctgatcgcctgcgccagggcagtggagcaaaacaacggctactccatcgacctgatggtcccagagctgaggaagatggtgtcggtgtccggcgagccgctcgagaggctgggagcctacatggtggaaggtctcgtcgccaggctcgccgcctctggcagctccatctacaaggctctgaggtgtaaggagcccaggagctccgacctcctctcctacatgcacttcctgtacgaggcctgcccctacttcaagttcggctacatgtcggccaacggcgcgatcgcggaggccgtcaagggagaagacaggatccatatcatcgacttccacatcgctcagggggcgcagtgggtctctctcctccaagcccttgcggcccggcctggcgggccaccgttcgtgagggtcaccggcattgatgatcccgtttcagcttacgcccgaggcggcggcttagagttggtcggcaagaggctgtcacacatcgctggcctctacaaggtgccctttcagttcgacgcggtcgccatctccggcagcgaggtggaggaggggcatctgggcgtcgtccctggcgaagccgtcgccgtcaactttactctagagctgcaccatatccccgacgagaccgtgagcacggcgaaccacagggaccgggtcctgaggctggtcaagggcctgtcgcccagggtgctcacgctggtggagcaggagtccaacaccaacacggcccccttcgcgcagcggttcgcggagacgctggactactacgcggccatcttcgagtccatcgacctggcgctgcccaggggcgacagggagcggatcaacatcgagcagcactgcctggctcgggagatcgtcaacctggtggcctgcgagggcgaggagcgggtggagcggcacgaggtgttcggcaagtggaaggcgcgcctcatgatggccgggttcaggccgtccccgctcagcgcgctggtcaacgccaccatcaagacgctgctgcagagctactcgccggactacaagctcgccgagagggaaggcgtgctctacctcggctggaagaacaggcccctcattgtttcatcggcatggcactagtgttggcctcgtggagaatgttggcctcgtggagaatgtttcttgtgactttctacctcgttgttagtatagatatgcttggctgagcactaaaactatatataggaagcctgtggtggtactgagttgtacaacacctataacctaataacctgatgttgtgaattgtgatggcagtcactaccagcctgataatgtgtagcagtaagttcgagtatatgtttcagttaatcgattttgctttg

SEQ ID NO: 141912 - DNA, 858 bp, Zea Mays
ctccccgctataaataggcgccggcgcaacggtccgctccttcccctcctcctcttgtgcgcccccccatccctcaactcgcgcgcgcacggccgcatccgcggcacgccgcgccgcatcccgtgcccgcgcaaaaccggatccgccgccgccatggcggtggaccgcgtggacggcgaggaggcgttcgaggaggtggacccgacggggcggttcgggcggtacgcggacgtgctggggctcgggtccgtcaagaaggtgtaccgcgggttcgaccaggaggaggggatcgaggtggcgtggaaccgcgtccggctgcggtcgctggccgaccgcgaccccggcatggtggagcgcctccacgccgaggtgcgcctcctccgctcgctcagccacgaccacatcatcggcttccacaaggtgtggctggaccgcgacgccggcgtcctcaacttcatcaccgaggtctgcacctccgggagcctccgcgagtaccgccaccgacaccgccacgtctccgtcaaggcgctcaagaagtgggcgcgccagatcctcgaggggctcaaccacctccacacccacgacccctgcatcatccaccgcgacctcaactgcagcaacgtcttcatcaatggcaacaacggccaggtaacatacatacgatcgcctgttgccccctttctcgatacatcctttatttcgtcaattctagagattttcgtcgtgtcccagccgatcctgttctattcattcaattcaatcagaacgcggtaaggccaaaattttagggttttctaattattagcgaaaaataggatagattagatatatataaaatttgaattgggttcgtgtctg

SEQ ID NO: 141913 - DNA, 1738 bp, Zea Mays
ctccccgctataaataggcgccggcgcaacggtccgctccttcccctcctcctcttgtgcgcccccccatccctcaactcgcgcgcgcacggccgcatccgcggcacgccgcgccgcatcccgtgcccgcgcaaaaccggatccgccgccgccatggcggtggaccgcgtggacggcgaggaggcgttcgaggaggtggacccgacggggcggttcgggcggtacgcggacgtgctggggctcgggtccgtcaagaaggtgtaccgcgggttcgaccaggaggaggggatcgaggtggcgtggaaccgcgtccggctgcggtcgctggccgaccgcgaccccggcatggtggagcgcctccacgccgaggtgcgcctcctccgctcgctcagccacgaccacatcatcggcttccacaaggtgtggctggaccgcgacgccggcgtcctcaacttcatcaccgaggtctgcacctccgggagcctccgcgagtaccgccaccgacaccgccacgtctccgtcaaggcgctcaagaagtgggcgcgccagatcctcgaggggctcaaccacctccacacccacgacccctgcatcatccaccgcgacctcaactgcagcaacgtcttcatcaatggcaacaacggccaggtcaagatcggcgacctcgggctggcggcgatcgtggacaagacgcacgtggcgcacaccatcctgggcacgccggagttcatggcgccggagctgtacacggagacgtacacggagtcggtggacatctactcgtacggcatgtgcgtgctggagatggtcacgcgggaggtgccctacgccgagtgcggcagcgtcgtgcagatcttccacaacgtcacccggggcgtcccgcccgcggcgctcaagcggctcaaggacgccgagctgcggggcttcatcgagcgctgcatcggccagccccggaaccggccctcggccgctgacctcctgcaggaccccttcttcaacggcgtccgtggcggggacgacgacgacgacgccgcggcgctcgccgacgcctccagcgtcgtcgccgccgcgcccgtgccgcgccccaggagctacgtcgacgacctcgccgggctccggctggactgacctgaccgtccctcccagcgttctgcctttcatcagtaccgggattccggcgcgtgttagacgtgttttattagaagtggattcctggccggcgagcgactgcctgcaagtgtgtatagattattgtttatttttacgtctccccggcgattggctagttttcactgtacctgtaccaataattgttgttggctttgcgccagatgaagcgctgtatttgactttgcgtgctgattctttcaaacagaggttggttggcaaacttataatatttccctgcgctgagctggataccgccatggatgcagtagacgcgagagatgagggcagcgttctggcctgtctctgccgggggccctggggacatggacggcggcaagccgagcgtcgcctacctgtcacctgagcttctcgtcccttgacgcatcaggaacatcatgggcagcccgcagctgtgactgcaagctgcagacaaactgtcaagcaatcttgcacaggcacaggcagaggctggatgtgcaatccagtttatgaagccttgtcggccattgtccttactgttgtcctttgttatgttcattcatgtgacatctgtcacctgtgaaagctg

SEQ ID NO: 141914 - DNA, 2570 bp, Zea Mays
gggaaacgccgctgccagccaccgtcgtcgcagtgccgcacgcgcacccaggccccaggcccagggggcgtcgtaagaaaacctgcacgagggggagggcgatccgatttcccagcctgaaaactggggttcaactcccattcgtgcgccctcagccattgtacccttttgcacgcctccctatgttacttccttcctcccacactcctccgtctcctccatgcgggctgctgtataatactctgccaccgctgctgcggtacggtgctgctaccaaaccgcaggaaggacgggaggcttggagcttgcctgccggggaccgagctgctgccggtgctcgaagcgatgaagctggtgacgggggtggatttggagacggaggtggagctgtcgccgatcgccaaggccgaggaagcggccgtgtttagcccctactccagtccgagcaccgccttattgctgcagaggagagtcgtgtcgtggtccacggagaccgggtctccggcgacggtccgcgtgcgcctcggcgacagaagcttcgacctgcacaaggaccctctggtgtccaagtgcaagtacttcagcgaggcgtcgctccagtccggcggcgacgtcgtcgagctgccggccagctccccgggggtccgcgaggcgttcgaggcggtcgcgctcttctgctacggcgacgccgtggcgctggaccccttcaacgtcgcggcggtgcggtgcgcggcggagctcctgggcgtgggcggcctcggcgcgcgctgcgacctgtacatcagccaggtggtgctgcagagctgggacgacgcgctcatcgtgctgcagcgctgcctgcccctgctccccgccgccgaggagctcctcgtcgtcagccgctgcgtcgaggcgctggcgttcatggcgtgcatggagatcctcgacccggagcagcggcggaaccagctgcccggcgccggcggcgcggcctcgcgcgcgctggtcggccgccgctgggacgccgagctcgtcaaggagctcgccgcgcgcgacctctgggtcaaggacctgctcgcgctcccgttccagttcttcgaccggatcgtgcgggcgctgcggcgccagggcatgaaggagaagtacgtcggccccgtcgtcctcttctacgccaacaagtgggtgctctccaagaagacgcacaggttctgggcgaccacggacgacgaggccatcgacggcgagaccgacgccaacaggagggccgccgcgatcctggagggcgtggtcgggctgctcccggccgagtcgccggcagtggctgcgaacggcgccatccccgtggcgttctacttcgccctgctgtcgcggtcgctcaccctggagctgagcgacgaaagccggacaaaactgcgaggacatgttgcgtcgaatttgcggttcgctcgcgtggacgacctgccgctgccggaggaagaagccgacggccggtccatcgcagatagcagggaggtgagggcaatggagagcatcgtgtcaaaccatgcctccgtccaaaggaaaggcgtggaggccgtctccgagctgtgggatcggtacctcctgcagtttgctggcgatcccaagctccggccggaaaggctagcagagctgatcggagccattccggcaagcgaccggaagacgcacgaccacttgtacgaagcaatcaacacatatttagtggagcaccggggtctgtccggggaggagaaggcgacgctgtgcggccacctggattgccggaagctgtcgcacgaggcgtgcgtccaggccgtgcagaacgagcggatgccgctccggctgatcgtgcaggcgctgttcgtgcagcagatgcacacgcaccgcgccttcacggagtgctccgactcgttccggtgcacgcgctcaggggaactcgtcccgggcgccggcgggtacacgccgagccccgggtgccccgccatccccaccagccagcccctcagcggcagcagcccgtacgacagccaccaccacgccccgcgcgacgccaagctccgcgcccgggacgacgcttcgtcggactacgagacggccagcttcaggatccaggcgctggagcaggagatcatctcgctgaaacggaccctgcagcagcacaacaccctgaggggctcggcctcggctcgcggggaaggcaaggagccgagcttcagggtcgccgtagacgcgggcgcgccggcgaccatcaagcgtcgagccacggtctccggcagctgcatcggctccatgcgctggggctcgcagcgccggtgcgccagcaggatcctgcgcgtcttcgcgaggctagccgtgttcgggaggggtaggtcgagggggaagcagagcaagtgcagcgcatcaacagagcagcagaattgcatgtagaacagtacaagcacacgtgaggaggaaattgaatcatttactcgtggaatagagagggcaggtgttacggtagatttgggaagcatgtatgtaagcagtggttttgtgtgtaaatattctagcaatgtcaaatatctcaagcggtagttattgtcacgtggtca

SEQ ID NO: 141915 - DNA, 1824 bp, Zea Mays
cgcctccagcgcggcgccgacctgcctctccattatttatgcatttccgcccccacccttacctttcccaattcagccgaggaccgcaatcgcagggcactgggagcgattaaaaaaggcagcctcccccgcaagggtaaaaaacaaacaaccaccgcatcgcggcaggcaaggcatcgcccgccagccaccgagcggagggggaagcaaaagcttgataaaaaggagaggaggagacgagacgtgccgtccggacccaagcaacttcctcccaccacctcctccctcccatgcccgcatcgagatcttagcgggacagcgagaggagaggcgacgccgacgcgggcgccccctgatccctcctcgccgccgccgccgaccgaccgaccgggggaggaggaggggaggggaggacggacacgatggaggcggactccgggaagctcttcgtcggcggcatctcttgggagacggacgaggatcgcctccgcgcgtacttcggtcgctttggcgaggtcaccgaggccgttatcatgcgggaccgcaacaccggccgcgcccgtgggttcgggttcgtcgtcttcgccgattccgggatcgccgaacgcgtcaccctcgataagcacatgatcgacgggcgcatggtggaagcaaagaaggccgttcctagggacgaccagagtattgcgagcaagaacaacagcagcatagggtcacctggaccaggacgcactagaaagatcttcgttggaggtctggcctcaaatgttaccgaggtcgaatttaggaggtattttgagcaatttggtgtgataaccgatgtggtagtgatgtatgaccacaacacgcagaggcctaggggctttggtttcatcacatatgactcagaagacgcagtggacaaggcactgcacaagaacttccatgagctgaatggtaaaatggtcgaggttaagagggctgtgccaaaggagcagtctcctggtcctattgcacgttcacctgcgggagggcagaactatgctatgagcagggttcataacttcctaaatggcttcaaccagggttacaacccgaaccccctgggtggttatggcatgagggtggatggaaggtatggtctccttacgggtgcacggaatgggttctcttcgtttggtccaggttatggaatgggcatgaatgctgaaggtggaatgagtgcatattttggtgcaagttctggttttgccaatagctccaatgggcggcaaataggttcttacttcaatagtagttcaaacagattaggcagtccaattggttatgttggccttaatgatgattcaggatcaatactgagttcaatgtctagaaatgtttggggcaatggaaatcttaactacacagggcaaccctacaaacacgaattcttttgctccacctgtaggtggtgggggtattcctggtgatgaaattagttggggaaaccttacttctgttcatgggatgggcaacatttcaagccttggaccgggaaaccttggccgtggaaccggagataacaactttggattgccttctggaacctatgtgaggagcaactcaactggtacaattggcgagccattttctgcatcagccaatccatatgaatcgaacaatctaggtgcatatggcagcagttctatttatggtgactccacctggaggttcaactcatctgaggttgatatacctccttttggtcatgatcttggaaatgttgatccagatattaaatcagaaatatcagcaaactatatgggcaactatactgttaataataatcagacaagcagaggt

SEQ ID NO: 141916 - DNA, 2347 bp, Zea Mays
cgcctccagcgcggcgccgacctgcctctccattatttatgcatttccgcccccacccttacctttcccaattcagccgaggaccgcaatcgcagggcactgggagcgattaaaaaaggcagcctcccccgcaagggtaaaaaacaaacaaccaccgcatcgcggcaggcaaggcatcgcccgccagccaccgagcggagggggaagcaaaagcttgataaaaaggagaggaggagacgagacgtgccgtccggacccaagcaacttcctcccaccacctcctccctcccatgcccgcatcgagatcttagcgggacagcgagaggagaggcgacgccgacgcgggcgccccctgatccctcctcgccgccgccgccgaccgaccgaccgggggaggaggaggggaggggaggacggacacgatggaggcggactccgggaagctcttcgtcggcggcatctcttgggagacggacgaggatcgcctccgcgcgtacttcggtcgctttggcgaggtcaccgaggccgttatcatgcgggaccgcaacaccggccgcgcccgtgggttcgggttcgtcgtcttcgccgattccgggatcgccgaacgcgtcaccctcgataagcacatgatcgacgggcgcatggtggaagcaaagaaggccgttcctagggacgaccagagtattgcgagcaagaacaacagcagcatagggtcacctggaccaggacgcactagaaagatcttcgttggaggtctggcctcaaatgttaccgaggtcgaatttaggaggtattttgagcaatttggtgtgataaccgatgtggtagtgatgtatgaccacaacacgcagaggcctaggggctttggtttcatcacatatgactcagaagacgcagtggacaaggcactgcacaagaacttccatgagctgaatggtaaaatggtcgaggttaagagggctgtgccaaaggagcagtctcctggtcctattgcacgttcacctgcgggagggcagaactatgctatgagcagggttcataacttcctaaatggcttcaaccagggttacaacccgaaccccctgggtggttatggcatgagggtggatggaaggtatggtctccttacgggtgcacggaatgggttctcttcgtttggtccaggttatggaatgggcatgaatgctgaaggtggaatgagtgcatattttggtgcaagttctggttttgccaatagctccaatgggcggcaaataggttcttacttcaatagtagttcaaacagattaggcagtccaattggttatgttggccttaatgatgattcaggatcaatactgagttcaatgtctagaaatgtttggggcaatggaaatcttaactacacagggcaaccctacaaacacgaattcttttgctccacctgtaggtggtgggggtattcctggtgatgaaattagttggggaaaccttacttctgttcatgggatgggcaacatttcaagccttggaccgggaaaccttggccgtggaaccggagataacaactttggattgccttctggaacctatgtgaggagcaactcaactggtacaattggcgagccattttctgcatcagccaatccatatgaatcgaacaatctaggtgcatatggcagcagttctatttatggtgactccacctggaggttcaactcatctgaggttgatatacctccttttggtcatgatcttggaaatgttgatccagatattaaatcagaaatatcagcaaactatatgggcaactatactgttaataataatcagacaagcagaggtatcacttcctaggaagagtattattatattcatacatgacttgggataggtgaaatacccactactatatcaggctttcaggtgcatgactgtgaattggtgatgtcagattaatatacaggttagttgcttgtttctagttaaggtaaccagaggtgtggtttacaacaccaaaaatgctagaggagcggatacaaacattttgtgaagctttcagattttagtttaatttctacatctattaggccttcgttttttaaatgagatgtgcagtgtttgattgcggcacaaacttagaagtgttccaacataagctggaattctgtcatacggaaggataaacttgtataccaaagaaatgctgtattatctttgcccatttatggctacaatagcttgcatgtttttattctcttcaaccattccatttgtatactagagagttgcttggcttactattcaaactattgggggtgcaaagccatattgagacccagtaataaagccaccaaaagtatataca

SEQ ID NO: 141917 - DNA, 1991 bp, Zea Mays
acacagcagaagcatcggcggcgagcgtatacgtatacaccaccaccagtacagcatccattccaactaccttccccatccctacccatcatcaccctcaccagtcaccactcgccaccctcgcccgcccccatggtctcgctcgctggctcccagatcccctcgccttcgccggggcagagcccctgcgcggccgcgcgcccgcagcgccgccagggacactccatgcgcaccatccgctccgctctgctgcagccggactcctcccctgggtccccgtccccgcgcgatggcggcgccgacgcgggcgactcggacattgagaacctcaccgactccgtcatcgacttccacctccgcgagctcgccgccaccgcggggcccgcgcacccggcggccgtcgccaagtcctcttccgccatcaacgccgccgccacggagctgctcgacctgtcgcgggacttctccgactactccagcttcaactccgacatctccggcgagctcgagcgcctcgctgccgcggcgggggcggcgcccagatccgacgcgccggacgcggccgccgtggatctgaacgacctcgagtccatggatctgtcggcggacgcggcgccgctggaccgcgtggagccgttcgtgctggcgtgcgtgcgggcgctggggcccgacgccgggccggacgcgcggcgcgcggccgcggccaggatacgcctgcttgcgaagcaccgctccgacatccgcgagctgatcggcgtgtcgggcgccatcccggcgctcgtgccgctgctgcggagcaccgaccccgtggcgcaggagagcgcggtcaccgcgctgctcaacctctcgctcgaggagcggaaccggtccgccatcacggccgccggcgccatcaagccgctcgtctacgcgctgcgcaccggcacggcgccggccaagcagaacgccgcgtgcgcgctgctcagcctctcgggcatcgaggagaaccgcgccaccatcggggcctgcggcgccatcccgccgctcgtcgcgctgctctccgcgggctccacgcgcggcaagaaggacgcgctcaccacgctctaccgcctctgctccgcgcgcaggaacaaggagcgcgccgtcagcgccggcgccatcgtgccgctcgtgcacctcatcggcgagcgcggcagcgggacgtgcgagaaggccatggtggttctggggagcctcgcgggcatcgccgagggccgtgaagccgtggtggaggctggcgggatccccgccctggttgaggccatcgaggacggccctgccaaggagaaggagttcgccgtggtggcgctgctgcagatgtgctccgattccccgcataaccgtgcgcttcttgtacgcgagggcgccatcccaccgcttgtcgcgctatcgcagtctggctctgcccgtgccaagcacaaggctgagactttgcttggctacctgcgggagcagcgacaaggggttgcctgcagagctggagcagtggcagctactagcttggctaggtaaaaaggcaagagctatggtcgaaatctgctccatttattctctgtgagaggtgttgagagcagatcagcgacgccaggggggcgcatctgtaaataacagctggctctggttggtttggctatgtgtctatgtgaatacacatgtggtttgcgagtgaggatgcttggttggttactaacgtaacgtcagttaagagtcttaagagggaggagggttcaggggtcccaggttatgctattagaagatttgggtggtaatgaagatgatgctggtttgtagctgtgtacagggtgctagggtatgcttgctttgtcttttcaggttatccggaatgttggatcgccaaccatgtgatttttttttttttttttgcttgaggttccgagtccaaattcgtctgttcctttttatctactcaggcctggcacatggtttgcgaacatttcgtgattcttattttt

SEQ ID NO: 141918 - DNA, 1944 bp, Zea Mays
actactagtactgccgccctaatccttttccttttggagttcgtgttatatctcgagcccccaccctgccgctcgctccccctcctcccgcttgattccagtggccctgcttccctcgtcgtcactctctctcgagagcagcaccggcacttcggacagggtaagcgggcatcacgaatctgcttcaattcccttcccctgctctcagatctcgccttttcttcctgggatttgagctcgctctcgcgcttcccctacgcatcgtgaactcgtttctttagtggtgacaatagcagcgatttgcccggagggttctcgaggtatttcagcagttgcgctgttgcgttgaatcgagtaggaaaggagtaggaggactcgccccccatccacagtctattcaagaagcttgtggaggtagtgtgcagttccggcgcactgtagtgaggatctgacgacagtttcacttcacctacttctcggatttcgagctaccccctcatcacaccgtcgctgaattccgtagaagaacttttgcgtggtttcgtctgatttgttgctttgcttcccctttgctgtggacgcagagttgaaaagcaaaggtgtgttcttgtcatggagcagccgcagcagaagggagtagcggtctctgcgcaggcggcggccgcgaacgggaccaagggcgcggagctgatcgggtacgtcgacgtgctcgtgcggagcgcgcgggacatccagaacatctgcatctaccacaagcaggacgtgtacgcgcggctctcgctgcccggggacggcgcgccggcggcgtccacgcaggtggtcaacggcgggggccgcaacccggtgttcgaccagtcgctgcgcctcggcgtgcgcgcgggggacgtcgacgccgcgatccggtgcgaggtctggatgctcagccgcgtcaagaactacctgcaggaccagctgctggggttcgcgctcgtgccgctcccggaggtcgtcgccgccgacggcggcacgctcgcccgcgactttccgctcaccaccagcgacctcttccagaccccctcggggttcctgcagctcgagctctcctacatcggggtcgtgccggaggtcgtgcccatctcgccgacgcccaagccggcgctggccgacccggaggagccggagaacaacgccgccgggaacgggaaggagtacgagaagatcgagttccctgacctcaatctcgtggaggagaaccagatcatggtctccgagtacaccaggctgccgtgcgcggccgtggaaacgcagagctccgacagcctcctcacctcggagcacggggacggcgccacgaccctgggccacgacgccggcgtgcgcctcgtggagagcttctcgacggacaacagcaccgccgactcggtgagcaccttccggagcgacacgccggtcagcagcgtgtccaccacggagtcccccgctgccgcggcgttcccggccacccctcagtccaacttcagctcggagccgtctgggaacgcccactcgtcggctgaccgcaaggagaagccggcgttggagaccaccgacgcggaggtcgcctcgtcccgcaccgtccaggaggtcccggcggcgaactcacccggcgccgcgtcggaggccgccgtggacaagccggtgatcagcgtcaacatcgagcaggaggtgaaggtggacgggaaccagatcatggacatgtacatgaagagcatgcagcaattcacggattccctggctaaaatgaagctccctgccttggacttggacatagacaatggtagcagcgggaggagtagtcctgcagcagccacaaccgacgcagaatccactggtgccgactcgatcgcggtgaagaagccagccgccgccgggaagcaggataagccatctcccaaggtgttctatggcagccgggcgttcttctga

SEQ ID NO: 141919 - DNA, 1847 bp, Zea Mays
actactagtactgccgccctaatccttttccttttggagttcgtgttatatctcgagcccccaccctgccgctcgctccccctcctcccgcttgattccagtggccctgcttccctcgtcgtcactctctctcgagagcagcaccggcacttcggacaggagttgaaaagcaaaggtgtgttcttgtcatggagcagccgcagcagaagggagtagcggtctctgcgcaggcggcggccgcgaacgggaccaagggcgcggagctgatcgggtacgtcgacgtgctcgtgcggagcgcgcgggacatccagaacatctgcatctaccacaagcaggacgtgtacgcgcggctctcgctgcccggggacggcgcgccggcggcgtccacgcaggtggtcaacggcgggggccgcaacccggtgttcgaccagtcgctgcgcctcggcgtgcgcgcgggggacgtcgacgccgcgatccggtgcgaggtctggatgctcagccgcgtcaagaactacctgcaggaccagctgctggggttcgcgctcgtgccgctcccggaggtcgtcgccgccgacggcggcacgctcgcccgcgactttccgctcaccaccagcgacctcttccagaccccctcggggttcctgcagctcgagctctcctacatcggggtcgtgccggaggtcgtgcccatctcgccgacgcccaagccggcgctggccgacccggaggagccggagaacaacgccgccgggaacgggaaggagtacgagaagatcgagttccctgacctcaatctcgtggaggagaaccagatcatggtctccgagtacaccaggctgccgtgcgcggccgtggaaacgcagagctccgacagcctcctcacctcggagcacggggacggcgccacgaccctgggccacgacgccggcgtgcgcctcgtggagagcttctcgacggacaacagcaccgccgactcggtgagcaccttccggagcgacacgccggtcagcagcgtgtccaccacggagtcccccgctgccgcggcgttcccggccacccctcagtccaacttcagctcggagccgtctgggaacgcccactcgtcggctgaccgcaaggagaagccggcgttggagaccaccgacgcggaggtcgcctcgtcccgcaccgtccaggaggtcccggcggcgaactcacccggcgccgcgtcggaggccgccgtggacaagccggtgatcagcgtcaacatcgagcaggaggtgaaggtggacgggaaccagatcatggacatgtacatgaagagcatgcagcaattcacggattccctggctaaaatgaagctccctgccttggacttggacatagacaatggtagcagcgggaggagtagtcctgcagcagccacaaccgacgcagaatccactggtgccgactcgatcgcggtgaagaagccagccgccgccgggaagcaggataagccatctcccaaggtgttctatggcagccgggcgttcttctgatctcctgtccgcttgagcactggaagcacagcgctccagccgccgagtaacgaagcaaagagacggcatttgcagtcgcctcagctgaatcttactagcgcagaggaataacaccttctcatgctcttgctctagatttgccagatagggaattaattgctcgtttcaatgtattagttgctcgtttcaatgtatcggtcagtacttatgaaaaatcgtctggtttccctcttttagggctagtttatggactctactttttcaagaaatttctgtttttctaaaagaaattgaactaattttctttagtaaaatgaaaatccttcg

SEQ ID NO: 141920 - DNA, 1823 bp, Zea Mays
cgttgatccattcatggaaggatcctcgtcttcgccactgaatccaaagatggtgtgcgaagaaggcggcggtagaaaaggaacgtagagcacagagcgcaaagctgagaccgagacagcgagacgttgacaggcacaggcaggataggaagtgtcgcgaaacgcgaccggcctcgtcctaccaccggtcgatagggatctcggcctcgtgccccaccgccctctgtctgcccatcaccggatcacccctcgtccccacccagcgcgtcacgggcacgagctcgagccctcgtaccctcgcgtccgcgctctccctccctcgctcgccgcgctccgatcgaactcccgtccccgcgtggaggagagcagggccccacgagggccctctcgcgcggcgaccccgtggcgttcctgcgcggctgcttctcgttcgggtcggcggggcggaggcggcccaaggcctcgcccttgccctccccgccgcgcctgaccgcggctgcggcggcagcggacgacggggccaagatgaagggcctcttcaagtccaagccgcggacgcccgtggacatcgtgcggcagacgcgcgagtgcctcgtctacctcgacctccactcggactccaggagcggcgatgccaagcgcgaggagaagatgacagagctaagcaaaaatatcagggatatgaagtctatcctttacggcaatggtgaatcagagcctgtaactgaagcatgtgtacaattgacccaagaattcttcagggagaacactttacggctattaatcatacatcttccaaaactaaatttggagactaggaaagatgctactcaagttgttgcaaacttgcaaagacagcaagtatcctcaaagatagtagcgtctgagtacctagagtcaaataaagatctcttggacattttaattttagggtatgagaacatggacatcgctttacattatggtgctatgttgagggaatgtattcgccaccaaagcattgcaaggtatgttttagagtctgaacacatgaagaagttctttgactatatacagcttccaaattttgacatagcttctgatgcttcggctacctttaaggaactgttgacaaggcataaagcaaccgtggctgaatttctctccaacaattatgattggttctttgaagaatttaactctaggttgctgtcatcaaccaactacataacaaaaaggcaagctatcaagttgttgggagatatgctgctggatagatcaaatgctgcagtcatgatgcgctatgttagctccaaagacaaccttatgattttgatgaatctcttaagggattcgagtaaaaatattcaaattgaagcatttcacgtgttcaagctgtttgctgcgaataaaaacaaaccgcctgaggtcgtgaacatactggtcaccaatagaagcaagctacttcggttttttgctggattcaagattgacaaagaggatgaacagtttgaagcagacaaggagcaagtcataaaagaaatatcggcactttgagtatgcttgaggttgtaattagtttttgtgatgaattttcttttgctaagaaagtgcatgtgaaataataaacttctgtgtaatattctgttggaccaagaggaacaatgttactcattgactctagtacttggatactgccagcaaatgtgataattttaatagattttgtggttatccatgcccttattttatgggcgtgttccactgatacaaaatattgaaggatttagagacaaatactgtatgagacaaaggcataatatctaatctcgcccaaacaaggt

SEQ ID NO: 141921 - DNA, 910 bp, Zea Mays
atcgtccatccgtattcccgtcacaactcacaacccgagccccccaaacccgaagcagcaggagctcccctgaccctgctccgcctccgatcaaggaaaaggaagatgagctactacggccagcagccccccgtcggcgtcccgccgcagcaaggctacccggggaaggacggctacccgccagcggggtacccgccggccggctaccccccgccggcgcagggctacccaccgcagggctacccgcagcagggctacccgccgcagtacgcgcagccgcctccacagcagcagcagagcagcgggccttccttcatggaaggatggtatgttcttcatcctccccgttccctccactcatgtgccgctcttcgaaatttcctcgccgtattagatcaaaagtagtcggggctaaccggccagatccgtccggcgccggcggccgccgtgctggtgcgcgccttggccgctgtagcgtgggtggggtcttgactcgacgcgtgaaccacccttggaaaagggagccgccgcccacgtgggtcgcctggctttgccgtggcgacgtgtcggttgctacacgcaaggtaatgaggtatcctaggccgtccgatctgagactggcggtgctgattgcgagctcccgcggtcacatttttctgctgccgttttgcatgcgttcggttcggtggagatagctatccaacggctgggttgctgccagttgcccagttcctttgtttttttgggtaggtttggttgaatggatgataatacttctgttgacgcgctaataccagtgagatagatgacgccgtagcacccactttagatttaacatatgaccacaattggagatcggaatattattgcaattgatggctaggcgtttggaagaagcgtgttaaagctc

SEQ ID NO: 141922 - DNA, 944 bp, Zea Mays
atcgtccatccgtattcccgtcacaactcacaacccgagccccccaaacccgaagcagcaggagctcccctgaccctgctccgcctccgatcaaggaaaaggaagatgagctactacggccagcagccccccgtcggcgtcccgccgcagcaaggctacccggggaaggacggctacccgccagcggggtacccgccggccggctaccccccgccggcgcagggctacccaccgcagggctacccgcagcagggctacccgccgcagtacgcgcagccgcctccacagcagcagcagagcagcgggccttccttcatggaaggatgcttggctgccctctgctgctgctgcctcctggacgcctgcttctgacggaaccatccgtgccgggtccaacacggctgcaagtgaagcaaccagcttacggaagagctggaactgggccgtgctattctagctttgtcctgcgttatcgccctcttttcttttttttttctctctctctctctctgttatgagactactggtactctgtcgatgtcgattggattagactagggctggtgtgtattctgtggatgctccgtgtttctggtgggattcaagttcaaccctgggattattgtatttcttctacctgtcgcatggatgcgtttctttgctgttactctgttgccgagcacgtttcgcttgcgtacatgattcgtagcgctccgtaggatgttcgactgtagcgcaatttattcggatcgacttatttgacctggcattttggacgaagtcttgtttagaaaaaaaaaaatcccagcttctctctagaagctcgaggcaacctggttagctttttgcgtgtttgacttgctggtcagcgtccgttcttgcgtgagggcgtgaggcatccagctttgtgatggacacgttcagtataacagcgagtcattatt

SEQ ID NO: 141923 - DNA, 1202 bp, Zea Mays
atcgtccatccgtattcccgtcacaactcacaacccgagccccccaaacccgaagcagcaggagctcccctgaccctgctccgcctccgatcaaggaaaaggaagatgagctactacggccagcagccccccgtcggcgtcccgccgcagcaaggctacccggggaaggacggctacccgccagcggggtacccgccggccggctaccccccgccggcgcagggctacccaccgcagggctacccgcagcagggctacccgccgcagtacgcgcagccgcctccacagcagcagcagagcagcgggccttccttcatggaaggatggtatgttcttcatcctccccgttccctccactcatgtgccgctcttcgaaatttcctcgccgtattagatcaaaagtagtcggggctaaccggccagatccgtccggcgccggcggccgccgtgctggtgcgcgccttggccgctgtagcgtgggtggggtcttgactcgacgcgtgaaccacccttggaaaagggagccgccgcccacgtgggtcgcctggctttgccgtggcgacgtgtcggttgctacacgcaagcttggctgccctctgctgctgctgcctcctggacgcctgcttctgacggaaccatccgtgccgggtccaacacggctgcaagtgaagcaaccagcttacggaagagctggaactgggccgtgctattctagctttgtcctgcgttatcgccctcttttcttttttttttctctctctctctctctgttatgagactactggtactctgtcgatgtcgattggattagactagggctggtgtgtattctgtggatgctccgtgtttctggtgggattcaagttcaaccctgggattattgtatttcttctacctgtcgcatggatgcgtttctttgctgttactctgttgccgagcacgtttcgcttgcgtacatgattcgtagcgctccgtaggatgttcgactgtagcgcaatttattcggatcgacttatttgacctggcattttggacgaagtcttgtttagaaaaaaaaaaatcccagcttctctctagaagctcgaggcaacctggttagctttttgcgtgtttgacttgctggtcagcgtccgttcttgcgtgagggcgtgaggcatccagctttgtgatggacacgttcagtataacagcgagtcattatt

SEQ ID NO: 141924 - DNA, 1346 bp, Zea Mays
ctcccacgtgcccctccctctgcgcgcgtccgattggctgacccgcccttcttaagccgcgccagcctcctgtccgggccccaacgccgtgctccgtcgtcgtctccgcccccagagtgatcgagcccactgacctggcccccgagcctcagctcgtgagtccggcaccgcgcctcgccatggccatggtgcagccggcggacacggccgtcaaggccaacgagatcctggcgcggttccggcccatcgcgcccaagcccacactggcagcagccgccgccgccgccgcggcgcccgtggcgcaggccgcggccgagggcgtcgtggccgcgaaccgcgtgctgtgccatctgcagagcaggccgtgccgcgcgcgcaagcgcggccgccccaccgtcgtgccggtgtcgcccaagtcgggcgcgcagccgcccgcgaagcggaggagagcctctacgccgtacccgcctctccggtgcgcggcggcgaccacgggggcgcatgtgtccgcggtcgtcccaggcagtgcgcgtctcccaccggcgagtgcgggtgtcgaagacatcgcgaaggcggcggcggcggcggcgacagaggaggggagggacgtccccgtggagcgcgacctgctgcggaagctgctggagcccagggtcatatcgccgcgggcggtgcgcccggtgtggtctgccatccacgtcgggtgcatccaccgcaccgacgacgcggcctgcaccgacgccgccgtctcgaagacggcggttcaggtggaggcggagctggaggtcgacgcgctcccggcggtggtctccgactcaggcaaccgcgtccggctcgtgaacgacgcgtacaaggagatggtggggcagcccgagtgcccgtggctcgacgccgtggctgccacgtcgaggaggatcagcggggaggtggcgctggtggtagcggaccggtcctctctgccggactcgtacggggcgttcacatgcacggcaaagatcgagtgggaggacgacgggaaggtcacctccatcgctgcaccctgcgacgtcagccggctgcagtgcgagtccagggattacctcttcgcctggaggttccgcaccgccgccgccgacgccgacgcatccgttggacacagctccgaggagattagtgagagttagggaagcttgagctgcatccaatgaaaccaagtgcatagactaagccgctagctgcatgttaaaactgagcagcttcctctttcgcgaagtccaataggatgtagacccagttctgaaatcctgagtaaatataagatgttgactggagaatgcaaaggaagtataacctgccctttcaggaaa

SEQ ID NO: 141925 - DNA, 1293 bp, Zea Mays
aagccgcgccagcctcctgtccgggccccaacgccgtgctccgtcgtcgtctccgcccccagagtgatcgagcccactgacctggcccccgagcctcagctcgtgagtccggcaccgcgcctcgccatggccatggtgcagccggcggacacggccgtcaaggccaacgagatcctggcgcggttccggcccatcgcgcccaagcccacactggcagcagccgccgccgccgccgcggcgcccgtggcgcaggccgcggccgagggcgtcgtggccgcgaaccgcgtgctgtgccatctgcagagcaggccgtgccgcgcgcgcaagcgcggccgccccaccgtcgtgccggtgtcgcccaagtcgggcgcgcagccgcccgcgaagcggaggagagcctctacgccgtacccgcctctccggtgcgcggcggcgaccacgggggcgcatgtgtccgcggtcgtcccaggcagtgcgcgtctcccaccggcgagtgcgggtgtcgaagacatcgcgaaggcggcggcggcggcggcgacagaggaggggagggacgtccccgtggagcgcgacctgctgcggaagctgctggagcccagggtcatatcgccgcgggcggtgcgcccggtgtggtctgccatccacgtcgggtgcatccaccgcaccgacgacgcggcctgcaccgacgccgccgtctcgaagacggcggttcaggtggaggcggagctggaggtcgacgcgctcccggcggtggtctccgactcaggcaaccgcgtccggctcgtgaacgacgcgtacaaggagatggtggggcagcccgagtgcccgtggctcgacgccgtggctgccacgtcgaggaggatcagcggggaggtggcgctggtggtagcggaccggtcctctctgccggactcgtacggggcgttcacatgcacggcaaagatcgagtgggaggacgacgggaaggtcacctccatcgctgcaccctgcgacgtcagccggctgcagtgcgagtccagggattacctcttcgcctggaggttccgcaccgccgccgccgacgccgacgcatccgttggacacagctccgaggagattagtgagagttagggaagcttgagctgcatccaatgaaaccaagtgcatagactaagccgctagctgcatgttaaaactgagcagcttcctctttcgcgaagtccaataggatgtagacccagttctgaaatcctgagtaaatataagatgttgactggagaatgcaaaggaagtataacctgccctttcaggaaa

SEQ ID NO: 141926 - DNA, 1044 bp, Zea Mays
atgcgagaaatgatgttctgcggcgcgggcagcttcaaggacgtggacaaggatcaaggagcggccggcggcggcgacgggaagccggccaaggcgaagaaggcgaaggggaagcaggggaagagcagcaacccctacgcgtcgcgggggctggacaagttctccgtcgtgctgtcggagctggagtccaagcgggagaggatcctgcggcgcgtcggctcggacgtcgacgccgaccacctcatggtccggttcgtacagtcggaggccaaaggatgggtgcccatcgtcgtcaagctcccgcacgaggaggaggagcaggcggcaagcggcgccaagaagaggcagggcaggccggccagcaagccgacctcgcagtcgtcgacgccgcccacggagcccgccagccccaaagaagacccagctaagctcacgcgcgttgccgcggcggtgccacccgcgaagaagagtaacgccggcggcggcgcgaggtgggcctgggcctggggaaggacgaaggtgatgaggccgtgccattactggccgctggccatggcgctgctgctgctgtgcctcgtggcgttcgggagggtgttcgccatctgctgcacgtccatctggtggtacctcttgccgatcttgagcggggaagaggaagccctgggcgcggggagaccaccggcgacgaagccccgcaaggacgttggcttcaaggccggcgacagactagcgctggcgccgcctccttcgcattcgcatggcaagaggagtagcagcgccggcgccgctcgtgagatggtttcacccagaagccatgcgcatcgaaagaagtggtaacttccaggatgtctcgtgttgtagtctgtagactttgtgtagttgggtggccagaaagatcaattttttcaggttatctttcatccctttgttacagtttatttactctttttggtgcctgtaaaaagtgtatagcagcagccccttttgtgtgtggctaccccaaattgtttataaaatcattcggaataaatatcaaataactcc

SEQ ID NO: 141927 - DNA, 573 bp, Zea Mays
gtccacggggctgtgcctgccgccaccaggcacaagcgccgacgacaacgccggagggtcggccctccccacctttgttgaccttaacggcgtgagagagccgagatcgtcctccctttttttctctttcccaccgcctgtttgattctagaagtgtgtcgcatgctggtgtctggtgaaggagcggacaagcggcgacagcgttggcgcgagcggctgccggaggccccgatctggagactctataagcaacagcgaaaggcgtggacgggaggagcgcgtggacctacagagggacgatgcagagggagcaagaaggggatgagaacctgaccaagtgacctacagagggacaaggcggagggagcgaggaggaagagagacagggcagatcgagcgaggagcggtggccactgtcaaagcatcaggtggaagtatccagaggcgaggagaacgatgtgagagagcgcgatgaaggtgagccagtgatccacgatcgagcggttaagaagattttcgatgacgtggatgagctaggaggagccggtttgaaccggctttcatatatagtaa

SEQ ID NO: 141928 - DNA, 378 bp, Zea Mays
atggtggcgcggagcgcctgcgcggcgcgcgccagcctggcggagccccgcaggctgttgcgggccagcaggcggagctcgtcctctacgtcgcggcggatggtgggcgcgcgcagcagcgtgccccggaacgcgatgacggcgctgggcgcgccgctcgggctcggccccggccccggcctgccgccctggtggtcgcgctcgaagacggcgccgaacacggagccgtcgcggtcgtccaccagctcgtgcgccaggcggaagtggaacggcttccaccactgctgcgccaccgccgccgcgtcccggcgctcctgccgctccagctccagcaggtacaccgcctcgatcaggtacgccatcaccatccgcctgtag

SEQ ID NO: 141929 - DNA, 296 bp, Zea Mays
aagggttggagacccatatttatagccctagaggttgcactatcacaccttctcacacacactacacaacaggattgtcctctagatgctaaagagactacagagaacagtcaaaagcgactgttgtcctctagatgctaaagcgactacagaggacagtcaaaaagcgactgttgtcctctagatgctaaagagactacagaggacagtcaagctgtcctctagatgctaaaggactacagaggacagtcaaaagcgactgttgtcctctagatgctcaagacttattccatcat

SEQ ID NO: 141930 - DNA, 2456 bp, Zea Mays
cgcgtaggtagccacacttagaattggattgctgccactcacaattccctctcatagcctggcatcgtagctatagctggctagcttcctcctcctggctgctacccttcccggttctcaccgcgctgccattaaaaacccccttccttgttaccacttcgaccttgagcaagcgcactcttcatgttgccgcctcgccgcagtagcagcttacatggatacgctgtttaggttggttagccttcaagcctccgagcagcagcagcagcaatcggcgtcctacaactcgaggagcaccacgtcgagcggctccaggtcgtcgtcgcaccagaccaacgcatcctacaactactactaccacagcaacagcagcggcggcggcggcgggcagtactactacggtcagcagcacccacaccagcaccagcaccagcagtactacctggagccgtaccagcaagaagaatgcggcaacacccaccacctttacatggatgaagacttctcctcctcgtcctcgtcgaggcagcatttccactcgcacggcgcggtggtgcagccgccgacgtcgtccacggccacgcccacggcgccgacgccctcgctgtccacgtcgtccacggccgcgggggcggcgcacgcgctgttcgaggcggccgacctgtcgttcccgcctgacctcaacctcgacttctcgtccccggcctcgtcgtccggcgggggcgcggcctcgtcggcggcggtcgggggaggtggcgggggaaggtgggcgagccagctgctgctggagtgcgcgcgcgcggtggcgggccgcgacagccagcgcgtgcagcagctgatgtggatgctcaacgagctggcctcgccgtacggggacgtcgagcagaagctggcgtcctacttcctccaggggctcttcgcgcgcctcacggcgtccggaccgcggacgctgcgcacgctcgctgcggcgtccgaccggaacacgtccttcgactccacgcggcgcacggcgctgcggttccaggagctcagcccgtggtcgtcgtttgggcacgtggccgccaacggcgccatcctggagtcgttcctggaggccgccgcggcgtcgccggagccccagaggctccacatcctcgacctcagcaacacgttctgcacgcagtggcccacgctgctcgaggcgctcgccacgcggtccgccgacgacacgccgcacctgtcgatcaccacggtggtctcctccgcgccgtccgcgccgacggccgccgtgcagcgcgtgatgcgggagatcgggcagcggatggaaaagttcgcgcggctgatgggcgtgcccttcagcttccgcgcagtgcaccacgccggggaccttgcggggctcgacctcgacgcgctcgacctgcgcgacggcggcgccaccaccgcgctcgccatcaactgcgtcaactcgctgcgcggcgtggtgccgggcggtgcgcggagacgggacgcgttcgccgcgtccctccggcgtctcgatccgcgggttgttactgtcgtcgaggaggaggccgatctcgtggcttttgaccccggcgcgcccgaggaaagcggcgacacggaggcagcgttcctgaaggtgttcggcgagggcttgcggttcttctcggcttacatggactcgctggaagagagcttccccaagactagcaacgagaggctggcgctggagaggggagccggacgtgccattgtagacttggtctcgtgcccggcgtcggagtccatggagcggcgggagacggcggcttcatgggcgcgccgcatgcggtcttccggcttctctccggtggcgttcagcgaggacgtcgccgacgacgtgcggtcgttgctccgtcggtatcgggaaggctggtcgatgcgggacgccggtttagacgactcggcagccggagcaggcgtcttcctggcgtggaaggaacagcctctcgtgtgggcgagcgcgtggaggccatgatagagatccccgtcgacgcaagatgcaagctcggtgagtacgcgcgtacgtggaacatcatgaaccacaggagaagcaagggcgccatccgccatacctagccggcgcgtggatgcaatgatccatgcagtggatcgggcgcacgtgcatgtgtatggcgagctgaatggcgcaacgcatctagggttttggagcagtggtagggattgctagttcacgcacacatggttgtatgcagcaaggtgatccaggaggaggtatggtcgatggttttaggttttagacttgcatctatttcaaatttggatcatcgatcgccacaagcttttggcgtgatgattccgattttcttgcttctttttttttgtcacatttctctgtgtttcttcatgtaattcaatgttaacaactttcttccctctggagggatttacgtgcatggttttgtcatactttctctcat

SEQ ID NO: 141931 - DNA, 1107 bp, Zea Mays
tcaaaataagctaatattggtagcatattttctagcttatttgtgatcacaaagttgtattttacgtttctacctttccagcacaatctaacttatataatctaagaggaaacaaacatggtctaagtagagaattatacgagttttcatgctcagtgaatgtttgcatctcaagcacacaggatttataatgacaatgcatgtataagtcaatataatcgcgcacagtttcaagacgactagatactaggttatcatttttctgttctacaaaagctggtgcctatcattctgatccatcagggaagcgttcaagggcattctgtttcccgttaacataaaattcaatcactgctttcatgcgatccgacttatctggatggtagttcaaatgcacaaccaccggcttcaaattccgcagataagcatctttcctcaccgtcttgaagagaactttactgttcatgaagaggtagatatccatggttcttttggatgcatgaagaccttcataaccaggatgtgagggaaaaaacagctcctcattgaaaactgcttggtcccatgatttgggctcgtgagaaaggcgataagcaaccctgtcaagaagctcaatcgaaggaatcgtcggccttatgaagaagaatccagaattataaacccatatgcgcattgtatgtgcatatcttgcccagcccattgaaggctcatcgaacacatcgttgaatccataagctgtcatgttgttgtggccatcactcattgattctacgtcagaatctctgtaaagataatcaaatggattttggaagaaaatgatatcaatatcagagagcagaacactgtatccgagctgcaaaaactccctcaatatgcggaacttgagtccagaaacagcgtggtttccgcctgtcttgccaatattgtcgatgccatcatctggatcgcgtcggtaaactgggacatcattggacttgcagaagttctctatgctgtcatccaatgcaactactaaataatttgaaatcccagctcgttttatgttagtgaaccacatctcaagcatctctttcacattagaatttgccaatgcaactatcagttctt

SEQ ID NO: 141932 - DNA, 338 bp, Zea Mays
acatttgtcaatgaagttgacaggcttgagaaagcaggaaatattgatgctgagccaattgtccatgtgaatcaaattggggaaggtgcagaagctgcatctgtatctgaagagtcatctcagcaagtgggcgacattgagcaagcttacactcaaaaggaagcgtcagtcagtgatctacccacagagatagaaaccttacattctgatgctataataaaagagttgcctcagaaggctccagataatatgcaaactgatatagccatggtcccaaaacagagtcacaatccaggagataatgttgtatttgaagtcgtcactgaagtgccaagtac

SEQ ID NO: 141933 - DNA, 1674 bp, Zea Mays
caccgctagctcgcctctccaaccaaacgcaaagcaaagaacagaacccaattccatcgttccccactcgggctcccggtctcctccaccctcctccctcgcctcgcggccttccggcatttgctccagctcggaactgagccgcgcgacacgaggctgacggagggaatggagtcggacgcgtccacctccccgcggcggcgcagcacgagctgttacagcgacagcggcgattcctcctgctccgagcccttcagcgagtgcggcagcgacgacctctccttcacgcccgccgccgccgcgggcatccaccgcctgctgctctcctgcgcggccgaggcgtcggaggacgcaatctcctcgctcgtggccgagctggaatgcccgtcgcagtcgctggactcgctccgccgcgcggcgatggagctccggctgctggccaagcacaacccggacaaccgggtccgcatcgccgcggcgggcggcgtccgcccgctcgtcaggctgctgtcgcacgcggacccgctgctgcaggagcacggcgtcacggcgctgctcaacctctccatctgcgacgagaacaaggcgaccatcgtcgaggcgggcgcgatacggccgctggtgcacgcgctcaagtccgcggcgtcgcccgcggcgcgggagaacgccgcgtgcgcgctgctccggctgtcccagctcgacggcgcctccgcggccgccatcggccgcgctggcgccatcccgctgctggtctccctgctcgagaccgggggcgcgcggggcaagaaggacgccgccacggcgctgtacgcgctctgcagcggcgcgcgcgagaaccggcagcgcgccgtggagaccggcgccgtgcggcccctgctggacctcatggccgacccggagtccggcatggtggacaaagccgcgtacgtcctccactccctggtgagctccggcgagggccgcgccgccgccgtcgaggaaggcggcatccccgtcctggtcgagatggtggaggtcggcacctcgcgccagaaggagatcgccaccctctccctcctgcagatctgcgaggacaacgccgtctaccgcaccatggtcgcccgcgagggcgccatcccgcccctcgtcgccctctcccagtcctcctccgcccgccccaagctcaaaaccaaggcggagtcgctgatcgagatgctgcggcagccgcggagcccgagcctccgcacgcggccagcggcagtcgttgcggcggaatgaccccgcccccctggtggtgcgtgccaagaatccttctcttcttcgtcgagacgagcctgcgcgggtcgaccggccagccggcgtgagcgtgtaaatactagcaagcatcgtgtttgcgtccgcgagcgagtgtacagttttctcaagcgagatgtccggaggatcgaagaccaatctactcgatgtaatttcttcctcccgaaccttccttctgttccctttccactttccacccaatctgtttgcttgctcgccgccggccgcggcgtggcaaaggtgtgtgcagcgaaaccgcgaaaaaaaaggttcggattagcgtgtgggccgcgtgggttgtgcacttgtgctgtgcttctgcttgtcgcagcagtgtgtacgtgtgtgctacggcagtaaatcaagtcggttttcgaatcc

SEQ ID NO: 141934 - DNA, 2366 bp, Zea Mays
cacaaaggccagtgaggagattgcacacctgtaaattccaagcaagtacgctctacaattttcacgaacatgggtttcattttagtattttactgttcatataggaaaacaaaaacaaaaaaagataggaaaacaaaaacaaaataaagaaaggaaaacgagtaaaaagatagccgtgccctagcttccattccgggcctcccgtcttcccgtcccttccagccagcgccgcttcatccttcgaaccccacgctaccgctcgtttatacggcagcgacgcctcccccgctcgcctcctctctcctcctcctcaaggctcaagcgaaggcgagcgcgagagaaagctcaagccacttcccaacccgctcccccctcgccgcgatttcctcacatggcagcgctgcgtctccgcgagtcactcgagaggaacagcccctcctcctgcttctccgacccctgtccctgcgccgccaacacgcgccgcccctgttccgatctcgccgcccccgccgctgggcccttctcgtccctccgcgtccatcgcccctgctcctgatccggctctcttcttcctcccttctcgcgccgtagattgcagccgcggctctgattctgctcccgccgtttgtctcgcggtcgcgggttcctgggagcttctgggttctggctccgtccctaaccggtgttgccatggggaagagcaagaagagcaaggcccgcggcggcggggacgacctgatcgacagcagcgacgccgacagcgtcggctcgtcgtccaccgcgctgtcggatctctccatctcgtacgccaccgagcacgtcaactcgcaggagttcgtcctcgacaagtacatcgacgcgctctacgagaagaggggatctacaagagaggcagcattggttaaactcgttgatgccttcgaaagttttatgctccatggccttgtggagaacaggtatgccactttgctgagtcaattcaacaattctgtcaaaaagggatctactaaggagttttttctggcatctcatgccattgggttactggctattacacttggtgctgggaacagttcacatgaaataatggaggagtcacatccccaactgtgtagggtgcttcaagcttggtccgatgcatcaaagatgatacctgcacttgattgtttggctgtcatcacctttgttggcgcaactgatctggctgaaacagagtcatctttgaaagccatgtgggatgtgattcatccaaaatctggttcaaatgtgggaactgttcggaaacctagacctcctgtgttagcagctgctgtatctgcatggacgtttcttttgactactgttggttcatggaggataaatactgatagttggaaagagcccattgcatttctctctactcttttggaagcagatgatcgtgctgttagaatggctgctggtgaagcattggttttgtgctttgagctaaatctgcttgatgtttcttcttgtgaggatggtgatgttaacacagggggaactggtggttctaagaacaagcttttcctggatatgcaagcattaaaagccaaaatatcaggtctggcctcgaatctctctgctgaggctggggggaaaggtgcagataagaagaaccttactgaccaaagagacttgtttcaacgaatcttagattttgtcaagtatggtgactgccctgaagaatcaatcaagattgctggaaaacgtgatgttttaagggtgtcatcgtggtctgaattaatccagttgaatttcttaaagcggttcctggggaaaggctttctgaagcatgtgcaggagaatggacttctccaggatatctttgacattaaggttgacaaaactgaaaccttgtcgtccactgataagaaaatttttaggtccgaagaggaaaaagaaagagctctgagattaaacaaggaacgtcgtctagcccaggtaaggaagaatgccgtcatgttggatgagtaacaaggtcacgaggaagggaaaacaacatcgatttctgtatctcatttcatccgggcctttgtctctgcctgtgtaaactattacaggcacatcccattgtctttgcctttgtctttaaggatactggagttttatagtgcatctaaccgatatgcaagttcgtgcatattgaacgttagtatgatttgtgggaatagttaagttgatttggagtttagtatagtaagaactaaggttgattaaatgtaacgtatgtatgaaatgtaatgtaagtgtaatgatttatactggaggacgggtggtaacaaatttgaatagaatgatatcaattcctaatatgatagttggatctaaacaaacatgttttaacg

SEQ ID NO: 141935 - DNA, 149 bp, Zea Mays
ttttttatttttctttttaaaaacaacaacaggcatatttcatgaagctatggttcacatcttcccagaggcttagggtcaaaaagataaacacaggtaaatccaccctcgatatacagcttcaactttctacaaggaaatgttgctat

SEQ ID NO: 141936 - DNA, 412 bp, Zea Mays
ctttgatgcggcaatatatccaccacatgatccaaaagacttggtaaaagtacccatcattatgtctacatcagctaggtcaaccccaaggagctcacaaacaccgcggccagactgcccaacagcaccaatgctatgggcctcatccagatatgtgtagaccttgtatttcttggagacaactataatctcagggagtttacacagctccccttccatgctatagataccctcaacaatgacaatgatcctcttccatggtctgtgtgtccgtggttgaccactagctatctgctctctcaggacctcttccaaatgagcaggggctttatgctggaaaaccctaacagttgcaccggatcctcttgcgccattgacaattgagttatgattcagagagtcactaattatc

SEQ ID NO: 141937 - DNA, 2934 bp, Zea Mays
gcttgttccctggaacacggggcccagatgggccagatgtcagtgtgctggtccttctaaagagctgcatcggctctcttcatcctcttggagcgtaggtagaggcgtagagcgccgcacactcatttgccacttcggttcggcgacggtggaggctgccaacatcctcggcgtcctccttccggaggccacgccagaaaaagaaaaagaaacggaagcaacggcataattgttttttcagaaaaaaagttccggaggagaattcagggtcccttcttcttttagagtagtattttgttttctaccagagctgttcgatgacgagaggaacggaagttgttgtgagagcgctgctcgttgcggcggcggtagctgggctgttgctgtcggcggcggcggaggacggcgttgttatccagcggaggtcgcttcaccagccgtttttccccgtcgatcccacgccgccgccggggttcgacgactcgatcgtgccgccgccgccgccgccggcggcggcggctggggccgcggcggcgtcggccgcgtcgaagggcggcgggcggtccgtcaccaacgccgtcgcgatcgcgctcgccacgggcctcgtcgtgctcgcggtggcgttctactcgtgcttcctcctgtggcgccgacgctccgacggaggaggcgggggcgtgggcggcgacggcctccgcgccgtcaagtcgtcgcggccaggcgccgtcgccgtgagggtcgccagcgacgtggggagcagcgcgcggcaccagcggtcgccgccgccgagctcgacggcgtccgacgcgatatacctcgacccgctcacgacgatggtggaggtgagccggcaccggccgcagagcccggacctccgcccgctcgcgctcgtcaagcagccgagccccgacctccgcccgctgccgccgctgaagcggccggcgccacagccgccccctccgccggcgtccacgccgccgatgaccaccaccacgggggactcctccgacgaggaggaccaggccacgtactacaccgcgcccaagaccgccaagtcctcgttcagccgcagcacgagccagcgcagcaccgtggagccgacagtggctcaaccacccgcgcctgctcccgcgtccacgcccacgccgctgccgccgcaagctaacgccccccgacctggtcgtccgccgccgcccccgccgccgccgaggcaaaggctgctgcggccgatgcccgaggagtccccacccccggccgtcctcgccagtttggcgctaaccaatccccctgaaccctctggtcaggacaggggaggtgagaacccggatggccacggcgggagagcgcggccgccgaagccaccgagcctgaaaccgctgcactgggacaagctccgcgccatctccggccgcaccaccgtctgggaccaggtcaacaattccgactcgttccgcgtcgacgaggcggcaattgagagcttgttcctgaacaactccggcggcgtgggtaattcggatcaggcggcgaggaggggaggcgccgggaagcaggagagccggctgctcgacccgaagcggctgcagaatgtcgcgatcatgctcaaggtgctgaatgtgacatcgagtgacgtgattggagcactcatgcacggaaatggagatctggggtctgagttctacgaaacactagctaagatggcaccaaccaaagaagaagaactgaaattaaaaggttataatggcgatatatcaaaacttgatccagcagaacgctttctgaaagatgtacttgatgttccttttgccttcaaaagagtagacgcaatgttgtacagagcaaactttggcgctgaagtgaattatttaaagaaatcttttggaacgctagaggcagcttgtacagatttaaggagcagcaagctattcctgaagttgctagacgcagtgctcaagactgggaaccgcatgaacgacggaactaaccgaggcgaggcgagggccttcaaactcgacacccttctaaagcttgcagacatcaagtcgacggatggaaaaacgacagtgctccatttcgtggttcaagagatcatccgatccgaaggcttgggttccgatcaagcagcagcagcagcagcgaatcctggaagcaccagcaaggaacagttcaagaaggacggccttcaagtgcttgcagggctcagcagcgagctctccaacgtgaagagcgcggccgccttggagatggacacgctggtcggcagcgtctcgaggctcgaaaccgacctcgagaaggtgacgctcgtctcccggctcaggcagacgtgtcccggtgacgatcaggtctcaagcgagaagttcttcgaggcgaacgacgcgttcctcggacgtgctcacgcggagatcgaggcagtgaaggcggccggggagcgcgcgctgcagcgcgtcaaggagaccacggagtacttccacggggacgccgtcaaggaggagcctcacccgctgaggatcttcatggtggtgcgcgacttcctcgcgacgctggaccgcgtgtgccgggccgtcggcaggacgccggagagggtgatgatggggtccggcaagtcgttccgcgtctcggcgggcacaacctccctgccgcagcgccggaacgaccagcggagggagctgagctcctctgacgaggacagctcctcgtcatagggtaacactactaggaaaccttttttttttctttctttttctttctctggcgcgtagagtagttcgggatcgaggcctgtgattcttgcagatttgttgagcatgtgtagccaacgtcagaactcaataggtgaaagttactgtgtagtttctacaaagtacaaaggttaaaagatatgtatagctgtacaaagacgggggcttcttattatggtatgttttctctgttacattt

SEQ ID NO: 141938 - DNA, 1129 bp, Zea Mays
tcacgccacgctctcagtcacgccacacacccaccactctcctacttgtccgcctctccgtcgtctccctctgcgcgcccccgctccaggtcaactctgccatccacgggagatcggtcgaccgaccggcctatcatccatggcgctcgacgcggccctcgacgtgtgcagcaagacgccgtcgccgtcgccgccgacggtcgactcgtcggcgcgcggcgggaggcggtccaagcgccgcgccgggagccccgccagcgacggcggaggaggagtcgacggcaacgaccagcccgagcaggaggagtacctcgcgcagtgcctcctgatgctctcgcacggcctccccggcgacggggccgcgccgccttcggcggcggcgaaggcgaaggcgatccagcagcagcatcagcacggccggtacgagtgctccgtgtgcggcaaggtgtacacgtcgtaccaggcgctgggagggcacaagacgagccaccggaagccgccggtggtggcgcccgcgcccgcgccagcaccaggaggcgaggccgacgcgtcgttgtccggcggcaccgcgcacgcggctgcggagaaggagaagacgcaccggtgctcggtctgcaagcgcacgttccagtcgggccaggctctgggcgggcacaagcggctgcactacgaggccaaggccaaggacgcggacgctgtggcggcgacggccgtgctgcagaacttggacctcaacctgccggccgagggcgcgccgccggagcccaagcgggcgcggacgatgctgctgctggcttgatccatccccgccggtcgatccaacggcggcgagatgggagttggcgccaagtggcggtctaggttcttgatagagagttgtttggtaggtcgtccaatttcgatggttatttggttggtttctttgttaattttcggtttgcgtcgcgtgccgtcggctgcgtcggtctcggttcgttcggtgctgattgttatgatgcacctttttttcggttcagacttcctaggaagatgattcatttctccatattctgcgacgacgcggagccgccggattaagaaccggacggctgatgcgcgcggtctctctctatttagatatagcacctat

SEQ ID NO: 141939 - DNA, 2317 bp, Zea Mays
gatgtctttatctgagcctcaagttgatgcaaccactgagcctgagagtcaattaaagaggaaatcaagtgatataggatgggaatgggggcgattagttgatccaaatgataagaaccgagtgaagtgtctgctttgtggccatgagagcacaggaggaatacataggttcaaacagcatcttggtcatgttggtagtgctgttgcaaagtgcaagaaagtgagtgatgatgttaaggccaagtgcaagaaagatttggaatcagcaattcaaaaaaaaagagagaagctgcaacatgatagagatgttagagacaatgtgcaattgattgatgatgaacccacatatgtgcagtctcttgttgggagctcagactcagtaagcaaacttggccccatggacagttttgctcgtcgcattgatcctaaagcaaatcaagctgaagccaagaggcaacaaaacattaatgaggctctttggaaagagagaacacaccaggtgcagcaatatgttgctagatgggtgtacacacatggtattccattccatgcttgtgacaatgatgagttcaaggaaatggttgaggctattggtcgatttggccctggttttcagccaccatctcaacatcattatagagagaagctgctagaagaggagcatgctagaactaaaagcttgctgcaagaccgtgaagacgagaagaacaagtatggctgctctgttatgaccgatgcttggacagatatgaagaggagaagcatcatgaacatttgtacacataccactgcagggacaagttttatcaagtcaaaggagatgtcaaatgtgtcacacacaagtgaggtcatatttgagttggtggataaagcaattcaggatttaggaccggactcagtagtgcaagttgtcacggacaatgcttctaacaatatgggagctaaggcattgttgcatgacaagaggcctaatattttttggagttcttgtgcaactcacacaataaatttaatgctacaaggcattggcaaccttccaagattcaagaagagaattgaccaagctaaatcattcaccatctttgtctatggtcaccaccgcaccttggcatgtatgagatcattcacattgaagagagatattataagacctggggtaacaagatttgctacagcctaccttactttgcaaagcatgatggagaagaaagatgaccttagaaagatggttgtcgattcaaagtggtatgacttacccgatgtgaagtctaagaagggaaaggaggcaacagcaatggtgttaagcataccattttggaaaggtgtgtcactttgcttgaaggtatttgagcctcttgtcaaacttcttcgtttggtagatggggatgtgaagccatctatgggtttcctctatggagaactaatcaatgcaaagaaggccattaaggaagcatttggaaatgttgagataaaatacaaagaagttatgtccattgttgagaaaaaaatgaaaaacaggcttgattccccactgcatgtggctgcatatatgctgaatccatactatagttacaccaacagcagcatcttctgtgattcaaccattatggaaaaattcatgctatgtgttgagacattttatcatggtgaggacgagaaagcatatagagctgtcaatgatgacttggataggtttcaaacaaaacaaggatctttctcaaaaaatatggcaaggagctaccaacgctttggtttcaatccagcatcttggtggaggctctatgggggtggagcacctgatttgcaagcaattgccattaggatcctttcattaaccactagctcatccggttgtgaaagaacttggagcgtttttgaacagactcatactaagagaaggaacagattaacaacagaacgcctcaacaatcttgtcttcatccaattcaacaatagaatgttgtccaagaaagagagaatttcccgaaacaagaactatgaggtgctcttgagttctgattgttcagaagctcaaggatttttctttaagggaggggatgaacaagcattagttcaaatcagggatgaggatgagggagaaatgcaagggacaggtataccatggtctgtcctaggagatgcaatgggagtagaggatgagcttcaatctcgcaggagcgcaagagtggctagagaggtggacgaagaagattgggaatctgaaaaagaagatgaagacaatgtgcttgaggatattgattatgaagaggacaactgtgagatttcaaacaccagtgactatgtccatgtggagtaa

SEQ ID NO: 141940 - DNA, 237 bp, Zea Mays
atggctgtggtcttgacacctgaagcttcgatgttggctgctgtcccggagagtcttcttgccaatgcggtatcgaaaagaagcaaaagaagagcgactttaagcactggggattctattgagcgagctaccaagctgaaggctgctaggaacttggataaatcttttactgaagtatcgagtgacacaaatgtgatagatagggctctttctaaagaggaaaaagagttttattag

SEQ ID NO: 141941 - DNA, 1972 bp, Zea Mays
acttgtagtttgcatgtgtacacaagcacaagctccacgcagattcatctcgattctcttcttgaggtgtggcatagccacatagaacaagactcgcgtttctttccatcccttcaaagctccagatcgtttctagctaaatacaaatcgactacagttacatagatctctgctcctcccactgaaatattccttgtacttgatggccttctgtcttctccattctcgctggtcgttcctctccctttggttcccgaagttctaatggcatggggaaccacgtgtagggcgttgtagagcacagccctctatatatgcttagtacaagcaccaaatccgcacctcaaactactcaacgtgtacgagctctctgcctcaccgcgcgcttttctaatcccgccgccgctagctgcctcgctgctggtttgttgccttctactacgtacctcgccacgcctgcctcggccccccctacatgatgcagttcacgcacactgcgccaccgccgccgcctctgcaccctaacggacatgctggagggctagggctcgggctgttccttgacgtcggcgcgcccagggccgcacgcccctggccggggagcttcccgacgcctgcgtccaagatctcgctcggcaacctcaacagcaccagctgcatggagcagctgctggtgcactgcgccaacgccatcgaggccaacgacgccacgctcacgcagcagatcctgtgggtgctcaacaacatcgcgccgccggacggggactccaaccagcgcctcacggcggcgttcctctgcgcgctcgtcgcgcgcgcgtccaggaccggcgcgtgcaaggcggtcaccgccgccgtcgccgccgccgtcgagtcggccgcgctccacgtgcaccgcttcacggccgtcgagctcgccagcttcgtcgacctcacgccctggcaccgcttcggctacacggccgccaacgccgccatcctcgaggccgtcgagggcttccccgccgtgcacgtcgtcgagctcggcacgacgcactgcatgcagatcccgacgctcatcgacatgctcgccagccggcccgaggggcccccgatcctccggctcacggtcgctgacgtcgcgccctgcgcgccgccgccggccctcgacatgtcctacgaggagctgggcgcgaagctgaccaatttcgcgcgatcgcgcaatatgtccatggacttccgggtggtgcccaccacgccggccgacgcgttcacgtccctggtggaccagctcagggtgcagcagctggtcatggacgggaccgaggcgctcgtcctgaacttccacatgctgctgcacaccgtgccggacgagacggcggggtctgtcagcctgacgcatccggtatcgctccggaccatgctcctcaagtccctccggacgctcgaccccaacctggtcgtggtggttgaggaggacgcggacttcacggcggacgacgtggtggggaggctccgcgcggcgttcaacttcctctggatcccgtacgacgccgtggacacgttcctgcccaaggggagcgagcagcggcggtggtacgaggcggagatcgggtggaaggtggagaacgtgctggcgcaggagggcgtggatcgggtggagcggcaggaggacagggggaggtggggccagagaatgcgcagcgcggggttccgggcggtgtcgttcggcgaggaggccgccggggaggtgaaggcgatgctgaacgagcacgcggcggggtgggggatgaagcgggaggacgacgacctggtgctcacgtggaaaggccacaacgtcgtgttcgcgtcggcgtgggcgccgtcgtgagtttatcgggtgtggtcatatgcagttcagaaggtgagtaggcatgtatgtgatcttccatggtatggaattagggtttgtgcttgtgcatgatatgaaagattatcttgttataaattgggttta

SEQ ID NO: 141942 - DNA, 1794 bp, Zea Mays
gggcctgtggctgctgcgtaacacggtggcatcgcagggtcagcagcatcattagaaaacgacgtctcgccgttcttcgtcttcagatctagggttctctcgtgctctgttctcatcttctgctcgctggtgtcccctccctctcacccatggcttcggcggcggcggcaactcaggtggggacttacttcctgcggaactactacaacctgctgcaacaaacccccgatgtcgtccaccagttctacagcgaagccagcaccatggtccgcgtcgacgacctcaccggcacgaccgcggctgccaacaacatgatggtttgtcgcaacctttctgacatacactcactcatcatgtctttgaacttcacccaaattgagatcaagactgccaattttgtgaactcatggggcgatggggtgctagttatggtctctggtctagtgcagaccaaggagtacagccaccaaaggaaatttatccagatgttcttccttgcccctcaagagaagggttactttgtcctcaacgattactttcacttcgttgaccaagaacatgtgcagcctgcgccagtgattgctcaggaagactacgagagcaatttggcacccaacacagttgttgagaccgctcctgagtacgttcacgaggaagaagctcaacaaatagcacctgaagtacatgatgtggtcgaaaactatacttattctgagccacaacagcaagtagtgtcggacaactggggagaggagcctcttcctgaagaaccgccttctttctcaaatgaaatggcagtcgctcctgaggagccagtgcaagctccacctgtgccacttcctcacgtggatgagcctgtttgtgaaccagtaaagaagacttatgcttccatcctaaaaaccgcaaaggctcctgcattcccagtagcccagcaagtacctgtgagtaagacttctcaccctacaacagagtcaaaccaaacccagcattcagttatggcttcatcaatgggaaccgagaaaccgaggtctgatgtctttggtgagggtgcttcccatgatgacgaagagagcaaatctgtgtatgtcggcaacgtgccatcatctgtaagtgaggctgatcttgaaaacgagttcaagaaatttggccggcttattcctgacggtgttgctatcagaagccgaaaggagactggcggctattatgctttcgtggaattcgaggaactcagcggtgtacacaatgcgttaaaggcttcaccaattgaaataaatgggcggcagatatatgttgaggagaggaagccaaatagcggaataagaggtggaaggaggggaggacgtggccgtttcagtggtggaggccggggatattcgagaggtggaggcgatgagtacaatagtaaccgtgggaggtcaaacggttacggtcgtgctcctcaccaagagaggggcatacttgggagccacaccccaaggaactgattcagtccagcagcaaacataaggttttgatccgtgtcgtcaaagcgagagagagagagatcctaaacaatctgcctatcagctactaggccgcgtttgggttttggggcttgttttgtcgatgaatgtgtgtgcgcgcgtcatcgacctatgtgacacttaaaacttttgctagtctgacgctatctctttacattaagatcggctgttctattaaccttgctgctattgttgctcgtgcatttctggcggtggtatttgatgttttgcctctgcatggaaaaggtttcagctttacatatgttacatt

SEQ ID NO: 141943 - DNA, 1776 bp, Zea Mays
gggcctgtggctgctgcgtaacacggtggcatcgcagggtcagcagcatcattagaaaacgacgtctcgccgttcttcgtcttcagatctagggttctctcgtgctctgttctcatcttctgctcgctggtgtcccctccctctcacccatggcttcggcggcggcggcaactcaggtggggacttacttcctgcggaactactacaacctgctgcaacaaacccccgatgtcgtccaccagttctacagcgaagccagcaccatggtccgcgtcgacgacctcaccggcacgaccgcggctgccaacaacatgatggacatacactcactcatcatgtctttgaacttcacccaaattgagatcaagactgccaattttgtgaactcatggggcgatggggtgctagttatggtctctggtctagtgcagaccaaggagtacagccaccaaaggaaatttatccagatgttcttccttgcccctcaagagaagggttactttgtcctcaacgattactttcacttcgttgaccaagaacatgtgcagcctgcgccagtgattgctcaggaagactacgagagcaatttggcacccaacacagttgttgagaccgctcctgagtacgttcacgaggaagaagctcaacaaatagcacctgaagtacatgatgtggtcgaaaactatacttattctgagccacaacagcaagtagtgtcggacaactggggagaggagcctcttcctgaagaaccgccttctttctcaaatgaaatggcagtcgctcctgaggagccagtgcaagctccacctgtgccacttcctcacgtggatgagcctgtttgtgaaccagtaaagaagacttatgcttccatcctaaaaaccgcaaaggctcctgcattcccagtagcccagcaagtacctgtgagtaagacttctcaccctacaacagagtcaaaccaaacccagcattcagttatggcttcatcaatgggaaccgagaaaccgaggtctgatgtctttggtgagggtgcttcccatgatgacgaagagagcaaatctgtgtatgtcggcaacgtgccatcatctgtaagtgaggctgatcttgaaaacgagttcaagaaatttggccggcttattcctgacggtgttgctatcagaagccgaaaggagactggcggctattatgctttcgtggaattcgaggaactcagcggtgtacacaatgcgttaaaggcttcaccaattgaaataaatgggcggcagatatatgttgaggagaggaagccaaatagcggaataagaggtggaaggaggggaggacgtggccgtttcagtggtggaggccggggatattcgagaggtggaggcgatgagtacaatagtaaccgtgggaggtcaaacggttacggtcgtgctcctcaccaagagaggggcatacttgggagccacaccccaaggaactgattcagtccagcagcaaacataaggttttgatccgtgtcgtcaaagcgagagagagagagatcctaaacaatctgcctatcagctactaggccgcgtttgggttttggggcttgttttgtcgatgaatgtgtgtgcgcgcgtcatcgacctatgtgacacttaaaacttttgctagtctgacgctatctctttacattaagatcggctgttctattaaccttgctgctattgttgctcgtgcatttctggcggtggtatttgatgttttgcctctgcatggaaaaggtttcagctttacatatgttacatt

SEQ ID NO: 141944 - DNA, 1197 bp, Zea Mays
cgcatacgcccacagccgccccacgcgcgcatcccgcagccgcgcgatccgtccgcttcctcctccccgcgcccgcagcccccgccgccgatgccagccgccgcgcccgcgcaagggaagttgcttcccaaatcccgcagacaagatttaatcccgtgattcttcccatccatggcagccgtgcccgcaaaccgcgcctccccacgactcccacttccatggcgtcgcccccttccatccatggcagtcacgctccctctgcgcccttccatccatggctgcggctccctccgcgccgcaattcttcccatcctctccttccgcgcggtttgcggctaccaatcctctccctctgcgtcgtgttcttcccatcctctccctccgcgccggatctcgccccatgtccaccaacgccggtgtccgtgatggcgcgctcggggcagcggtggacgcagcctttgccaggcgtgtgctccaggccgaggccctcctcgggtacctctccgcgctggccaccagcccgcgtgccgagggcgacagggtggaccccgccgtcgccgcggcgcagctcggggcgctcggccggtggaagggctcggcgaggggccttcccgagtacacggtcgtccacggcatcgatggtgccgtcgtcgccgcccctgggagagccaaagccaagcagaggaggccgcagtcgaccggatttgggaatcctgctcctgccaaacgggatgaacggaaggaagcaaaatctttctggggttgatttggcttgaaggaagcgggatctttctggacaatggctgtctagcttcatccattctggtacagagggatggagtcttgtaagaaggtagctgcaagcttgaagtcgtgtgagccatgggggaacagggcatcctggacaaacgccgttgggccaggttggaagttgagctttgctgttgagccatggactaagggctttagcgcgtcgtgtgcggcgccatattctgctggagccacagagcatcaattatcgctcgatgagaaggtggataactccaccgttgcatctggttttgatgggtatgtaccatattattaatgcctctattttctgtttatataaacagaccattaataattttcaggtaaagttatctgtcatgttgtcaataatttctgtttatataaacagaccattaatgcatctga

SEQ ID NO: 141945 - DNA, 1320 bp, Zea Mays
cacgcgcgcatcccgcagccgcgcgatccgtccgcttcctcctccccgcgcccgcagcccccgccgccgatgccagccgccgcgcccgcgcaagggaagttgcttcccaaatcccgcagacaagatttaatcccgtgattcttcccatccatggcagccgtgcccgcaaaccgcgcctccccacgactcccacttccatggcgtcgcccccttccatccatggcagtcacgctccctctgcgcccttccatccatggctgcggctccctccgcgccgcaattcttcccatcctctccttccgcgcggtttgcggctaccaatcctctccctctgcgtcgtgttcttcccatcctctccctccgcgccggatctcgccccatgtccaccaacgccggtgtccgtgatggcgcgctcggggcagcggtggacgcagcctttgccaggcgtgtgctccaggccgaggccctcctcgggtacctctccgcgctggccaccagcccgcgtgccgagggcgacagggtggaccccgccgtcgccgcggcgcagctcggggcgctcggccggtggaagggctcggcgaggggccttcccgagtacacggtcgtccacggcatcgatggtgccgtcgtcgccgcccctgggagagccaaagccaagcagaggaggccgcagtcgaccggatttgggaatcctgctcctgccaaacgggatgaacggaaggaagcaaaatctttctggggttgatttggcttgaaggaagcgggatctttctggacaatggctgtctagcttcatccattctggtaacaaagaaaaaaacaagaaacatctggtatctgagtccagtagaaagttgtgcaaagagaagagcaaaatatctacaccagacgtctcttttaggtacagagggatggagtcttgtaagaaggtagctgcaagcttgaagtcgtgtgagccatgggggaacagggcatcctggacaaacgccgttgggccaggttggaagttgagctttgctgttgagccatggactaagggctttagcgcgtcgtgtgcggcgccatattctgctggagccacagagcatcaattatcgctcgatgagaaggtggataactccaccgttgcatctggttttgatgggtaaagttatctatcagctagattcatggcaggaaaggttttttctattgtcggtatccagcacctaagtaggcctaggatttttttcttctatctttaattagcaattgcctttttcagcaacccgttcttatgaatttcttttattgacaacatgaattagtctattttagttc

SEQ ID NO: 141946 - DNA, 1845 bp, Zea Mays
gttcctaccatcagagttcaactgtatcacccatccataagcaattccttttgttgaaatttatgagaagacatatgcctctgttaagtctcaggaacttttttgctgggaagccaattccttactgatctgagggacaacatttttgtttgcctgatataaggtgatgaaggtggctggataacacgattatgggtattttcttatcgaggtatgcttttccttttttttgataattgaatatatttatggatatttgtttgtggagcaggtaaagtgtgaaagggaaacgcgaaaagaaacgtgtcctggtcccaagtcacctgccatactgaacacgattgatcgcagaaagaaacacgttctggtctagactgacaggttccgctgctactattttgtatatataaactatcttatataaagagtacgcacttcgttctcccatttatgaaaattattcatagttttggagctggagccggccatgcgctcgatcagagttccgctgcagccacgacctctctcccgaacgcgcacgaggagaccaggtggaacatatgcaagcaggttctagagcaataaccccatgaatccagatcgggggtctgcatctacacgggcgtgtactccgcaccgctcccctccggccccgaccgccgtgtgctcgttgtagccggggtcgacctcaaccacgacgacgatgcggtctcctcgccccaggctcgacctcctcgctgacctcgccctgctccacctcaactcgcgatgaggattgtcggcacgttcacaccgcgccgttgcagaacgttggagcctctcagaactctagaagctgcctaccaccacgcaccctaagataggggcatatctgtgcatggtaccatcttcatcatgtagctgggatgagctggcaccatgaaagaattcaagtggttaaatcatgcatctgcagaaatattgtactctcaaatggtgggttgctgcgtcatgggagtttgggtgaaggcctgaaggatgtgatgcaaaacgtcgatgcaggtctgggatgtccgcctcattatggatcaaaattcatgacgttctaaaggtgtcggatgagtacctatatactccctcccagaaaacaaggcgcctcattacactattggaagctggacgacatggatgactctggcaagatgcggtgggagcacgacgacatggatgactccgaccatgagttcgacaggaagcctagcaacagtacgcagtagcaaggttgaccagaggggcagtggagactaacccaacaccccctcctccgaccgtcatagcgcttctttcctctggcttcatttcttacctatgtatggatggtcttcaccactggttacatctagcaagtcctcctagggtgacatgaaggagattgtcatgctgccaaagcacatcaaggacaatgcaaacaaggacagaggaagaccggacatgccatttccaggtggtgacatttctattctcacgcgcccacccaacatttttgcttttactaaatgactatgtgcgcgaatgctttgtggatgttgagagggattatctgtgcttgacaaaacagtatcccagacttgcaattactccagaattttctaaggttgggcattttgtacattgaacttttgttgctgatcgatattcaatgtggcttttggcattctctgtcactctagctaggtccttggatgagccacactattgacatgggtttaggtgagtgactcatcacggtgcctttatatggctcgatcaattccaaatttgctatagtctagttgtcactagaatttcctcatttggcatgcaata

SEQ ID NO: 141947 - DNA, 2552 bp, Zea Mays
gttcctaccatcagagttcaactgtatcacccatccataagcaattccttttgttgaaatttatgagaagacatatgcctctgttaagtctcaggaacttttttgctgggaagccaattccttactgatctgagggacaacatttttgtttgcctgatataaggtgatgaaggtggctggataacacgattatgggtaaagtgtgaaagggaaacgcgaaaagaaacgtgtcctggtcccaagtcacctgccatactgaacacgattgatcgcagaaagaaacacgttctggtctagactgacagttttggagctggagccggccatgcgctcgatcagagttccgctgcagccacgacctctctcccgaacgcgcacgaggagaccaggtggaacatatgcaagcaggttctagagcaataaccccatgaatccagatcgggggtctgcatctacacgggcgtgtactccgcaccgctcccctccggccccgaccgccgtgtgctcgttgtagccggggtcgacctcaaccacgacgacgatgcggtctcctcgccccaggctcgacctcctcgctgacctcgccctgctccacctcaactcgcgatgaggattgtcggcacgttcacaccgcgccgttgcagaacgttggagcctctcagaactctagaagctgcctaccaccacgcaccctaagataggggcatatctgtgttagtcgcctgcacacatactgaaatatgggcatatccaccatgtattcttctcttagttatgttagataagacttttactctgtcatttactgatctggtctgtttttagctccattagcttgttcacaagcttatgttagagaaggcgttatggcttttctcaagattataacatttctgaataactgttctgcgtaggcatggtaccatcttcatcatgtagctgggatgagctggcaccatgaaagaattcaagtggttaaatcatgcatctgcagaaatattgtactctcaaatggtgggttgctgcgtcatgggagtttgggtgaaggcctgaaggatgtgatgcaaaacgtcgatgcaggtctgggatgtccgcctcattatggatcaaaattcatgacgttctaaaggtgtcggatgagtacctatatactccctcccagaaaacaaggcgcctcattacactattggaagctggacgacatggatgactctggcaagatgcggtgggagcacgacgacatggatgactccgaccatgagttcgacaggaagcctagcaacagtacgcagtagcaaggttgaccagaggggcagtggagactaacccaacaccccctcctccgaccgtcatagcgcttctttcctctggcttcatttcttacctatgtatggatggtcttcaccactggttacatctagcaagtcctcctagggtgacatgaaggagattgtcatgctgccaaagcacatcaaggacaatgcaaacaaggacagaggaagaccggacatgccatttccaggtggtgacatttctattctcacgcgcccacccaacatttttgcttttactaaatgactatgtgcgcgaatgctttgtggatgttgagagggattatctgtgcttgacaaaacagtatcccagacttgcaattactccagaattttctaaggttgggcattttgtacattgaacttttgttgctgatcgatattcaatgtggcttttggcattctctgtcactctagctaggtccttggatgagccacactattgacatgggtttaggtgagtgactcatcacggtgcctttatatggctcgatcaattccaaatttgctatagtctagttgtcactagaatttcctcatttggcatgcaataattacaattgatttgcctggtactctgattgaaatgggaaagttgagtgcttacatatgttgatccacaatatttctttattgtcaagggcagagttaaagtgaattgtgtggattcacaccaactgcacctttggatctcttctgggtcgtttcatttcaaaaaatactggccatatccccctctatatctggtaaacatagattgaggactagatagatcaggataaacaaggcgtgttaattgttgacaaatacaataaaagtaaaatcacagtaatgacgagtgaacaaacatgccttcgctgcttcatctgtttgaaactagagatatcaacctttaagtgcagcttaaggttttttgggatgattctttgtttatcatcgcaggatataatgcacatgggttagttcatctctttttcttttgcacccaagtatgccattttggggatttctccactatgtatgtttaaatgagcacattatttagaagccttttattatcatgttgttatgttctatgttgtttactgcttgcttggtgtaatctctagacccgtggatctaattgcttttgcaagggaaagagatatgccttctgattcagataggaccttaaatgaagacaagcgtttcatatcttgtagtatgccacaggagcatcaa

SEQ ID NO: 141948 - DNA, 582 bp, Zea Mays
aattctgaagaagtaccatttccaggtcacttgacatccaagagcaatgtgtgcagctttagggtggtgctgctggagctcatgataggcagacggtcaatggacaagagccgatcagcagggtattatgcaccagctttggggttcttgatgtttgctgttggtgtaaactcaagcgccaaggatttgattgaaacaataaaaaggccagatgctattgctgcgggctatatcagacagtttgtcaagctcgtcaccgtcgacgaccctttcatcaccacggactacatggtttcgggaggatcaacgggctcgtggccagggtccccctctagaaatgtggggaaaattgatgaggcatcagaactgaggagaactgtgagtgatatcaagcacaatgttcagacacagcttagcgagaatgctaagaccaataaacgagtgattgggattcacaaagaattgcagaaactgcatagagaagctattcagaacaccatcaattcagtcaccatggtagcaaacctgatgcctccattgccttcgttgtcatatcaattgccagacgaatctctgggatcg

SEQ ID NO: 141949 - DNA, 1265 bp, Zea Mays
aattctgaagaagtaccatttccaggtcacttgacatccaagagcaatgtgtgcagctttagggtggtgctgctggagctcatgataggcagacggtcaatggacaagagccgatcagcagggtattatgcaccagctttggggttcttgatgtttgctgttggtgtaaactcaagcgccaaggatttgattgaaacaataaaaaggccagatgctattgctgcgggctatatcagacagtttgtcaagctcgtcaccgtcgacgaccctttcatcaccacggactacatggtttcgggaggatcaacgggctcgtggccagggtccccctctagaaatgtggggaaaattgatgaggcatcagaactgaggagaactgtgagtgatatcaagcacaatgttcagacacagcttagcgagaatgctaagaccaataaacgagtgattgggattcacaaagaattgcagaaactgcttagagaagctattcagaacaccatcaattcagtcaccatggtagcaaccctgattgcctccattgccttcgttgtcatattcaatttgccaggtcaatacttccaagatgtgaatagtgggggagacattggtgaggctcaaacaactatgattgtgagtgaggcggtggtggtggacacgcgcaggacgggacggacgaagcatcttccaagccggggcagagcgctgtcgaagcagccagcaacaaaagctttcgctggagccgctggtggagtacagagacgtgggaaccaggaagggtattgctgttgaccgattagttgggtctcaagatctcagaagtaaagacgattttctgacaagagcactggaacatattcttattctcaagacgaaagggataatcgatgagaagaagaaagatgacgaagatgacgatgaagaaagcgaggctaagaataggagggttaggtcctcaactgctcaagcctctgactcagactgaacctaagatgaggattgaggactcaccttttttgcactttggattttgtttgtttgttctgtgatgtgctgtattgtactgtaattgatttgtgtaaccatgtatcggtaccagacaccacaacaagaacatgtacaagagattctttagcatccattgtgtgtaaaagttagggtttgtggctgccttttatttcatttttccttagctgtcataggatggtacaacacaacaagaacatgtacaagtatgtcatagcttgtctttcttgcttcttaagaca

SEQ ID NO: 141950 - DNA, 2573 bp, Zea Mays
ccccaccgggcaccggccgaagaagataaccccaaaaccccgccggtccccaccggctacgccatggccgaaatgctcgcccttccgctgcccctccgagctccggcgccaccgccgcgtcctacaattcccaaccccatcgtcacccatcgccaacctcacacaccgtcctcctcccctcctcgcctcttctccccgaactccctcctctccacttcccgccccactccagcctcatcctcccgcaaaccgcgcctcggccgcccgctcgacaccttccgcggcgaacagccgtggcacctgcctccgtccctgtccctccccgcccgccgcgcgctcctcgccctgctcgccgacccggcggaacacgcttccccgcgcgacgtcctctcggcgctcccggagaccgatctccccgccgtcgtgaacacgctcgcctcccgagggggccaccccggcatcgctgtcgccgtggtccgcgccgcgcgggacctccacggtgaccgcgctctccatcacccgcgcgtgctgcctactgccatccgcgtgtttgcgcgcgccggctgcctcgccgaggcctctgctatcctcgaggccgcgccggcgcccgacgccagcgcatacactgcgctcgtgtccgcgttctcccgcgccgggaggttccgggacgcggtcgccgtgttccagcgcatggtggatggaggcgtgcagcccgcgctcgtcacctacaacgttgtgttccatgcctactccaagatgtctgtcccgtggaaagaggtcgtggcgctcgtggactcaatgaaggaggacggcattgagcgggacaggtatacgtacaacacgctcattagttgttgccgtcgaagggggcttcacagggaggcagcgcaggtgttcgatgagatgaaggctgctggattcgaacctgacaaggtcacattcaattccctgctggatgtatatggtaaggcgcggaagcatgaggaggcaattggggtgctaaagaggatggagaatgccggatgtacacccagcgtggtgacctacaactcgctcatctcggcttatgtgaaggatgggttgttagaagaggctctggagctaaaacaggagatggagttcaggggtatgaagccggatgtggttacatacacgacattgatctctggccttgacagagttggcaaaattgacgcagcacttgctacatacagtgaaatggtgaggaacggatgtagcccgaacttatgcacctataatgcattgatcaagttgcacggggtgagggggaaattcacagagatgatggctgtctttgatgacctcaggtctgctgggtatgtgccagatgttgtcacctggaacacgctcttgtccgtgtttgggcagaatggtctagattctgaggtttcaggggtgttcaaggagatgaagaaagctggctatatccctgagagggacacatatgtttcactaattagttcatatagtcgatgtggtttgtttgatcaagcaatggagatatacaagaggatgatagaagccggtatatatccagatatttcgacttataatgctgttctatctgcattggctcgtggtggtcgctgggaacaagcagaaaagttgtttgctgagatggtggatcgagattgtaagccagatgagctcagttattcctcattgcttcatgcatatgctaatgctaagaagttggacaaaatgaaaactttatcagaagatatatatgcagagaggattgaacgacacaactggctagtaaaaacattggtcctggtcaataacaaagttaataatttacctgagacagaaaaggcgtttcaggaactgaggaggcggcgttgctccctggacattaatgttcttaacgccatggtatccatatacgggaaaaataagatggttaagaaggtggaggaggtcctttcactcatgatggagaattctatcaaccacagtgctgcaacctataatagtttgatgcatatgtattctcgtttaggtgattgtgaaaagtgtgaatcaatcctcactgagatcaagtcaagtggcatgcgccctgatagatactcttataacactgtgatatatgcatatggaagaaaaggacagatgaaagaagcctcaaggttgttctctgaaatgaaatgttcaggcgtgaaaccagatattgtaacatacaatattttcatcaagagctatgttgccaacataatgtttgaagaagctattgatttagtacgctatttggttacacaaggttgcaggccaaatgagagaactttcaattcaatactgcagggctactctagacatggaaggatggtagaggcgaaatcattccttagcaaccttcctaagatttatcctggaatatcgaaacaagaaaaacaacgactgtcggaactgctggcaaaacacacttcgtaagatggttgatattataagaaccaaaccctttttgtgagcatgataggtaggtaatactaagactgaatttttagttgtccttagcagcatgcacattagagtggacttgtacagattacata

SEQ ID NO: 141951 - DNA, 704 bp, Zea Mays
tttgaactatacagtggcatgcttacaacatttatattttctactttgaaagttccgcacatctttagttaatgtatggattgggggactgcaccacttaacctttgagttgactttgctgtagatctgtgttttcatttgtgggattgtctgaactatcattattaggtctgcatgatttattctattaacatgtggtggtatttttcttcatatctattgcatgcgaaggttgattcttttccatgggagctccgtgtaaacacagcatgaatatgttgttcccaaagataagtggcaatgcatcattttaaaaagatgcacattggtttgtaggcgcaagcgcaagaagccatgaacctgtgcgaagtcaaggtaagaggttcggcactattgtgttctgattttatacactgtactcattggaagtccgttgtttcgtttttcttggtgttatccttgtattacgattttcttcatttttttaaatggtttctcgaatattttcatccttgttgccgaggatcccgtttgggacgatagttggtttccatattgccagctggtgccagtatggttaccgtgaaatctgagtgagagcacaccgtccgcatcttccatcagctggcacatcgcaaaattgtatactgttttgctcttgggtgttgcattgcatgtatagttttagcttgagcggttgattg

SEQ ID NO: 141952 - DNA, 86 bp, Zea Mays
atacagattacagtgactcagttaatgtcgatgtaccggatcatgtgttccttacttttgcaatagtgctcgatcgttccgatcaa

SEQ ID NO: 141953 - DNA, 621 bp, Zea Mays
aatgggggttcccttgatggagaggaggggcagcggctccgccgtcttggacgggatgggcgcgagcggcgcgcccatgacgccgaggagcaggcggaggtcggaccgccggaacgagccgctcgacccgccgggaccaccaccaccacctgcggcagaggaggccatggacggcgtgcgcgtcaggtggccgcggacccagtgcccgaacccctcgcggcggccggagtcctccgcgtcggggtcgccggcggcgaggcgctcggcgtcgggcccctcgatgagcggcgccagagcctccccgccggggcgcaggctgccggagcgcgcgacgagctgctcgcccaggtactgctccagcaccttctccggcggcggcggcggcggagccgcgggcgccttgcgccggcgcgggatcagcatcctcgccggcgacgcgctccgcggcggcgccggggacttccccctggacctcgacggcgacagcccccgtacgacctcctccttgagcgcggcgaagaaaccctgcttcctctccttatccatatctcacaatgccgtcgccctcgtccggcgccgcgaccaaggagagaacggggacgactagctagtaaagtgatg

SEQ ID NO: 141954 - DNA, 357 bp, Zea Mays
aatgatcttaatggcaggcatcattgttcgtaatacacttgtgacctatgaccgtcacaatgaagagattggcttcttggaaaactaactgttcagagatgtgcgagagactacatatcggtgatgctccttcaccagccccttcaagtgacacaatttcaaaaactgatttgtcacctgctccttcccctagtagcttgccagagtttgatgttggtctcatcaccgttgatatgtccataaatgtcacttacccaaatctgaaacctcatctccatgagctggctgagctgatagctaaagagctggagattgactctcgtcaaacgaattcaagctttatttcatcaggaaaac

SEQ ID NO: 141955 - DNA, 1299 bp, Zea Mays
aacctgccatcatgattcttatagcctgcgttcagatccttaaaacggccgccacagctacagcttgttcgcggcacagcatttggcaactcaatacccagctctcatcaggagctcaacaaagtctgttaggatgctgagagcaacgcacctcgctttcaggtttctcccctctcagctctcagccgcaattggttgtcgtgctttagttctgcttttgtttctttcatgcacgaactatccctttcttaagcattcccgccgattactgatcgtggcttcttgaacgcaggagggacaagggtacggctgcgggagccgccttgcgtggcgtcgtcggtggcttctcgacggcgtcagactcccagtcccaaaggctagccggcaaggtcgccgtcatcaccggcgcggccagcggcatcggcagggcgacggccgccgagttcgtccggaacggcgccaaggtcatcctcgcggacgtgcaggacggcgccggccgcgccgtggccgccgagctcggcccggccgcggaatacgcccgctgcgacgtcacggacgaggcccagatcgccgcggcggtggacctcgccgtggcgcgccacggccgcctggacgtgctgtacagcaacgcgggcgcgccgggcgcctcggcgccggcgccgctgccgtcgctcgacctcgccgacttcgaccgcgtcatggcggtcaacgcgcggtccgcggtggcgtgtctcaagcacgccgcgcgcgtcatggtgccccgcggcgccggctgcgtcctgtacacggggagcactacgggcatgctcggcggcctcgccgcgctgccctacagcctgtccaaggccacggtcatctccgtggtgcgggccgccgcggacgagctggcgcggtcgggggtgcgcgtcaacgccatctcgccgcacgccatcgccacgccgctgctgctccgctccctcgccaggctgcacccaggcgtccccgacgagcagctgaagcgcctggtggagactggcatgagcgacctccgtggtgcggtgctgcaggtccaggacgtcgcaagggcggccgtctacctggcctccgacgaggccaagttcgtcaccgggcataatctcgtggttgacggtgggttcacggccagcaagcggatcggcacgccggaggcaagctcaaccgctagctgaccattctcctggacaggtcctgcgaataattataaatcaatgtacttggttgttggttgatcgtgagttgtgagttgtgaccggattgatatgaaacctagcattctaaagt

SEQ ID NO: 141956 - DNA, 1130 bp, Zea Mays
cttgttcgcggcacagcatttggcaactcaatacccagctctcatcaggagctcaacaaagtctgttaggatgctgagagcaacgcacctcgctttcaggagggacaagggtacggctgcgggagccgccttgcgtggcgtcgtcggtggcttctcgacggcgtcagactcccagtcccaaaggctagccggcaaggtcgccgtcatcaccggcgcggccagcggcatcggcagggcgacggccgccgagttcgtccggaacggcgccaaggtcatcctcgcggacgtgcaggacggcgccggccgcgccgtggccgccgagctcggcccggccgcggaatacgcccgctgcgacgtcacggacgaggcccagatcgccgcggcggtggacctcgccgtggcgcgccacggccgcctggacgtgctgtacagcaacgcgggcgcgccgggcgcctcggcgccggcgccgctgccgtcgctcgacctcgccgacttcgaccgcgtcatggcggtcaacgcgcggtccgcggtggcgtgtctcaagcacgccgcgcgcgtcatggtgccccgcggcgccggctgcgtcctgtacacggggagcactacgggcatgctcggcggcctcgccgcgctgccctacagcctgtccaaggccacggtcatctccgtggtgcgggccgccgcggacgagctggcgcggtcgggggtgcgcgtcaacgccatctcgccgcacgccatcgccacgccgctgctgctccgctccctcgccaggctgcacccaggcgtccccgacgagcagctgaagcgcctggtggagactggcatgagcgacctccgtggtgcggtgctgcaggtccaggacgtcgcaagggcggccgtctacctggcctccgacgaggccaagttcgtcaccgggcataatctcgtggttgacggtgggttcacggccagcaagcggatcggcacgccggaggcaagctcaaccgctagctgaccattctcctggacaggtcctgcgaataattataaatcaatgtacttggttgttggttgatcgtgagttgtgagttgtgaccggattgatatgaaacctagcattctaaagtatcaaccagcgttacattatcagt

SEQ ID NO: 141957 - DNA, 679 bp, Zea Mays
accgaggcgacactgtttgcttgtgccgcttgtataaaatgactgcgcggccgcgctgatgggccaccacttctgctttcgcacccatcggcgctcgcaagaaccgtcagatcaccgccgcttgcaactgtcgttttcgccgctggtgacgagatcgacgacaagctcgctgacgctgcgccatctaaagactgccgctcgccgtcgaccccggtacgctgccatgcccccctctcgcagtggtggtgcaactccgtcgccgcaccacggggcaggaagggcgttggctcttcctctactagggttccatgctccggtgggccaggccgagagaattatgatgtgggcccctcgaagattacatcggagggtaaacgagatggagagttcgcgctacttcctgggtggatacgggcgtgccccttgggtggagactgtgccgaggccagatgtcgaaatgttattttttgaggggttgttcgctgcaggacttcgtctgtcgtgccatggttttctaattgaagtgcttgagaagtttaaggttcaaattcactaattaacgtcgaacgccatggttgcgttgagcaagtttgtgtgggcaatgactacctttggcggaggcccgagcgtcgaggtcttcgccaagcactattgcttgcactggcaggtcttcgggcga

SEQ ID NO: 141958 - DNA, 576 bp, Zea Mays
taaattgagtttgccatcacctccccctcgccacaacgatccgttcgaacccttccctgagcgcagccatgaccggcgatgcccgcgccatcgccgcagcaggctgccaccgtgggctcgcgtggccaggccacctggagctgccgccggcccagccaactccttggctatgcgcgcgctccaccagggacggctcggctggccccgccgcgctcggccgacgccggcgagccccggccaggaaaggccgatcccctttccctgtacgttccaaggaagaagacgatggaccaatctgcaaattccagaacagcaggggggtaagtgaagggtttgtgactcttgtgaatagtgctgaaagggcatatgtgctgatgtgtaggcacgtttgtttcagggacctgggtgaaagtttgttgttcccattttcggttttatatctcagattttgtgctgaagtttgaaaattcatagaaaatcgtagaaaaatcgtaaaacgttaaatgaggactttttggaatccttgtgaaattctctatgccatggatatctaagttggaatgtttcagtggaaaa

SEQ ID NO: 141959 - DNA, 639 bp, Zea Mays
acgacaacacaaacttcagaaaaccctctctaaacacagcaatggagagagtacctggagtggaagagcagaagtcagcagaccaagttaaccaagctggtctagctgatgagagtaccacagtaccgtggctgaagttgggtcttgatgcgccaaaaagtgaagaagtcaagcctcaagaggcgaaaccagtggccactccacataggactttctcctgcaactactgcatgagaaagtttttcagttcgcaggctctcggtgggcaccagaatgcgcacaagagggagaggtgtgcagcaagaaggacatacagacttcagatgatgatgggccttcctccatccgcttcctttctccaacctttgagagtgaactcgcactccacgattctgaagggtcatggtgaaagagctgcggttgccgtagcaagattcgacggaggccaaatgagtggatggatgccttttgcagttgaagaacctggagggttagtatggccagggagcttcacagcaagttcagatgagtccaagaagcaaatggagaaaaatcttgacctaaccctgcgcttgtaaattaaactgtaataagaagtaggtcatcatatgtaaccattttctgagtcgtgtcatcttt

SEQ ID NO: 141960 - DNA, 1013 bp, Zea Mays
gctcttctcccgattcccgaactccacgccacagatctctcgcttttctctcttcttttctctccgtactcttacccccgcaggtcgcagctatggcggaggacgcccccaacgcagccgccgagggcggccagcccgctcctcccgagggatctgccgatgccgccccgtcggctactgcgggcgccaaggccgcggaggcgctgctcccgtcgctcagcatctggccgccgtcgcagcgcacgcgcgacgccgtggtgcgccgcctcgtgcagacgctcgcggcgcccagcgtcctctcccagcgctacggcgccgtcccggagtccgaggccgagcgcgccgccgcggccgtcgaggccgaggctttcgcggccgcctccaagtccgccgccgccgagtccccggcctctatcgaggaggggattgaggtgctccaggcgtactccaaggaggtcagccgccgcctcctcgagcttgccaagacccggtccgccgctgcgacggtgcccgccgaggggagcgcgcaggaggccgaggactcgtcggcgacttctccagccgccgaggaggctgccgtaaaagaggagtaaggcttcggcccgtgctttgatccaccgacagttgttgttattttggcatttcgtcggaatgttattcatcgtcccccctgatgtttgttccacgaacatatagtattaagttatatatcaaccgcgcgtcctttgcattgcatatgtgaaggttgctcgtgtacgttttcactagataatttcttctggttttctggtttgcgaagtgtttaatactcagagagttcattcatcgttagggcttaccacatcatggtctaggcagtagtatcttgagctgcgttacttgttgggcttcggaggttatacttttcttgatgaatgaataacccatgtatgttgaactttatacgtgcatcgattctgcatctgcgcagttccagaggatattttgaaatacgttaaatcatttgtagtaaa

SEQ ID NO: 141961 - DNA, 933 bp, Zea Mays
ggggagtccattctcacgggcagcagttctgccagttcaacttgatccgcgcttctcgtgtcccctgccccttctgtcctcgccaccgcccagcttctcctcagtcctcaccctcgtgtgccttcggatccgcggttctcggagtcggagatagttgcaggtggtgtctggtcgcttgcggtagccggtaggcgggttcgctgcgggtggtcggcggcgcgatggtttccttcgagatgaacgacctcaagagtaagcgactcctcgcccacccgctctagttccctctcccttttgctggcggtttgtgaggccgtctggactctggcctctagtgctgcgtgtttgtgagatcatgagatgatcgggtcgcttttgcttgtacgtttcgcttgcccgtgagctgtttgggaggggagatttggtcgtgctcgcttcgctctctcgctcagtttgttgttcgtgcatgtgaaggaccggccgcgttggctgcctctcggttttgcgctgtttttatgcatgaatcgtttggtggagattgggcttattgggatggctgcctcgcatccaaatcatgaattcatgatgattatccgcgaccattggtagtaccgcagggcttaatgtgtaacctgtcttccttcagggtgaagaattctcatcaaaattcactgatcttctgcatttcattgtacctgcctgcgttcgtgtagtgtttagcatatgcattcgatacaacgtgctattagaaagattgcgtcactattaatgaggaaagctatgttctgaatattaacattgcgtccctggtctctgccgtctgcgcactgcctgcagtccggttagagttcagaaaatgagtttacctctacgaattctgcatatattcagaggaagaatttgaccataaaattatgtttgctcatctactaa

SEQ ID NO: 141962 - DNA, 1345 bp, Zea Mays
ggggagtccattctcacgggcagcagttctgccagttcaacttgatccgcgcttctcgtgtcccctgccccttctgtcctcgccaccgcccagcttctcctcagtcctcaccctcgtgtgccttcggatccgcggttctcggagtcggagataggtgcgcgcgcgcgtctgcgctccgatccctggcgaaaccttacaccctggggcgcgattcgtttatggccacgcacggcgcgacggtttctcctaactctctatctgcttccctttttcgctgctgttgcagttgcaggtggtgtctggtcgcttgcggtagccggtaggcgggttcgctgcgggtggtcggcggcgcgatggtttccttcgagatgaacgacctcaagatgtcaacagagattgggctgggcttgactggatttggagttctattcacattgctcgggatcattatgttgtttgacaagggattcctggcgatggggaatattctcttcgtttctggcgtcttactgaccattgggttgaagccaactgtgcagttcttcaccaagcctaagaatcacaagggttcaatatttttcgggtttggctttttcctggttctcattggatggcctgtctcaggaatgctggtggagtcgtatggcttcatcacgctcttcagcggcttctggccaacagctgctgtttacctgcaaaagagcccctccttcggttggatattccaccaccctcttgtgacttcgctgatcactcggttcagaggaagacgggtcccggtgtgagtggataggatcaccccgagggcatgcgaaatcgcctctactgtacagaagtaggccaattgacatatgcactttattcgtttatgttcgtcgattctacctggtttaaagagagactaaaaggtggccgctgttgctggtattggatcttcctacgctgctaccagtagtctgtccatagcgtaactacattgattgcaagagagcatctgtcggttgttaataaataggcagatgtatcgatggtgataacatggtgctttctctgaatgacgatggctgagggagctgtgaactggtttggaaaccagccagcttgtgagagacagttgtgttacactgctacttagggatggcaacggggaattccctgtcgggttttagctccctaaacccgtccccgcgacgaaaaaattttcccgcggggatccccacgaatgcttgcgggggacatttcttccccatccccgttccccgcggggataaatccctcgggtatccccatagcttaggaaatgaaagtgccaaggaccaagctgacagcagaaccgtaaaaaaaa

SEQ ID NO: 141963 - DNA, 1213 bp, Zea Mays
ggggagtccattctcacgggcagcagttctgccagttcaacttgatccgcgcttctcgtgtcccctgccccttctgtcctcgccaccgcccagcttctcctcagtcctcaccctcgtgtgccttcggatccgcggttctcggagtcggagatagttgcaggtggtgtctggtcgcttgcggtagccggtaggcgggttcgctgcgggtggtcggcggcgcgatggtttccttcgagatgaacgacctcaagatgtcaacagagattgggctgggcttgactggatttggagttctattcacattgctcgggatcattatgttgtttgacaagggattcctggcgatggggaatattctcttcgtttctggcgtcttactgaccattgggttgaagccaactgtgcagttcttcaccaagcctaagaatcacaagggttcaatatttttcgggtttggctttttcctggttctcattggatggcctgtctcaggaatgctggtggagtcgtatggcttcatcacgctcttcagcggcttctggccaacagctgctgtttacctgcaaaagagcccctccttcggttggatattccaccaccctcttgtgacttcgctgatcactcggttcagaggaagacgggtcccggtgtgagtggataggatcaccccgagggcatgcgaaatcgcctctactgtacagaagtaggccaattgacatatgcactttattcgtttatgttcgtcgattctacctggtttaaagagagactaaaaggtggccgctgttgctggtattggatcttcctacgctgctaccagtagtctgtccatagcgtaactacattgattgcaagagagcatctgtcggttgttaataaataggcagatgtatcgatggtgataacatggtgctttctctgaatgacgatggctgagggagctgtgaactggtttggaaaccagccagcttgtgagagacagttgtgttacactgctacttagggatggcaacggggaattccctgtcgggttttagctccctaaacccgtccccgcgacgaaaaaattttcccgcggggatccccacgaatgcttgcgggggacatttcttccccatccccgttccccgcggggataaatccctcgggtatccccatagcttaggaaatgaaagtgccaaggaccaagctgacagcagaaccgtaaaaaaaa

SEQ ID NO: 141964 - DNA, 1204 bp, Zea Mays
ggggagtccattctcacgggcagcagttctgccagttcaacttgatccgcgcttctcgtgtcccctgccccttctgtcctcgccaccgcccagcttctcctcagtcctcaccctcgtgtgccttcggatccgcggttctcggagtcggagatagttgcaggtggtgtctggtcgcttgcggtagccggtaggcgggttcgctgcgggtggtcggcggcgcgatggtttccttcgagatgaacgacctcaagaagattgggctgggcttgactggatttggagttctattcacattgctcgggatcattatgttgtttgacaagggattcctggcgatggggaatattctcttcgtttctggcgtcttactgaccattgggttgaagccaactgtgcagttcttcaccaagcctaagaatcacaagggttcaatatttttcgggtttggctttttcctggttctcattggatggcctgtctcaggaatgctggtggagtcgtatggcttcatcacgctcttcagcggcttctggccaacagctgctgtttacctgcaaaagagcccctccttcggttggatattccaccaccctcttgtgacttcgctgatcactcggttcagaggaagacgggtcccggtgtgagtggataggatcaccccgagggcatgcgaaatcgcctctactgtacagaagtaggccaattgacatatgcactttattcgtttatgttcgtcgattctacctggtttaaagagagactaaaaggtggccgctgttgctggtattggatcttcctacgctgctaccagtagtctgtccatagcgtaactacattgattgcaagagagcatctgtcggttgttaataaataggcagatgtatcgatggtgataacatggtgctttctctgaatgacgatggctgagggagctgtgaactggtttggaaaccagccagcttgtgagagacagttgtgttacactgctacttagggatggcaacggggaattccctgtcgggttttagctccctaaacccgtccccgcgacgaaaaaattttcccgcggggatccccacgaatgcttgcgggggacatttcttccccatccccgttccccgcggggataaatccctcgggtatccccatagcttaggaaatgaaagtgccaaggaccaagctgacagcagaaccgtaaaaaaaa

SEQ ID NO: 141965 - DNA, 1235 bp, Zea Mays
atcccagcccaaacccctcaggactgatttgggcctcaggcagcccgcagccggtcagtccttccttttcctgttcgcgtccacgatcctgccgccgccgccgctcgcacctccacgatcctgcccagcgccgtgcgcctccacccccgccccgtccgccgcccgcctggtccatccccgtcccgtctggccggcgttgccaccccgggtcccgcgcgcgtggagccccggcctctaccagccgcacgtcgcaaccgacgaggacgcgcgcgcctgcagctcctgcccggtcccggctggccggccgccggcactccggctgcccctcagcggctcagcccctgagcttgtctgcttgaatgcttcagtgcgggtgcagcacagcggcagtgccccctgtcagtgccagccgccttagctactgcttactacgttgcattttttttcctgttttgtggactgtggtaattgactgtgtatcgagcaggcataccctgttaaaaatcctggttccactactagtcaggccatggctgcagcagaggcatgggtgcggcaggagaaagttaggaagtttgaggagttcgtggaccagcggttgaaacccgacctcaccaatgccatcgcacagcgtaacaaggtgtttgagcagcagaagaccttcttggatttgaagaggaacattgaaaatttggagaggaatggtgttaccagcatgcggtccatggtcaatcttggctcagaggtgtacatgcaagcagaagtaccagatacaaggcatatttttgtggatatcggtctaggttttcatgtggaatttacttggcaagaagctttacagttcatatctgtaagagaggcaaggttgactaggcaaatagacgaatacacgcatctcatcgcaagcataaaagcacagatcaagttggtatgtgaaggtatccgcgaagtgctgcagctgcctgcggagaaagagttatcgcccaggaatacgtggtagaatttggttctcaatggagcagggggtggtgttctttaaacgtggttccgtttcaactcttgcagttgaaattattgtggtgccgacagtattttagagcagagaatgaggttccccttcgtacaacaatctcttcgacgacaccacgtacaactcatactgatttctatgtattcattacgttggcatatggccttgccgatttgcagtttatttgagcctcttttccaagtta

SEQ ID NO: 141966 - DNA, 1126 bp, Zea Mays
caggcagcccgcagccggtcagtccttccttttcctgttcgcgtccacgatcctgccgccgccgccgctcgcacctccacgatcctgcccagcgccgtgcgcctccacccccgccccgtccgccgcccgcctggtccatccccgtcccgtctggccggcgttgccaccccgggtcccgcgcgcgtggagccccggcctctaccagccgcacgtcgcaaccgacgaggacgcgcgcgcctgcagctcctgcccggtcccggctggccggccgccggcactccggctgcccctcagcggctcagcccctgagcttgtctgcttgaatgcttcagtgcgggtgcagcacagcggcagtgccccctactgtgtatcgagcaggcataccctgttaaaaatcctggttccactactagtcaggccatggctgcagcagaggcatgggtgcggcaggagaaagttaggaagtttgaggagttcgtggaccagcggttgaaacccgacctcaccaatgccatcgcacagcgtaacaaggtgtttgagcagcagaagaccttcttggatttgaagaggaacattgaaaatttggagaggaatggtgttaccagcatgcggtccatggtcaatcttggctcagaggtgtacatgcaagcagaagtaccagatacaaggcatatttttgtggatatcggtctaggttttcatgtggaatttacttggcaagaagctttacagttcatatctgtaagagaggcaaggttgactaggcaaatagacgaatacacgcatctcatcgcaagcataaaagcacagatcaagttggtatgtgaaggtatccgcgaagtgctgcagctgcctgcggagaaagagttatcgcccaggaatacgtggtagaatttggttctcaatggagcagggggtggtgttctttaaacgtggttccgtttcaactcttgcagttgaaattattgtggtgccgacagtattttagagcagagaatgaggttccccttcgtacaacaatctcttcgacgacaccacgtacaactcatactgatttctatgtattcattacgttggcatatggccttgccgatttgcagtttatttgagcctcttttccaagtta

SEQ ID NO: 141967 - DNA, 1088 bp, Zea Mays
ccccgtcccgtctggccggcgttgccaccccgggtcccgcgcgcgtggagccccggcctctaccagccgcacgtcgcaaccgacgaggacgcgcgcgcctgcagctcctgcccggtcccggctggccggccgccggcactccggctgcccctcagcggctcagcccctgagcttgtctgcttgaatgcttcagtgcgggtgcagcacagcggcagtgccccctattcaagtcctgggtccgccactgatagtggccctagcctctaggcgtcaaaactgaccggcgacaccactggttgagggcatttgccgtgggaacaaaggactgtgtatcgagcaggcataccctgttaaaaatcctggttccactactagtcaggccatggctgcagcagaggcatgggtgcggcaggagaaagttaggaagtttgaggagttcgtggaccagcggttgaaacccgacctcaccaatgccatcgcacagcgtaacaaggtgtttgagcagcagaagaccttcttggatttgaagaggaacattgaaaatttggagaggaatggtgttaccagcatgcggtccatggtcaatcttggctcagaggtgtacatgcaagcagaagtaccagatacaaggcatatttttgtggatatcggtctaggttttcatgtggaatttacttggcaagaagctttacagttcatatctgtaagagaggcaaggttgactaggcaaatagacgaatacacgcatctcatcgcaagcataaaagcacagatcaagttggtatgtgaaggtatccgcgaagtgctgcagctgcctgcggagaaagagttatcgcccaggaatacgtggtagaatttggttctcaatggagcagggggtggtgttctttaaacgtggttccgtttcaactcttgcagttgaaattattgtggtgccgacagtattttagagcagagaatgaggttccccttcgtacaacaatctcttcgacgacaccacgtacaactcatactgatttctatgtattcattacgttggcatatggccttgccgatttgcagtttatttgagcctcttttccaagtta

SEQ ID NO: 141968 - DNA, 1649 bp, Zea Mays
ctctgctccaaagaaacttctcctccacctcctcccacgccgttatcactccccaagatcccacccgctgggccctaattcccgtcgcaatacaccgcattgggcgtgcgcgttgtgccaccgccaccggggtagcgtctcggatctgaccggcgagtcggtggcggggccttgggtgcgtctgagaagtgaccgcgaatctaaggagagcacaggagagcgcggcggggaaggagccgggacgaatggcgccgacgcggggcgccggaggcggggtgcgtctgccgccgatgaacgcgctggagatcctgcgggagacggtgcgggtgctgcgcggagacccgcacgcgttcacgtccatcctcttcctgctgctctgcccggcgtccgggtgcctcctcctgtccgcggccgcgctggacggggccgtcgtgctgccgctcgcgcggaggctcctcgccgccgccgccacgtcggggctcccgctcacgcatttcgtcgggcagctggcgcaccacctcgccgccacgctcgtctccgccgtcgtctcgctgccggcgctcctcacgctcctcctcgccgcccgcgccgccgtggcatacaccgtcgcggccgtgtacgccgggaagcccctagcggccggggacatcaccctcctcgcgcgccgcgcgtggccgcgcctcgccgccacgtacgcgctcgggtgcgccgccgtcgccgtcggactcgtcgccttcctcgccctcctcgtcacggcctgctccacgctcagggccatgctctacccgcccgacattgtcgtctgcgcgggcctcttcactgtcctcgcctactccgtggtgtacgcgcacaccatcatcatctgcaacctcggcggcgtcatcgccgttctcgaggaagtggccgggatcaatgcgctgcgccggtcggtgcagctgatgcgtgggcagacccacgtcgggctgctcatcttccttggatccaccattggcctagctttcgtggaagggctgtttgagcacagggtgaagacgctgagctatggcgatggctcgtcgcggctctgggaggggccattgttggtcctcatgtactcggtcgtgatgctggttgattcaatgatgagtgcggttttctacttcacttgccggtcatcaaacttggacttcttggacgagcagggtggctcggttgaggagcttgagatgatgagggctggcagtttagatgcatttaggtgatgaagaagattggtttatttctcacgtgtgtatctgttcatagcatcataggagaataagtgagatggccatttgtcaagagccgcacagattgacaagtccttattggtggttacaagccatggtggcttatgtgtatgcatgggttgattagctgaagttggtgttgaaaggaacattttttgcagccatttggtatatccatgcttagtcaatagcggatttggatgggaaggctagagggagatctgtcatgtggtttgttctggatcagatccatgttttggcagcgattgaagagctggtgatatgtgtagcattctttcaaaatggtgtaactagtatatcaatttaatcgttgtggaattttgttgcctaatggcattttggttatactggatgaaacat

SEQ ID NO: 141969 - DNA, 110 bp, Zea Mays
atggtggggcggccgggtgggcgttgaggcgggtttggctagcggcggggcgcagcgcacgttgggttgcggggtgagccgcgaggaaggaaggggtggcgcatgcgagt

SEQ ID NO: 141970 - DNA, 468 bp, Zea Mays
cctcaactaatcgggtcagatcaagtcatcgggaaggccgctatggacgacgaggagcacgaggtttacggccaggagatcccgaaggacagcgatatggacgactgacgttgatatggccgccggggacgacgcgacgaagcttcaggagcttgacgagatgaagcgcgagctgaaggagatggaggaggaggaggccgccctccgcgatatgcaggccaaggttgccaaggagatgcaaggaggtgaccctagtatatctacaactgaagtgaaggagcaggtagatgtgtggtatgtgtttgttggaaatgttgattatgcttgcaccccataagtacagcagcatttccaagcttgtggaactgtcaacaaggtgacaatcttgactgacaagtttgggcagccaaaagattttgcttatgttgaatttctagaacaaaaggttgtccaggaagctctgatacc

SEQ ID NO: 141971 - DNA, 633 bp, Zea Mays
ggaggtggcacacctggtgcacgtccacttggtggtggaggtggaggaggaccaccaagatgccctctaggtgcaggaggtggtggaggtcctcttccaccacctccaggtgggggtgggggaggtggagctcctggaggaggcggtggtggtggagctcctgtccgtgaacctggaggaggtggtggtggtggagctcctggtcgtgcacctggagggggcggaggaggtggaggtccagagcgagcacctggaggaggcggaggtggtggtggacctgcacgtgaagcaagaggtgggggtgggggtgggggtgctcctcgaccagggggaggaggtggtggaggtggtgctcctcgtccagagggaagagggggaggagggggtgctcctcggccaggtggagggggcgggggtgggggtgctcctcggccaggtggatggggcgggggtgggggtgctcctcggccaggaagagggggagggggagggggaggtggtgctgctgaacgtgccataggaggaggtggtggcggcggcgggggcggaggtggactagaaagtgtgcatgaaagaggaggcaatgggacattagaatacaatgatggtggtggcggggggtgtggcggatga

SEQ ID NO: 141972 - DNA, 2306 bp, Zea Mays
cttttacgaaccactccgcgagtagccgagcaccccagcgctcaccgacctttctccaaaccgtcgtcgcgcccgccccgtgccgcccgccatggcgccgccggagccggagatgttcgacgtcgtcatattcggggcctcgggcttcaccggcaagtacgtcatccgcgaggccctcaagttcctcaacgcctcctcatccgcctccccgctccgctccctcgcggtcgccggccgcagcagggaccgcatcgcagccgcgctccgctgggccgcggccccggccccgccgcccgaggacgtgcccatcctcgtcgccgacacctccgacccggcctccctcgcggcgctcgcctctcgcgcccgcgtcgtgctctcctgcgcggggcccttccgcctccacggccacgccgtggcggcggcctgcgcggccgcgggcgccgactgcctcgacatctccggggagcccgagttcatggagcgcgtcgagtccgagctccacgagcccgccgccaggagcggctccctcatcatctccgcctgcgggttcgactctgtccccgccgagctcggcttcctgttccactccaggcagtgggagcccccgtccgcgccggccaccgtagaggcgtacgtgagcctgcagtcgaccaagaggatcgtcgggaacatcggcacctacgagtcagctgtgctcggagtggccaacgctggccagctgcaggcgctgcgccggtccagacccaggcgaccccggcccaatattccaggccctccacctcccaaagggtcgctgattgaaggtcacaatcctctgggaatgtgggctatgaaactgccttccgctgacacagtggtcgtgaagagaactctatcaaccttgactgagcatcctgagggccttcctggcgcagaagaaaccccagagtacgctgatcataggaagaaattatggtcttctgtcaaacctgcccattttggcgtgaagatcgcctccagatccctgctgatccttgtgcgcttcatcttcaccggaatcttcatcggcctgctcgccaacttctccttcggcaggtccctcctgctgaagtaccctgagtttttctccgctgggctgttcagcagagccggcccgaccgaggaagaggtgaagagcgcctcgttcaagatgtggtttgtcggtcacggctacagcaacgtggatagctcgttggagctcggaagaagcaagccggacaaggaggtgatcaccaaggtttcgggacccgaggtcggttacgtcacaactccgatcgtgctggtgcagtgcgccctcgtcctgctgagccagcgtgccaacctgcccaagggcggggtatacacgcctggcaccgtctttggccctactgatctccagcagcgcctccaggataacgggctgtctttcgaggttaacaccactagagccatgcattgaagttcactggctccactcagtgcatcctgtggaaaaacttggcagaaggatgcaacttgagcaataagaagcgccaattagcaacttaaagggcttgtttggaagtaaggataccgccggagaggagctgaaaccccttgctattcaattttgaatataaggggattttagctccttaaatcccgtcgggtataattgcttccaaaagccataactgtgtgtgtcgtaccaacagtcctatggagtcttactagttactaccgctgtaccttctgaattacctagttccttattcttatgctgtgtttatatagaggtgacaataggaaaacgttgtgatcgtgtgctgcagagaggatcatatgggttgcaatgcgcaatgccagactcggcgtgctgtggaaggaaagatgctattcgtgccacacaaacgtaatcctgcagttcaaataccgaccagggcccacgacatggatccgaacaaatcgcaagaacgtccacgacatggattcgaacaagaaccaagaccaactatctcccaagaaccaagaccaactatctccgttctctctctccaccaaagcaaatgccaaaggaaccaatgtgttgcttgtgtcacatgaaattacaactaacaatgtgcctttatacttagaaaacagaaaagtatcattaatagagagcacgagacgacaatgtctgaaggtctctacgcactgcaagaaacaccagaaagcacgaaagaacatctctctgtcattcctccatttgttaggtttagggatgtactcgtaatgcatgcatgagttttttgcttttaatgcattgaacaatgctggcaacttctcgt

SEQ ID NO: 141973 - DNA, 1590 bp, Zea Mays
gtctgattttgttaaagttcatctaattcttttgcaacttcttttagattccaggccctccacctcccaaagggtcgctgattgaaggtcacaatcctctgggaatgtgggctatgaaactgccttccgctgacacagtggtcgtgaagagaactctatcaaccttgactgagcatcctgagggccttcctggcgcagaagaaaccccagagtacgctgatcataggaagaaattatggtcttctgtcaaacctgcccattttggcgtgaagatcgcctccagatccctgctgatccttgtgcgcttcatcttcaccggaatcttcatcggcctgctcgccaacttctccttcggcaggtccctcctgctgaagtaccctgagtttttctccgctgggctgttcagcagagccggcccgaccgaggaagaggtgaagagcgcctcgttcaagatgtggtttgtcggtcacggctacagcaacgtggatagctcgttggagctcggaagaagcaagccggacaaggaggtgatcaccaaggtttcgggacccgaggtcggttacgtcacaactccgatcgtgctggtgcagtgcgccctcgtcctgctgagccagcgtgccaacctgcccaagggcggggtatacacgcctggcaccgtctttggccctactgatctccagcagcgcctccaggataacgggctgtctttcgaggttaacaccactagagccatgcattgaagttcactggctccactcagtgcatcctgtggaaaaacttggcagaaggatgcaacttgagcaataagaagcgccaattagcaacttaaagggcttgtttggaagtaaggataccgccggagaggagctgaaaccccttgctattcaattttgaatataaggggattttagctccttaaatcccgtcgggtataattgcttccaaaagccataactgtgtgtgtcgtaccaacagtcctatggagtcttactagttactaccgctgtaccttctgaattacctagttccttattcttatgctgtgtttatatagaggtgacaataggaaaacgttgtgatcgtgtgctgcagagaggatcatatgggttgcaatgcgcaatgccagactcggcgtgctgtggaaggaaagatgctattcgtgccacacaaacgtaatcctgcagttcaaataccgaccagggcccacgacatggatccgaacaaatcgcaagaacgtccacgacatggattcgaacaagaaccaagaccaactatctcccaagaaccaagaccaactatctccgttctctctctccaccaaagcaaatgccaaaggaaccaatgtgttgcttgtgtcacatgaaattacaactaacaatgtgcctttatacttagaaaacagaaaagtatcattaatagagagcacgagacgacaatgtctgaaggtctctacgcactgcaagaaacaccagaaagcacgaaagaacatctctctgtcattcctccatttgttaggtttagggatgtactcgtaatgcatgcatgagttttttgcttttaatgcattgaacaatgctggcaacttctcgt

SEQ ID NO: 141974 - DNA, 852 bp, Zea Mays
atggaggcagccgcggcggtgcagaagctggccgagtccgccgtaccgcttcacctcaccacggagctcgtccagcgtggtcccgtcgacatcgaggccaacagctattctgttctggacgacgcggcaccatctctggctccttctattctacagttggcggtgcacgcagaggaggagcaggttctcgtcaccacgccaaccaagtgttcgacaatggacctcaaccgcggcgcctactccgtccccaacctccccgtgaagcctcagttctttgatgtgggcaaggactgtaactgggcgaggggcatccggagaaccgagatccagctcgctgatggcaagaactgtgagctacataggtgctggacagatatcttggatgctataagcaaggctcaacatttgatttacatcactggctggttgactatattggtgagggatgatatcaattctgtcgacctgcttacgaaggagggcttgctgactacccatgatgtggagattgcaaaaggagagcaggaaatcatgaatgaagtacttccagcagagagccggtcatctcggtttggtgtggctatggatcttgcagacatatggccttgctatgaatccaaaccatctgatgcgcaaggctatgctatcaaagggataccaaatctcagaaacacatgctatcggagtgcagtattgcagtgcctgttgatgctcggtaagctgctagaaaggatactaccatcgacatggttagccatccaagggtgctcacgaactggtatagccatccaaggatactaccatcagttctcttgttttatccataagctattttcagttgagctggtatag

SEQ ID NO: 141975 - DNA, 892 bp, Zea Mays
ctgctgtgcgcttcgcctccaacagcgtcagcaacagtacgcttcagcgccttctgctcatgcccaaaccccgaagcggaagccccccgaccccaaacctcgcaagcgaccccagtaatggcgaccaaggcgctatccgtctcctcgctcacctccacggcctttgcctccttttccttgccgcggccccgcaggccttcaccttcgcctcccctcctccgccttctcggtcctcgcccccgcgcctccactctctccgccgccgctcccgacgacgaggacggcgtcgacaccgtggagcagctcctccacccacgcccgcctgagacctcagcccccgccggatcccgcggccggatcgaccgcctcatgaagctccagcgccgcgccgacggcgacgccgtgcccggggggcggaggaggtggttcccttacctggacgcgttccggcccgcggccgggggcgcggagctgtccagcggggaggtcatagatgtgctggagccgcacatcctagaggcgcggcgggaccggattcgacaagccgttggcaaccggagctacgccgtttgcctcgtggtggaaggcctctccgacttcggcaacgtctcggccgcgttccgctccgcggacgcgctcggcgtgcagtccgtgcacgtcatttcctgtgatagcagcaaaaggtatagagacaacaggcatgtgagcatgggtgctgagaaatggcttgacattgagatatggaactcacctgcagaatgtttcagtgcattaaaaaaacgcggttatcgcattgcgaccacttatttgggaactgattcggtatttttttcacacttcaacattttggggatttggtatccttttcactcttgtacatcgttatctatcg

SEQ ID NO: 141976 - DNA, 1766 bp, Zea Mays
ctgctgtgcgcttcgcctccaacagcgtcagcaacagtacgcttcagcgccttctgctcatgcccaaaccccgaagcggaagccccccgaccccaaacctcgcaagcgaccccagtaatggcgaccaaggcgctatccgtctcctcgctcacctccacggcctttgcctccttttccttgccgcggccccgcaggccttcaccttcgcctcccctcctccgccttctcggtcctcgcccccgcgcctccactctctccgccgccgctcccgacgacgaggacggcgtcgacaccgtggagcagctcctccacccacgcccgcctgagacctcagcccccgccggatcccgcggccggatcgaccgcctcatgaagctccagcgccgcgccgacggcgacgccgtgcccggggggcggaggaggtggttcccttacctggacgcgttccggcccgcggccgggggcgcggagctgtccagcggggaggtcatagatgtgctggagccgcacatcctagaggcgcggcgggaccggattcgacaagccgttggcaaccggagctacgccgtttgcctcgtggtggaaggcctctccgacttcggcaacgtctcggccgcgttccgctccgcggacgcgctcggcgtgcagtccgtgcacgtcatttcctgtgatagcagcaaaaggtgcagaggtatagagacaacaggcatgtgagcatgggtgctgagaaatggcttgacattgagatatggaactcacctgcagaatgtttcagtgcattaaaaaaacgcggttatcgcattgcgaccacttatttgggaactgattcggtttgtgtgtatgatatggattggtctcaaccaacagctattgttgtgggcaatgagcttaggggtataagtgatgatgctctagaattgtcagatttgcactgcagcattccaatgaaaggcatggtggattcgtttaatgtatctgttgcagctggaatcctcatgcaccatgctgtttgtgatagagtttcccgcctgggccatcacggtgatctcttgcctgaagaaaataggatattgcttgctgagttctatctgcgacacagagaaagcacggctactatagttcatgaatatgccaaaatgaaggcaggaaaagttatgaccagactttgaaaacatcctgagaagctgagtgacgtgtctgccaatcaagtcttggattatctggtgcatttttctaacagaaaacgaggctattttttcctggagtttaccgctgatccctaccagattgctgggaagacgaggatccaagcccaatcattgagcagagctgttaacgattacgcatatggttttcagtgacgtggacttttgctcccaaaacagtcgcccgttaactatttttgtatgtttttgttaggatgaaagcttaatatgtttccacttgtttttcacaaacgttggcggtggttgggtttgggcggcaacgctccatgttctacagacggttacgaccggaagcttggtgtaaccgtaccagtataacctgtccttggagggttgagagcttgagatgtaaacgaactgcacttgtctacggcaggatgatgcgtctgtaacgcaaagctgtgcaactggtgaatctcgccaccgaattctgctagggaaagctacggacgtgttgaaaactggaacataaaagtcgtgccattgattctggcctcaacgatgctcggtaaaacaacgaaacctaagaagaaaataaaa

SEQ ID NO: 141977 - DNA, 1737 bp, Zea Mays
acagcgtcagcaacagtacgcttcagcgccttctgctcatgcccaaaccccgaagcggaagccccccgaccccaaacctcgcaagcgaccccagtaatggcgaccaaggcgctatccgtctcctcgctcacctccacggcctttgcctccttttccttgccgcggccccgcaggccttcaccttcgcctcccctcctccgccttctcggtcctcgcccccgcgcctccactctctccgccgccgctcccgacgacgaggacggcgtcgacaccgtggagcagctcctccacccacgcccgcctgagacctcagcccccgccggatcccgcggccggatcgaccgcctcatgaagctccagcgccgcgccgacggcgacgccgtgcccggggggcggaggaggtggttcccttacctggacgcgttccggcccgcggccgggggcgcggagctgtccagcggggaggtcatagatgtgctggagccgcacatcctagaggcgcggcgggaccggattcgacaagccgttggcaaccggagctacgccgtttgcctcgtggtggaaggcctctccgacttcggcaacgtctcggccgcgttccgctccgcggacgcgctcggcgtgcagtccgtgcacgtcatttcctgtgatagcagcaaaaggtatagagacaacaggcatgtgagcatgggtgctgagaaatggcttgacattgagatatggaactcacctgcagaatgtttcagtgcattaaaaaaacgcggttatcgcattgcgaccacttatttgggaactgattcggtttgtgtgtatgatatggattggtctcaaccaacagctattgttgtgggcaatgagcttaggggtataagtgatgatgctctagaattgtcagatttgcactgcagcattccaatgaaaggcatggtggattcgtttaatgtatctgttgcagctggaatcctcatgcaccatgctgtttgtgatagagtttcccgcctgggccatcacggtgatctcttgcctgaagaaaataggatattgcttgctgagttctatctgcgacacagagaaagcacggctactatagttcatgaatatgccaaaatgaaggcaggaaaagttatgaccagactttgaaaacatcctgagaagctgagtgacgtgtctgccaatcaagtcttggattatctggtgcatttttctaacagaaaacgaggctattttttcctggagtttaccgctgatccctaccagattgctgggaagacgaggatccaagcccaatcattgagcagagctgttaacgattacgcatatggttttcagtgacgtggacttttgctcccaaaacagtcgcccgttaactatttttgtatgtttttgttaggatgaaagcttaatatgtttccacttgtttttcacaaacgttggcggtggttgggtttgggcggcaacgctccatgttctacagacggttacgaccggaagcttggtgtaaccgtaccagtataacctgtccttggagggttgagagcttgagatgtaaacgaactgcacttgtctacggcaggatgatgcgtctgtaacgcaaagctgtgcaactggtgaatctcgccaccgaattctgctagggaaagctacggacgtgttgaaaactggaacataaaagtcgtgccattgattctggcctcaacgatgctcggtaaaacaacgaaacctaagaagaaaataaaa

SEQ ID NO: 141978 - DNA, 1512 bp, Zea Mays
cggcctcaccgcaccaagtcggacgccgactggcgcaggggcgtttccgtaaaccccgcgcctcgcccggtcgcttccgccgtcccgtccccgcatcgcgcctcggactgcggaccatgcctcgtcacggtcccgcgtggatggtcggttatgcccctggctcccgcgcggcgcaacgcaccccgcctgagggctatctggtgcggtgcggctcgatccggcccgacgattccgatcccttcgcgtccaccatcccgtctcgctctcggtctcgcgctccacgccggcgaccggagaaggggccgcgcatgtgacgcccacggcgaatccctcccctcctctccggtgccgccttcagccgacccgcggcgacgtgccaggattgaaggggggatgagaaggtggacatcgttgctctagtgatttgatcaccagagatggtgttggtggtgaagcagcatcgctgcacgcactctgtgagctgtgtttgcatcaagggccatctcagtgaggatgctctgttcctcgtcttccgccacatgaactggaacccaaggctgattgctatcctgtcatgtgtgtgcaagtggtttgacgaggttgccaagcaggtgctgtggaaggagttctgtcatgcaagggcttcaaagatgatgctggatttgcattcaggtggtagccacattgttgatgggaactggaaagcgctggggaagctgctcatctattgcaatggctgcacaaaaggggggctcttcaataacatccatgttccaggccattttgtgttcaggacacgcttttctaggactgcgggcaggagtttcctgcctctgccatgcaagtcagacgtgttgtatgtgtcagatccatgtgagcatcttgatcaaggggaagaaggcgacttaggtttctttcgaggcatctttaagtcattcgccacttcaagagtgaagaagatgttgattgagaagcgggctaggtttcatccaagggagttgtgctcttattgtaagtcgaagctatggaacatgttccaggaaaatatgattccaaggagtgcttctgctagactgggtgcctatgatgattccgtcgagtattttgtatgcttgaatgggcatgttattggacttggtaccctgctaccactctcagactcggaggaggcagcagatgagtaatcatcaagaatgagtcaggttggtctatctctattccatggcaaatttcttcttgaaacttttcagtaaacatcaagtttcatgcgcagacatgtctggatgtacaacatagactggttcctcttcaatattagtttgtgtttgcatacacttaatgcttaatcctatttatttaatgcatagcttgatcagcatttcatattgtataccaacattttctccttggaacagcgaaggaactttgcataagcttgttgggatatcatatcacataatgcttatttgagattttttaggaatttttgacatttaaaaaggaaacattagt

SEQ ID NO: 141979 - DNA, 1667 bp, Zea Mays
cggacgccgactggcgcaggggcgtttccgtaaaccccgcgcctcgcccggtcgcttccgccgtcccgtccccgcatcgcgcctcggactgcggaccatgcctcgtcacggtcccgcgtggatggtcggttatgcccctggctcccgcgcggcgcaacgcaccccgcctgagggctatctggtgcggtgcggctcgatccggcccgacgattccgatcccttcgcgtccaccatcccgtctcgctctcggtctcgcgctccacgccggcgaccggagaaggggccgcgcatgtgacgcccacggcgaatccctcccctcctctccggtgccgccttcagccgacccgcggcgacgtgccaggattgaaggggggatgagaaggtggacatcgttgctctagtgatttgatcaccagagatggtgttggtggtgaagcagcatcgctgcacgcactctgtgagctgtgtttgcatcaagggccatctcagtgaggatgctctgttcctcgtcttccgccacatgaactggaacccaaggctgattgctatcctgtcatgtgtgtgcaagtggtttgacgaggttgccaagcaggtgctgtggaaggagttctgtcatgcaagggcttcaaagatgatgctggatttgcattcaggtggtagccacattgttgatgggaactggaaagcgctggggaagctgctcatctattgcaatggctgcacaaaaggggggctcttcaataacatccatgttccaggccattttgtgttcaggacacgcttttctaggactgcgggcaggagtttcctgcctctgccatgcaagtcagacgtgttgtatgtgtcagatccatgtgagcatcttgatcaaggggaagaaggcgacttaggtttctttcgaggcatctttaagtcattcgccacttcaagagtgaagaagatgttgattgagaagcgggctaggtttcatccaagggagttgtgctcttattgtaagtcgaagctatggaacatgttccaggaaaatatgattccaaggagtgcttctgctagactgggtgcctatgatgattccgtcgagtattttgtatgcttgaatgggcatgttattggacttggtaccctgctaccactctcagactcggaggaggcagcagatgagtaatcatcaagaatgagtcaggtttggaagattgaagcccaggacttgcgaaaatggtactgaatcttggttgtgactagcagagagtgggatgacattggttcagcaaactgttgcacgacaagaatctgtggtgggctctgcgtcggactacccctgtgttcttgcacctgataacaaaaaaagaacccaatttcgaaggacgagaaagaaccaaatgcacacggttcagctcatccttttgaattgatcatccatcagagctagcataacataactatatacattgataagtaggttaaaatagatcaaacaatctcggagataaataatgtactcttgtagtcttgtgagtagctaacacgatatttggtataagtttcatatccttacttttcacatatgagcattcatatctgctagttataagcagcatgttgtaaaagtgttgtggaaatgattgagtaaatttgacggtggttgatagttagacaccattttctat

SEQ ID NO: 141980 - DNA, 634 bp, Zea Mays
cgttaatataaatctagacgtactggttatcttcagaagagccatattgtccggtcagtttgttctttttattttatttgtgaaaaatatgaggaaaatgtgcattgctgacatcctgttttatttgtgattgctactttacgttgctttatctactaggccataacaaattaacaacatccggtgacaagtgcgccagtttaaggaaggtagcagagtctctgtctcaaataaaagggtgccagggctatgatctagtttggaagattgaagcccaggacttgcgaaaatggtactgaatcttggttgtgactagcagagagtgggatgacattggttcagcaaactgttgcacgacaagaatctgtggtgggctctgcgtcggactacccctgtgttcttgcacctgataacaaaaaaagaacccaatttcgaaggacgagaaagaaccaaatgcacacggttcagctcatccttttgaattgatcatccatcagagctagcataacataactatatacattgataagtaggttaaaatagatcaaacaatctcggagataaataatgtactcttgtagtcttgtgagtagctaacacgatatttggtataagtttcatatccttacttttc

SEQ ID NO: 141981 - DNA, 390 bp, Zea Mays
atggagcaggccgacaggggaccgagtagaggaagctccggcgcgtgtagaggagcctggccgggcgcgacagcgggcgcggccatggaggcagagcgcgcgcagcagctagaggccgagctgggaaggtccaggtcgcagggaaggaagagcgctggcgcgccagcagtggagcttcacggtgagctcggaacaaggagtaccacgcagaggaactgggggagggagcttggagagggacagccgcgggagttgagggagaaggaagctccctggaggagctgctcgcaggagaggccggcgcggtggaggagaccagaggggagaagacacggctgggataaataccagagaaattgcgtgcgtgaagaggatcagaacgacggctga

SEQ ID NO: 141982 - DNA, 92 bp, Zea Mays
ctctcttcattgtccgtgttataccaagacatattggccgtgttgtaccaagacattgcatggagtaaacaataacatcagttagtcaaatc

SEQ ID NO: 141983 - DNA, 2933 bp, Zea Mays
gaaagatgggattcagtttttcatatgtttcaccagtatgctcttgtgcacttgatatttcctattttgtacaaggaccatatgtttagatgtttaaattatatctattattttctcattttcagtatttggtcgtcaagacagtcttgaacatctaaatgctactccaagggcagtgattatatcttaccagatgctaagtcgccttagagaaagtatggtgaatagaacatgggcactgatgattgttgatgaatcacataacatacgctgcacgaagaaactagaagaaaaatatgagttggcacttactatttattttctcctaggcgataatagaccttttgatatctaccaccagataaatatgctatggccccacatgcttggtactgataaatttgattatgcgaaaaaatattgcttgctgcatgttgcacgaagttatcaggggaaaatgtttaaggacttctctaagggcaattaggcgactgaaggagcatttgttgaatgaactgccccccaagcggcgacaaattattaggttgaagctaaaggcaccagatatcagggcagccacatcttcatgcggcaaaagggtgaaccctaacagttgtaatggaactcttacaattgaattgcccagtaaaagcaatgatgatgaaaatacaaaagaggaagaagaagatgattgcaagaaatctccaaggagtctcaccccacaagagattggtatcgcaaagttatctggatttagtgaatggttctcaaatcatttcatcatgaatggatttgatgctaaccataacctggatccccagtctagctgtcagaaaacaataatatttgcacatcacttaaaggttctagatggaatacaggtgtttatctctgagaatgagatcagatttgttcgcattgatggaagcacacttcaaagggaaaggaaagaagctgttgattctttccgtttggatccagaggtgaaggttgcaataattggaattactgctggtggtgttggcttagacttctcatctgctcagaatgttatttttgtggagctcccaaaatcagcttcagaattgcttcagaacacattggatgaatcacactggctccagttaaaccagagtctgttccgtgtctcgtctttgatgaatggaaaaaaggatgctgtaagggagattgaggttgatcaagtgtgccaacttgaagaaatcaaggacaccgaggaaacacaacgcaaactgcatcctttggagaatcataatgcagatttgacccacgtaccaaaaaaacttctggaaagtgatgatttgtccattgatggttttcttggcatcgaagatttggaatttgacttggatttcaccattaggacaattcctcttgaatttgaggatgaaaaccccggcacatccttgaaaaataatccaactccaacagtacttgaagacagatcttgtattgatgtttctctttcaccagctgcagtcttttgctctgtactatctagttgtaaatcaataaagtctcgtaagaggctttctggaaattctgggtccttgagtcaagctgcatctgttccagattttccaattcaagtggagtctctgcgttttgaggttagccggcacacaggacgaatccacttgtacagttgtgttcctggacatgattcaagacccaaaccactttgtgaaaattttctgccagaagaattgaattcacctttatgttctcccagtgatgttaaaacaagaactcttctcttgaaaaagattccttcattttgcaatgtgttcaatgcattcatcaaagagtggttggcactaagaccaattgatcaaaataaattgcttggaaagccattacaacttccgttgaaccttgagttgtgttttctgaaagatagcatcaatcatagcacagaagggatacttaaagggggaagtaagaggcgtgctgcatcattgaatgatgtcagtaatcctttgccagaaaatgctgaatggagacaggtggtgttgcgtaatggcacctgtaaagagagacagtacactcagggctggaccattgatgatgaacctctctgcaaactttgtcaaggactttgcaatggaaggcttgcaaagtcaccagaatattttgaagatctattctgtagtttagcttgtttccaggaatacagattaagaaccagtggcagggccctccggcaggcactgtttcaaatagaacgtggcaagtgctcccaatgcaagctcgattgttgcaagcttgtcaaacacattaaactcttacctttgggaaagcgagaagaatacatcagaaaggttgctccaaacattgcaagtagaaagaaactcctagataaacttgtccgtgaaccaattgatggaaatgcttggcatgcagatcacataatacctgtttataaaggaggaggggaatgtaaactcgagaacatgagaacactgtgtgtggcttgtcattatgaggtcaccagaactcagcacaaggaactaaaagaaataagaaagaaggctaaagagcacttgaaaaacgccttgaataaacaaaaggataaaccaagtgaagcaacagaagaactagatgacgaatcgttgctgatagctgtcccgggtagtgcctactccttaggatttcctggcaacggatctgatgaaaaggctgctgaatagggcatgtttcatttaccttgattattgttcaaaaagggcgctggtattttttagctcgcgtcctttttttgtacatgttaaatgctaccaagcgtttgtaagctgttcggctgctcttataagcagcactgataagcaacactattgcagctgcagagctagaattatctcacatttttgggcttgttcgttttgatgctaaaccatgtggattgagttggattg

SEQ ID NO: 141984 - DNA, 331 bp, Zea Mays
ttctcctatacattagttttttgttgttgctattattccttcttctctttcctttcgttgtagccaagtgaagcaacagaagaactagatgacgaatcgttgctgatagctgtcccgggtagtgcctactccttaggatttcctggcaacggatctgatgaaaaggctgctgaatagggcatgtttcatttaccttgattattgttcaaaaagggcgctggtattttttagctcgcgtcctttttttgtacatgttaaatgctaccaagcgtttgtaagctgttcggctgctcttataagcagcactgataagcaacactattgcagctgc

SEQ ID NO: 141985 - DNA, 1302 bp, Zea Mays
gagctttctctcgctcctgagtgcagtctctctctctgcgccctgcgctctgcgccgccgccatggaggacgacgatgactgccctcctctcgccgttgagctccctccgcgggtgccgtcccctccagagcaatctccctcagacgcctcgccagttggcatcaccgtcatcaccggctacctcggggctggcaagtcgacgctagtcaactacattctgaatgagcaacatgggaagagaattgccgtgatactaaatgagtttggagaggaaattggggtcgagagggcgatgatcaatgaggggcaaggtggtgcacttatcgaggaatgggtggagctggccaatggatgtgtctgttgctctgtaaaacacagtctggttcaagcacttgagcagcttgtgcagagaaaggatagaatggatcatatattacttgagacaacagggttggccgatcctgctccacttgtttctgttctttggctagacgatcaattggagtcgtcaattgtgctggattctattattacggttattgatgcaaaaaacttcagggttcagattgacgagcacaaaaactcttcctcattccctgaagcatttcatcaaattgcatttgcggatgttgtgatattgaacaaaattgacctagtggaagacagtcttgaggatctggaaaaacatattcgtgatgtgaatgctctggttacagtggtgcggtccgtccgttgccaggttgacttgaatgaagtatttaaccggcaagcatatggtgccaagaattcatctcatctgcaagaactgctggactatagtaaatcagtgccacctagtcgccgtcatgataacagtatttccaccttgtgcatctatgaacaggattctgttaacttggctaaggtggagtcttggcttgaagatcttctttgggaaaagaaatctattatggacatatatcgctgtaaagggattttatatatccatgattcagaccaagttcatacattacaggcagtgagggaggtctatgaagttgtgccggctcgaaaatggtctgagacagagtctcgcatgaacaagatagttgtcataggccgcaatctggatatcaatgtacttcaagattcttttagtggttgcaagagctgataatgagtatctgtttgccttgcacaatgttagttggccatttttctgtgaggtaaattgcctttatgttggaggttgccattcacactgtccatttccggggcatcaggtgccatcatggatagctttgctgtttgtagcattgagc

SEQ ID NO: 141986 - DNA, 1315 bp, Zea Mays
gagctttctctcgctcctgagtgcagtctctctctctgcgccctgcgctctgcgccgccgccatggaggacgacgatgactgccctcctctcgccgttgagctccctccgcgggtgccgtcccctccagagcaatctccctcagacgcctcgccagttggcatcaccgtcatcaccggctacctcggggctggcaagtcgacgctagtcaactacattctgaatgagcaacatgggaagagaattgccgtgatactaaatgagtttggagaggaaattggggtcgagagggcgatgatcaatgaggggcaaggtggtgcacttatcgaggaatgggtggagctggccaatggatgtgtctgttgctctgtaaaacacagtctggttcaagcacttgagcagcttgtgcagagaaaggatagaatggatcatatattacttgagacaacagggttggccgatcctgctccacttgtttctgttctttggctagacgatcaattggagtcgtcaattgtgctggattctattattacggttattgatgcaaaaaacttcagggttcagattgacgagcacaaaaactcttcctcattccctgaagcatttcatcaaattgcatttgcggatgttgtgatattgaacaaaattgacctagtggaagacagtcttgaggatctggaaaaacatattcgtgatgtgaatgctctggttacagtggtgcggtccgtccgttgccaggttgacttgaatgaagtatttaaccggcaagcatatggtgccaaggtggagtcttggcttgaagatcttctttgggaaaagaaatctattatggacatatatcgctgtaaagggattttatatatccatgattcagaccaagttcatacattacaggcagtgagggaggtctatgaagttgtgccggctcgaaaatggtctgagacagagtctcgcatgaacaagatagttgtcataggccgcaatctggatatcaatgtacttcaagattcttttagtggttgcaagagctgataatgagtatctgtttgccttgcacaatgttagttggccatttttctgtgaggtacctctgtgcaagtgaatactgaattggaggagaatcttaggtagggaatatagataacaggcgctccatatataaacttcgttattaggtgctgtatggactatggttcacatatttgtaacttgaacggtaaccgataatgttaaaacatgtttgtttaagtccaaccgtaatcagataccacactactagaaactgatatcatcctaaatcattattgttgcaa

SEQ ID NO: 141987 - DNA, 1435 bp, Zea Mays
gagctttctctcgctcctgagtgcagtctctctctctgcgccctgcgctctgcgccgccgccatggaggacgacgatgactgccctcctctcgccgttgagctccctccgcgggtgccgtcccctccagagcaatctccctcagacgcctcgccagttggcatcaccgtcatcaccggctacctcggggctggcaagtcgacgctagtcaactacattctgaatgagcaacatgggaagagaattgccgtgatactaaatgagtttggagaggaaattggggtcgagagggcgatgatcaatgaggggcaaggtggtgcacttatcgaggaatgggtggagctggccaatggatgtgtctgttgctctgtaaaacacagtctggttcaagcacttgagcagcttgtgcagagaaaggatagaatggatcatatattacttgagacaacagggttggccgatcctgctccacttgtttctgttctttggctagacgatcaattggagtcgtcaattgtgctggattctattattacggttattgatgcaaaaaacttcagggttcagattgacgagcacaaaaactcttcctcattccctgaagcatttcatcaaattgcatttgcggatgttgtgatattgaacaaaattgacctagtggaagacagtcttgaggatctggaaaaacatattcgtgatgtgaatgctctggttacagtggtgcggtccgtccgttgccaggttgacttgaatgaagtatttaaccggcaagcatatggtgccaagaattcatctcatctgcaagaactgctggactatagtaaatcagtgccacctagtcgccgtcatgataacagtatttccaccttgtgcatctatgaacaggattctgttaacttggctaaggtggagtcttggcttgaagatcttctttgggaaaagaaatctattatggacatatatcgctgtaaagggattttatatatccatgattcagaccaagttcatacattacaggcagtgagggaggtctatgaagttgtgccggctcgaaaatggtctgagacagagtctcgcatgaacaagatagttgtcataggccgcaatctggatatcaatgtacttcaagattcttttagtggttgcaagagctgataatgagtatctgtttgccttgcacaatgttagttggccatttttctgtgaggtacctctgtgcaagtgaatactgaattggaggagaatcttaggtagggaatatagataacaggcgctccatatataaacttcgttattaggtgctgtatggactatggttcacatatttgtaacttgaacggtaaccgataatgttaaaacatgtttgtttaagtccaaccgtaatcagataccacactactagaaactgatatcatcctaaatcattattgttgcaa

SEQ ID NO: 141988 - DNA, 1555 bp, Zea Mays
gtgatcccatcacaccagccgccgtcttctccctcactccgccacgccactaaaaccctaatccctcgccgccatggctgcggcggcggccgccacctcgctcctcatacgccacaaccgcaacccccacctcctcctcctccgcgccgcgatctcctcctcccgcgcactgtcccagcagccggagctgtctcctgacccgaccaccggcgcccccgaccccgccggcgccgccccactccccccaaaccccagcacggggagccccttatacagccagaactggcgcaaccccgccgcagccaacccgccctcttcgcttctgcccaccgtcgccgccggcagctccttcggagcgcagcaccgcatggccgccttctacgataagcccgacgccgcggggctcaaggaaacgtttgccaagtatatggcggagcagcggtgggaggacatgaagcttctgttcgaccactgggtgcgctccctcgacgccgccacggggaagcccaaccaccccgacgtcgacctattcaatcactacctccgcgccaacctcatgacgggtgccgtaccgcacgagatgctcgatctcgccgatcacatgcgcgagttcgagctcgagcccaacagtgcatcgtacaacctcgtgctcaagagcatggtcgccgataaggagtcctacggcgccgagaagctcattgaacggatgctgcaaacaggaacagttccagatgaagaatcctacaatttggttgtaggcctgcttattagacagaaccttgttgactcatctctgaagtatttggatctgatgcttaaatcgggctacacgccatcactaactgttttcactgattatatccaagcatgtgtcagatctgggaggttggacacgttgacatcaattatacagaaatgcaagacagctgataagatcaaagttttgtgtccacaatgggcctggtgcattgacatatcagaagctgcatttgaagctaacaatagcaaattagctctttttgctctggaatttcttgcaagatggattgttcgtggtgagaatgttaaacctcctgttcagctgtcagttaatgaaggtcttgtaatatcagctctgagtgctgctggcagaacttttagtactgacctcttgaatgctgcttggtcgctactacggaagtccctgcgccagaaaagggcacccaccccagagacatatcttgccaagatctatgctcattcatcaattggccagcttcaaagggcttttggtacattgcatgaatttgaaaatgcctatgggaactccaaggacgttgatttagagctcttctcaccatttacgtccttgcatcctcttgttgttgcttgctgcaaagatggctttagcacattggatttggtacattcacatatcacatgttatacatgatccattaagttggtcatttgtacttttattttgcaaaagtactccctatgttccaaattgtaagtcattctgacttttatagatacatagcttttgctatgcacctagatatacaatatgtct

SEQ ID NO: 141989 - DNA, 2296 bp, Zea Mays
gtgatcccatcacaccagccgccgtcttctccctcactccgccacgccactaaaaccctaatccctcgccgccatggctgcggcggcggccgccacctcgctcctcatacgccacaaccgcaacccccacctcctcctcctccgcgccgcgatctcctcctcccgcgcactgtcccagcagccggagctgtctcctgacccgaccaccggcgcccccgaccccgccggcgccgccccactccccccaaaccccagcacggggagccccttatacagccagaactggcgcaaccccgccgcagccaacccgccctcttcgcttctgcccaccgtcgccgccggcagctccttcggagcgcagcaccgcatggccgccttctacgataagcccgacgccgcggggctcaaggaaacgtttgccaagtatatggcggagcagcggtgggaggacatgaagcttctgttcgaccactgggtgcgctccctcgacgccgccacggggaagcccaaccaccccgacgtcgacctattcaatcactacctccgcgccaacctcatgacgggtgccgtaccgcacgagatgctcgatctcgccgatcacatgcgcgagttcgagctcgagcccaacagtgcatcgtacaacctcgtgctcaagagcatggtcgccgataaggagtcctacggcgccgagaagctcattgaacggatgctgcaaacaggaacagttccagatgaagaatcctacaatttggttgtaggcctgcttattagacagaaccttgttgactcatctctgaagtatttggatctgatgcttaaatcgggctacacgccatcactaactgttttcactgattatatccaagcatgtgtcagatctgggaggttggacacgttgacatcaattatacagaaatgcaagacagctgataagatcaaagttttgtgtccacaatgggcctggtgcattgacatatcagaagctgcatttgaagctaacaatagcaaattagctctttttgctctggaatttcttgcaagatggattgttcgtggtgagaatgttaaacctcctgttcagctgtcagttaatgaaggtcttgtaatatcagctctgagtgctgctggcagaacttttagtactgacctcttgaatgctgcttggtcgctactacggaagtccctgcgccagaaaagggcacccaccccagagacatatcttgccaagatctatgctcattcatcaattggccagcttcaaagggcttttggtacattgcatgaatttgaaaatgcctatgggaactccaaggacgttgatttagagctcttctcaccatttacgtccttgcatcctcttgttgttgcttgctgcaaagatggctttagcacattggatttggtgtatgttcagttggagaatctgagtcatgcagatccaccttacaaatctgttgcggctctcaactgtgttatattagggtgtgcaaacatttgggacattaatcgagcttatgaaacttttgtggctattaaggaaaaatttgaactcagtcctgacatccattcatacaatgcccttctgtgtgcatttgggaagttgaaacagacaggagaagcatgtaatgtgttccagcatgtattaactcttggtgttaagccaaatgcaacaacatactcccggcttgtcgatgcccatcttgcaaacaaagatccaaaagctgctcttgccataattgatgagatggttgatgctggcttcactccttccaaggataccctcaggaaggttcgaagacggtgctctcgtgagtcagactttgacagtgacgagaaagtccaatccctggctaagcagttcaactaccgaatgggtggtgagaatcgaagagagatgctttatagcatagaatacaatcctgtgtactgaagcggcagtttctactgagtttgctggtcgttgggagagcacggacattgtagcttgtaaattacttgaacgcaccaggattcttaagcaatattcagtttctcaatcattatttttgctcgcagggttgatgttaggacttgctaataagctgcatactatttgtttgcttgagaatccgaaaatgtcagttctttttcataaattgtagcatctgcgtggccccacttcttacgtgactcctaggtgttttcggctttgtttacacttgtaactaacgaagaagtcctgggatgactgggtcgcagcttcttcaaaagatgctattcttattatggaaatttaatggagactgacaatttaaag

SEQ ID NO: 141990 - DNA, 925 bp, Zea Mays
gcaaaagtactccctatgttccaaattgtgtatgttcagttggagaatctgagtcatgcagatccaccttacaaatctgttgcggctctcaactgtgttatattagggtgtgcaaacatttgggacattaatcgagcttatgaaacttttgtggctattaaggaaaaatttgaactcagtcctgacatccattcatacaatgcccttctgtgtgcatttgggaagttgaaacagacaggagaagcatgtaatgtgttccagcatgtattaactcttggtgttaagccaaatgcaacaacatactcccggcttgtcgatgcccatcttgcaaacaaagatccaaaagctgctcttgccataattgatgagatggttgatgctggcttcactccttccaaggataccctcaggaaggttcgaagacggtgctctcgtgagtcagactttgacagtgacgagaaagtccaatccctggctaagcagttcaactaccgaatgggtggtgagaatcgaagagagatgctttatagcatagaatacaatcctgtgtactgaagcggcagtttctactgagtttgctggtcgttgggagagcacggacattgtagcttgtaaattacttgaacgcaccaggattcttaagcaatattcagtttctcaatcattatttttgctcgcagggttgatgttaggacttgctaataagctgcatactatttgtttgcttgagaatccgaaaatgtcagttctttttcataaattgtagcatctgcgtggccccacttcttacgtgactcctaggtgttttcggctttgtttacacttgtaactaacgaagaagtcctgggatgactgggtcgcagcttcttcaaaagatgctattcttattatggaaatttaatggagactgacaatttaaagtcac

SEQ ID NO: 141991 - DNA, 1725 bp, Zea Mays
agagggaaattagaaatccatcccgatcctatcgtccccaatttcttctgctccacctaaatagatccgtagccgtagcctaggcgcgcacattgcagaaagatcgagcggaaggtcggcagcaggcgcatagatgcaggggtgagggcacgggcggcagcgcttgacgggcgacgagtaaaccctaacgctttgattgcgggcggcgtcgtctgagccagtcccgagtcgatacgctgtcatgcctgtcaatcctcctccgccacctcctgggtcgtcgtctttggctccggcgggggccagctacttcccgctccctttccacctgcagcagcaccagccgccgccgccgcaggtgccgccgcctatggcggcgagcagctatcagcagtatcagcaacagctgcatcaggcccatcagctcttccagcgggacgcgcagaccataacccccgaagcgctgcagagcgtcaaggctgccctcgccaccagcgacgtcctcgaccccgtcgccgccgccaacgccaggctctccgatccctctaccagcaagaagcccatcccccgtcgcgctgccggacaatcctgggaggatcctaccctcactgaatggcccgaaaacgactaccggctgttctgtggagatctaggcaacgaagttaatgatgatgttctctccaaagcattttcacggtttccatccttcaacatggcaagggttgttagagataagaggactggcaaaactaaaggctatggatttgtgagcttttcaaaccctactgatctggctgcagcaataaaagagatgaatggaaagtatgttgggaaccgccctattaaattgcgtaagagtaactggaaggagaggacagatgttgaggctctggaaagacaaaagaatcatgtcaagaggaagcctaaaattcccaagaagactattcttcacaagtagagatacaaaggccctaccgagggtgaatgccagctcatgtgctgccttgggatgatgctaccttctggaatctctttactctctgcaatgctcggggtggaatcacgcaatgctcggggtggaatcacacgcaagggctgttgtttaatgtgtagtttggaaacttaaattcttttgggatacctgtcttttatcaggatgagtaacccagggatataatttaaataagacatttagttatttaggagatggtttctctctctggtttgacttccccttccaaactaggtctaaggccatcttcagcagatcgtgtaaatggacgtgtaaagtactgttttgcattgtatattgtaatatgaagtgagatagagtctactggagataatcgacttgttcgctttaaggtggattgaggaggattggaagggattaaattctcttctattcaaatttgtataggagaggatttaattctctctaatccctctcaatctacctctaaccgaataagccgggcaacgtgctgcctgttggtccccatggtttaggctggggttgtgggcttgtgaacatagagttagtgttaagtgccacccgacgcaatttgtgctctgttttaccctgtagttgtacgttcacgtggtattcatttgagatgttggagcagtgtcatggctactgacttacgaggccttgcattatcagatagtttgcttggttgtgggctctcaacaagaaccaaatggaattttcaatttaggtttctg

SEQ ID NO: 141992 - DNA, 1819 bp, Zea Mays
agagggaaattagaaatccatcccgatcctatcgtccccaatttcttctgctccacctaaatagatccgtagccgtagcctaggcgcgcacattgcagaaagatcgagcggaaggtcggcagcaggcgcatagatgcaggggtgagggcacgggcggcagcgcttgacgggcgacgagtaaaccctaacgctttgattgcgggcggcgtcgtctgagccagtcccgagtcgatacgctgtcatgcctgtcaatcctcctccgccacctcctgggtcgtcgtctttggctccggcgggggccagctacttcccgctccctttccacctgcagcagcaccagccgccgccgccgcaggtgccgccgcctatggcggcgagcagctatcagcagtatcagcaacagctgcatcaggcccatcagctcttccagcgggacgcgcagaccataacccccgaagcgctgcagagcgtcaaggctgccctcgccaccagcgacgtcctcgaccccgtcgccgccgccaacgccaggctctccgatccctctaccagcaagaagcccatcccccgtcgcgctgccggacaatcctgggaggatcctaccctcactgaatggcccgaaagtagcagccaacataacctattaatccagtttcctttgttttatgcttctcccttatttcatttccttgtgtttcaactcttaacaatttgcagacgactaccggctgttctgtggagatctaggcaacgaagttaatgatgatgttctctccaaagcattttcacggtttccatccttcaacatggcaagggttgttagagataagaggactggcaaaactaaaggctatggatttgtgagcttttcaaaccctactgatctggctgcagcaataaaagagatgaatggaaagtatgttgggaaccgccctattaaattgcgtaagagtaactggaaggagaggacagatgttgaggctctggaaagacaaaagaatcatgtcaagaggaagcctaaaattcccaagaagactattcttcacaagtagagatacaaaggccctaccgagggtgaatgccagctcatgtgctgccttgggatgatgctaccttctggaatctctttactctctgcaatgctcggggtggaatcacgcaatgctcggggtggaatcacacgcaagggctgttgtttaatgtgtagtttggaaacttaaattcttttgggatacctgtcttttatcaggatgagtaacccagggatataatttaaataagacatttagttatttaggagatggtttctctctctggtttgacttccccttccaaactaggtctaaggccatcttcagcagatcgtgtaaatggacgtgtaaagtactgttttgcattgtatattgtaatatgaagtgagatagagtctactggagataatcgacttgttcgctttaaggtggattgaggaggattggaagggattaaattctcttctattcaaatttgtataggagaggatttaattctctctaatccctctcaatctacctctaaccgaataagccgggcaacgtgctgcctgttggtccccatggtttaggctggggttgtgggcttgtgaacatagagttagtgttaagtgccacccgacgcaatttgtgctctgttttaccctgtagttgtacgttcacgtggtattcatttgagatgttggagcagtgtcatggctactgacttacgaggccttgcattatcagatagtttgcttggttgtgggctctcaacaagaaccaaatggaattttcaatttaggtttctg

SEQ ID NO: 141993 - DNA, 620 bp, Zea Mays
atggggcccgagggcggcgtcgacgggcccatggtgtcgtacgacaaccagaggtgtgtcgacgcgctggacgcagcgctggagcggcgcggggtggcgctaccccggcccaacgcgacgtgcgacacggtgctctgcttctgcggcatccggctccaccagatcggctcgctccgctgccccgccgcggccaggaacgccacgcccactgccgcggtgaaggccctggagaagagctgccgcaacgcctcctacgccggctgctcgcgatgcgtgcagtccctgcaaaagcaaccatgggaaagggcaatcccgccaggtaaccaccggataggaccattccttgaaagcttgaacacgcatttgtggggacaaacctccttctttcgagcaagggcaaaggcggggtattcgccttcggcattgccccctcctttggctctgggaagctgatcatggagggctccctgggcttcttcgaaagaagagaagctgacagcgtccagatgcagaacgtgctgtccatccggaatcctaaacctcctgatagagaagcctgcagtagtgtcagtcccggtgctgcgacagctacttgtggctcaaggagaagacgatctttt

SEQ ID NO: 141994 - DNA, 661 bp, Zea Mays
gataaccgagtctcggactgtacgtccgctcatggtttcgcctccggctccgggtagtggccctccggcttcggtggcagctcagctttcggtagaggcggcagctcgtggtttggcacctccggaacctctgggtgcggcagctttggcacggtcgggtgaggagggagttcaggctttggcagctctggcgcgacttggtgaggcacctcaggctttggaagctctgggacggccgggtgaggaggcagttcgggcttgggcagctccggcactgggtgcggcacctcaggtttcgggagctccgggacggctgtcggctgcggtggcacctcgggcttgggcagctccggcactgggtgcggcacctcagacttcggcagctcgggcacggccgccgggtgcggtgtcagctcgggcttgggcagctccggcactgggtacggcacctcaggcggcacgacgtcggtagggtgcggcggcagctcaggttctggcagctccggcacggcaggatgtgggtgctcctccttgggcggcgcctcttccagcaaccgcgccgcgctgctcatgccgctgcagctgagcagcagcgccaccaggaggagaagtgaaaacacggtgctcctggaactcgaagccatgattggttggatggttt

SEQ ID NO: 141995 - DNA, 1175 bp, Zea Mays
agattttttgagtatgtttggcaaatggatttgtatccaaatatttcaatcgcttattggatattatttactgtgcttgtgatcgtggcatcggcttagagaagctttttaaagttaaaattgttgaagaactactaaggtcaacaatgtctcaagatcgcttcaacggattggctacattatacattgagaaaaaattattagaccaggttgatagcaacattattatcaattacttcgcatcaagaaacattaaaagaaatttttaaaataatatgtacaaagatttgaagttgttttgatatattatagttttttatcattcaaaaatttgcttttgtacttagaagaaagtatatatattatagacttttatcagtcaaaattttttgaggatcctaattttttgtttcgctccgggtccatgaaacctgaaccggccctgttcgtacatcacgtcatcaccaaaggacaaactaatgggcccgaataattacaccatcatacacagaagtacagaacgtgcttattactggggcagcggcgacgaatcgacgatgcatccagtccgatatgggctcatggcttagtctctggcactgggtagtggttctcggccggcttcggtgggagctcatgctttggcacctccggaacttccgggtagggcagctctggcaccgtggggtgaggaggcagctcaggcttcggtagctccggcacggcagggtgcgccggcacgtcgggctttggcagctctggaacggcggggtgctctacctcaggcatgggcagttcaggcacggcatctgggtgaggaggaggcagctccggcttggggaactccggcaagtgctcaggtacctgagggctgaggcttgggcagctccggcaccgtggggtgcggcggcagctcgggcttgggcagctccagcgtggcagggtgcgggtactcctccttgggcgccacctcctccagcagccgcgccgctccgctaatgctgctgcacgagagcagcagcgccatgaggaggacaagggaaagcatcatggatttatggtgctcttgggctcttggcagagcaatggatgacacctgttgtagtgttgtttgcctgtgcgcctcgtgtgatcgtgtcgagtctcagtagatcgagctagatcgttgtgtgatg

SEQ ID NO: 141996 - DNA, 1555 bp, Zea Mays
ttttcccgctcagtctaagagagaggtcgtaaccgtcgccgatgcaagcagcaaaatactcacccgagcagaaagaaagaagcacgcgcatctctcacccgcgagcagaaggaagcacgcactctcccacacttgccagcccgctgcactgcactgcacacacgccctctcactcgctccccgctctagcctcgtcccaactcccagtcccgcatcgtctccgaaatctcttcatctaccggcggcgcaagcccgaccgcgctgcctctctctctctctctctccctcttcccactctccgtgcggagttctcttctctcgcgtgctcgcatatagtcgcatcgttagggcgcgtcctgggagagggaggccttcgctacctccgtggcagcgacagacgaccatgaaggcgctgctggtgacggtgcttctcctcctctcttccaccctcgccgcgtcacgtgaggagccttctctctctctctctctctttctctgtctctctctcttcctaacctttcttcccttcgtcctcgtcccccacgctctgctcttgtggaattttctattagcgtctgccgccatttgtttcggctactttgtgcgcgcgcaagcgcaaaccacgggggtctctctcgtgttcgccattctgccgaatcgccactgcaagctcttctaccgctttctgtgtgctctgacatctggactccggagtccggacgtccgcggctctgtttgctgcgcttgttttcttttttccagctatgcttcgtttcttctcgaattccatttttttatctctcttttttccctcgtggacgaagcaaagcaagcaagacgaccttgcatctgagactctgagactgtactgtttcttttgccattgggtttttccctaagattcctttttggctgccaatgttcagtccgacagcagcacccgctgcaaccatttcagcacttcttccgcctctgtttccataatatttcttcttttttttttccatctctttttttttgtgtgtgctatagcttttgcttgactgaaacgcagcacacaccttacacaaccaaacatttttttttggcgcagagtggtgcgtgtgcaggcaggacgcgtctcaggccgcgctgcagaagacgatcgactacgcgtgcgggtcgggggcggactgcaactccatccacgagacgggggcgtgctacaaccccaacaccgtcgcggcgcactgctcctgggcggccaacagctactaccagaacaacaaggccaagggcgccacctgcgacttcaccggcaccgccgccctcaccaccagcgacccaagtaaacgcgccccctccacacccctccttgcctagagagcattacgttatctacacgctggctgggttagaattgccaagagaagatgaagagtagagaggtttagggcttgtaggtaatggagaggattgatgggactagaatctctcactattcaattttcaattttaaatagcgagagattttagcctaaaggtctgccattgccattgccaattgctaaagttt

SEQ ID NO: 141997 - DNA, 1311 bp, Zea Mays
ttttcccgctcagtctaagagagaggtcgtaaccgtcgccgatgcaagcagcaaaatactcacccgagcagaaagaaagaagcacgcgcatctctcacccgcgagcagaaggaagcacgcactctcccacacttgccagcccgctgcactgcactgcacacacgccctctcactcgctccccgctctagcctcgtcccaactcccagtcccgcatcgtctccgaaatctcttcatctaccggcggcgcaagcccgaccgcgctgcctctctctctctctctctccctcttcccactctccgtgcggagttctcttctctcgcgtgctcgcatatagtcgcatcgttagggcgcgtcctgggagagggaggccttcgctacctccgtggcagcgacagacgaccatgaaggcgctgctggtgacggtgcttctcctcctctcttccaccctcgccgcgtcacagtggtgcgtgtgcaggcaggacgcgtctcaggccgcgctgcagaagacgatcgactacgcgtgcgggtcgggggcggactgcaactccatccacgagacgggggcgtgctacaaccccaacaccgtcgcggcgcactgctcctgggcggccaacagctactaccagaacaacaaggccaagggcgccacctgcgacttcaccggcaccgccgccctcaccaccagcgacccaagttcttcaggctgctcttaccctaccggtgcaaggcaccatgggaggaggaaccgcagggacctccacaggcacaggcacaggcacagccggcgctggcatggggacaggcactgccgccggaactgcgggtaccgggttcggcggcctaggaccaggcacggacgctagcatggacaccgcggcggcggcgggcttgctccttcccccaagagctggtgggctggccgccgccctcgccgcgcttctcctctccgccatggtgctcgcgtgacgcttttagtatggcctcggaaacatggcctgcctgttgctagtagaaagctagcactgcccttttggtaagggcgtttcaggagcactgtgctggactatatagagagatgctcctctgtgactgtgaccacctcacgttctgcgtactctgtaatctggtaggatgcctgtctctatcatgattcatgaaggacgattggtctgtcttttttttatcgtgctatttattaatcgtgtaaatgtactagcgaagggaaggcactggtagctaggttagctcgagtccggatggaatgataatgctactaatacaaacaatgccgtagtgtgtgtgtgtattt

SEQ ID NO: 141998 - DNA, 1975 bp, Zea Mays
ttttcccgctcagtctaagagagaggtcgtaaccgtcgccgatgcaagcagcaaaatactcacccgagcagaaagaaagaagcacgcgcatctctcacccgcgagcagaaggaagcacgcactctcccacacttgccagcccgctgcactgcactgcacacacgccctctcactcgctccccgctctagcctcgtcccaactcccagtcccgcatcgtctccgaaatctcttcatctaccggcggcgcaagcccgaccgcgctgcctctctctctctctctctccctcttcccactctccgtgcggagttctcttctctcgcgtgctcgcatatagtcgcatcgttagggcgcgtcctgggagagggaggccttcgctacctccgtggcagcgacagacgaccatgaaggcgctgctggtgacggtgcttctcctcctctcttccaccctcgccgcgtcacagtggtgcgtgtgcaggcaggacgcgtctcaggccgcgctgcagaagacgatcgactacgcgtgcgggtcgggggcggactgcaactccatccacgagacgggggcgtgctacaaccccaacaccgtcgcggcgcactgctcctgggcggccaacagctactaccagaacaacaaggccaagggcgccacctgcgacttcaccggcaccgccgccctcaccaccagcgacccaagtaaacgcgccccctccacacccctccttgcctagagagcattacgttatctacacgctggctgggttagaattgccaagagaagatgaagagtagagaggtttagggcttgtaggtaatggagaggattgatgggactagaatctctcactattcaattttcaattttaaatagcgagagattttagcctaaaggtctgccattgccattgccaattgctaaagtttttttttgtgtgtgtgcttggggcacctgaactcggcttttgacatggaacaatgcggatctgatcatttttggcacatttcattttgctatcagttaccataagggcaccagcttaaaaaaccctaagttaaagctatctaggtgtactgctggtcaagcaagctttagggaatcgagttctgtacaggcacactgcattaaggctagtggtgtggcctcgcctaaaactagtaaaacacattagaaaaaggaacattttgattccggtgtcttgtatatggtgtctgtgttcatttccttccacgttcttctgtgctggtgtgacactgtccgtttcatcactccatcagtgtcctacctgtatcttacatggtctttgtgctactataaactttcaggttcttcaggctgctcttaccctaccggtgcaagcgccgttggaaccatgaccccgaccactgcaggcaccatgggaggaggaaccgcagggacctccacaggcacaggcacaggcacagccggcgctggcatggggacaggcactgccgccggaactgcgggtaccgggttcggcggcctaggaccaggcacggacgctagcatggacaccgcggcggcggcgggcttgctccttcccccaagagctggtgggctggccgccgccctcgccgcgcttctcctctccgccatggtgctcgcgtgacgcttttagtatggcctcggaaacatggcctgcctgttgctagtagaaagctagcactgcccttttggtaagggcgtttcaggagcactgtgctggactatatagagagatgctcctctgtgactgtgaccacctcacgttctgcgtactctgtaatctggtaggatgcctgtctctatcatgattcatgaaggacgattggtctgtcttttttttatcgtgctatttattaatcgtgtaaatgtactagcgaagggaaggcactggtagctaggttagctcgagtccggatggaatgataatgctactaatacaaacaatgccgtagtgtgtgtgtgtatttatcaa

SEQ ID NO: 141999 - DNA, 879 bp, Zea Mays
gtacgactgtggggccgagtactcctccttagcttgcatttcaaacttcaaaccggaccaaacgccctgctccaacccaaaaccatcatcccttttttcgcagcagacgcatttattaagcgcgcctccgccaaccgcactctgcccgccgaaagcgtcgtcgggccacctcgcactcgcgcgcgcctcaaagatgcacaggcagctcagcctctccgccagcccgaagcagcagcagccgcctcctgacggcaccagcaccggcggcggcgacgcggcgaaggcgatggcggcggcggaggacgagtcgtcggcctcgcactccagctccaaggccagcagggggtggtcggcgagggacgagagggccatccacctcgtcccgctgctcaccttcctctgcttcctcctgctcttcctctgctcccacgacccgtcccccgccgatatgtcgagcttcgctggaggcggcggcggaggaggaggagcgagatctgggaaccggaggttaaggatgctttagtgtgcgtattacctacccattggagtattattatccgcgatgcggatgttgtacttgtccagcagtaaccaagtatgggaccaaagtatgtcaccatacaaaacactcttgctgtggtaatactaccaacctacatcagcatgttcctgattaccatttgagctggattcgaaatacctggcacgtccaacaggcagcagtacatggcaatggcattccaaaattcagaaacaaagcgttccggctgatcttcaaaattcagaaacaaaatgttacaatcatgtaaagtttataacttactaaattaaagatattaaacaatattagcattatttgactacataaagtttaaatat

SEQ ID NO: 142000 - DNA, 3513 bp, Zea Mays
ctccctttcctctctacaccgacgagaccctaacaaggcccccgccgccgccgccgcctccgcacatggccgctcgaaccttgctgctcgtgctgctcttgcttctgctcggtgacgccacctcggcttccgtcagcggccagcgcgaagcgttgatgaagttcaaagcggccgtgacggccgacccgggcggcctgctgcgcggctggtccccggcgtccggggaccactgccgctggccgggcgtgtcgtgcggcgcttccggggaggtggtcgcgctcaacgtcacctcctcgcccgggcgcgcgctcgcgggcgcgctgtctccggccgtcgcggcgctgcgggagctccgcgtgctcgctctcccgtcccacgcgctctcgggcccgctcccgcccgcgatctggacgctgcgccgcctccgcgtcctcgacctctccggcaatcgcctccagggcgggatccccgcagtgctcgtttgcgtctccctccagacgctggaccttgcctacaaccagctcaacggctccgtgcccgcggccctcggtgcgctccctgtgctacggcggctgtcacttgcctgcaaccgcttcggtggcgccatccctgacgagctcggtggcgccggttgccgcaacctgcagttcctcgatgtctctgggaacatgctcgtcggtggcataccccggagcctggggaattgtactgagctgcaggcgctgttattgtcctcgaacaatctggatgacatcatcccgccggagattggtcggctcaagaacctgcgtgcattagatgtgtccaggaacagtttgagtgggcctgtgccagcggagcttggtggttgcattcagctgtcagtgcttgttctgtccaatccttatgcacccactgctggttctgattcttctgattatggtgagctcgatgacttcaactacttccaaggagggattccggatactatcgctacactgccaaagctgaggatgttgtgggcgccaagagccacattggagggagagttgccgggtaattggagttcttgccagagcttggagatgataaatttgggggagaatctgttctctggtgggattcctaaggggctggtggaatgtgagaatttgaagttcctgaatttgagcatgaacaagtttacaggttcagttgattcttcgctgccagtaccttgcatggacgtgtttgatgtcagtggaaatcagctgtctggctcgttgccagtatttatgtcaaaaaagaattgtctttcatcccaggccccacgggatgacttggtgtcggagtattcttccttcttcacatatcaagcgcttgctggctttatgtcatccccatcacccttggatgcacatttgacaagctatcatagtttttccaggaacaattttactggtccagttacatccttacctcttgctactgaaaagttggggatgcaggggtcctatgcattcttggctgatgggaatcatcttggtggtcagcttcaacctagtctatttgacaagtgcaacagctcaaggggcctcgtcgtggaaatcagtaacaacttgataagtggagctattcccacagacattggctcgctttgcagttctcttcttgttcttggtgttgctggtaatcagctttcaggtatgataccatcaagtatcggggagttaagttaccttatcagcttggatttgagtaggaatcgccttggtggtgtaattcctacttctgtgaagaacttgctgcatttacagcgcctctctttggctcagaaccttctgaatggcacaattccacctgatattaatcagttgcatgctctcaaggttttggacctgtcatcaaacctcctcatggggatgatccctgatgcccttgctgacttgagaaatctcactgctctcctccttgataacaataaacttactgggaagattccttcaggatttgctaactcggcatcccttaccacgtttaatgtgtcattcaacaatttgtctggtccagtgccaacgaatggtaatacggttagatgtgacagtgttattgggaatcctttgctgcaatcttgtcatgtgtacactctggctgtgccatcagctgctcagcagggtcgaggtttgaattcgaatgacagcaatgatacaacaccttcaaactcacaaaacgaaggagcgaacaattcatttaatgcaattgaaattgcttcaataacttctgcaacagccatcgtttccatcctccttgcactgattgcactcttcatatacacaaggaagtgcgcgccccggatgtcagctcggtcttctggaaggagagaagttacactcttccaagatattggtgtcccaatcacttatgagactgttgttcgagccactggaagtttcaatgcaagcaattgcatcggaagtggaggctttggagccacttacaaggctgaaattgcacctggagtgttggtagctattaagagactctctgtcgggagatttcagggagcccaacagtttgacgctgagataaaaactctagggagattaagacatccaaatcttgttaccttggtaggttaccatctaggcgagtctgaaatgtttctcatatataactacttgtctggaggaaaccttgagaggtttatacaggagagatcgaagagaccggtagactggaaaatgctgcacaagattgcattggacgttgccaaagcacttgcttatctgcatgatacctgtgttcctcgcatccttcaccgggacgtgaagccgagcaatattttgttggacaccaactatactgcttacctctcggactttggactggcgagactcttgggaaattcagaaacacatgcaaccactggtgtagctggaacatttggatatgttgctccagaatatgctatgacttgtcgtgtttcagataaagctgatgtgtatagctatggtgttgtcctgatggagctaatctcagacaagaaggctttggacccgtccttttccccatatggtaatgggttcaacatagttgcttgggcttgcatgctgcttcgtcaaggccgtgctcgggaattctttattgatggtctgtgggatgttggcccgcatgatgacttggtagaaacattgcatttagcagtgatatgcactgctgattcactctctatacggccaactatgaagcaggtcgttcagagattaaagcagctacagcctccaattcgtgaacatcgatagagatgaataggtttacaatttccacatgtagaaggtaaagatagctgtgacctgtgctcttgatgatttttttttcctaatcatctgtttgactaggttttatcttgtagatggcagctttgtgtaatatagttttctcctgaatctctcactagtcactaatgtatctgctgataagaagtgcaggtgtaaattaacagtttaatgccaaagatttcagttaagattggctgacggtattgttctcttatgt

SEQ ID NO: 142001 - DNA, 1531 bp, Zea Mays
actccgcccgtgccctgcctgcctgcctgccatttctgccgccgccccctcctcgtcgagctccctccctgctcccctcctgaatcgcggcagcagcagtcaaggcaaggatttcctggctgcctgctccgaaggcccgcccgaacctacccggctcggccccgatgggttcgctggtgtcctgcctctccgacccctgccagtcggggaacgggtccccgccgccgcaggcgaggcggcgctcctccacctcctcccgcggccgtggcggcggcggcggcgggagggactccgccaaggcgtccgtgaccatagacgaggaggcgctggccgcggcggcggcgctcgtgctggggcagcggggcggtggcgcgttcgagcggtccgcgtcggtgcggtacgcggccaagcggcacggccagggcccgccgctgccccgcagctgcagcacgcgccccaggtcgctcgctgaccccgagctccagccgcagcagctcctcgccaaggatttgaacaccaaggatttggaaaccagcgtcattgttctcgtccatggaggcggattcggcgcctggtgttggtacaagactatatcgcttcttgaagacagtgggttcagagttaacgccatcgacttgacaggctccgggatccattcttatgacacgaacaagatttgcagtctttcagagtacgctgaaccgcttacgtcttaccttgaaggcttaggtgatgctgaaaaggtaatcttggtggctcatgatcttggtggtgcctgcgtatcctacgcaatggagatgttcccaaccaaagttgccaaggccgtttttctctgtgcagcgatgctgacgaacggaaacagtgcccttgacatgttccagcagcagatggacacaaacggcacgctccaaaaggcgcaggcattcgtctactccaacggcaaggaccggcccccgaccgccatcaacgtcgacagggcattgcttagagacttgttgttcaaccagagcccttccaaggacgtgtcgctggcctcggtgtccatgaggcccatccccttcgcccctgtgctggagaagctcgtgctcaccgccgagaactacggctcggtgcggcggttctacgtggagaccacggaggacaacgcgatccctctgcccctccagcagagcatgtgtggcgccaacccaccggagaaggtgctgcggctgaagggggccgaccacgcacccttcttctccaagccgcaggcgctgcacaagaccctcgtcgagatcgccgccatgccgccggtcggggcttcgtgagaacgtgtttgtttagcttccttcaggttttgctggacggtgagcttgcgtgcgtgactgttgtacaggctgaggatggtatggtctgtggcggtgtggcaacaagtaggggctctagaatctcagcgtcgtctccacgaaggcatccttattccttccattatacttaggctatccgcaaccgttacccctaaatttttccccctatatcactttttccccct

SEQ ID NO: 142002 - DNA, 2000 bp, Zea Mays
gattgataatataatgcagttattaggactgccaaatacctacctgcgatttaaactgcaaacagtaaattatttggcgtgcagttgccagatcagcagccattttcaccgcactcccccgtcccttttaaaagatccctccctctcaacattccacacacaccagctccactgcatcaaaacccctcatcaccctgcagcctgcactcatcagacatggtgctcaccatggccagcgcccaagaggactcgctcctcctgctcctcctgccgaccacctccccactgccgaccctcatggctgtgttcatcctagccgccgtcctcctgtggctctcccctggcggtcctgcgtgggcgctctcccgctgccgccgcccgccgcccgggccaacgggcgtggtcaccgcgctctccagccccgtggcgcaccgcaccctggcggcgctgtcccacgccgtagacggcggcaaggcactgatggccttctcggtcgggctgacccgtctcgtcgtgtcgagccagcccgatacggcgcgcgagatcctcgccagccccgcgttcggcgaccgccccatcaaggacgcggcgcgccacctgctcttccaccacgccatgggcttcgcgccctccggagacgcgcactggcgcgggctccgccgcctcgccgccaaccacctgttcggcccgcgccgcgtggcgggtgccgcgcaccaccgcgcctccatcggcgaggccatggtcgccgacgtcgccgctgccatggcgcgccacggcgaggtccctctcaagcgcgtgctgcatgtcgcgtctctcaaccacgtcatggccaccgtgtttggcaagcgctacgacatgggcagccgagagggcgccgttctggacgagatggtggccgagggctacgacctcctgggcacgttcaactgggctgaccacctgccattgctcaagcatctcgacccccagggcgtgcgccgccggtgcaataggctggtccaaaaggtcgaatcgttcgttggcaagatcatcatggagcacaggacgaggcgcgcaaatggaggagtcgtgggcgatgagtgcatgggtgacttcgtcgacgtccttcttggcctcgagggagaggagaagctgtcagatgaggacatgatcgctgttctttgggagatgatcttcagaggcgccgacaccgtggcgatcttgatggagtgggtcatggcgaggatggcgctgcacccggacatccaggcgaaggcccaggcggagctggacggcgtcgtgggcatcgggcgcggcgtggcggacgccgacgtcgccagcctaccctacatccagtgcatcgtgaaggagacgctgcgcatgcacccgccaggcccgctcctgtcgtgggcgcgcctcgccgtccacgacgcgcacgtcggaggccacctggtccccgccggcaccacagccatggtcaacatgtggtccatcgcgcacgaccccgccatctgggccgagccggagaagttccgccccgagcggttccaggaggaggacgtgagcgtcctcgggagcgacctccgcctggcccccttcggcgccgggcgccgcgcctgccccggcaagatactggccctcgccaccacccacctctgggtcgcccagcttctgcacaagttcgagtgggccgccggcgggggcgtcgacctgtcggagcgcctgagcatgtcgctggagatggccacgccgctggtgtgcaaggccgtacccagggttcagggccaagcggcctcctagcctagcctccatgcatgcctgatgcctggatgccgtagcgagagtgggagactgatgagtgtatgccgttatgtttgtgtgtccatgcatgcatgcatgcctcggctactgtagcttctggcttgcttgttgtgcatgtcctgcgtcgagaccttgcgtagtatgatgcagtataattttaataataatattattattaaaggttaaagttttgataatac

SEQ ID NO: 142003 - DNA, 1316 bp, Zea Mays
ataaaccaggggaaacgcgcagcgcacacaacacaatccgcgggccgcggcaggaagtgcagaggagaattcacagatcaaactcgtatgcaagtgcagatcaaaactcaaggagaatattggtgaagcaataacttgatattgggttctagaccaaagaagcaatggaaaaggaatcatctgccacatacgagccaaaaaggaacagtgaaataagggtttttgagagttcagatgagatttcaacggatcttgctgagtatatctcacaagtttcagaaatttctgtcaaagaaaggggatactttgccatcgccttatctggaggtcccctagtcagttttttggggaaactttgtgaagctccatacaacaagacactggattggtccaaatggtacatcttctggtctgatgaacgtgctgtggcaaaaaaccatgcagagagtaactataggttaacaaaagaaggattcctcgccaaggtaccgattctgaatggccatgtctactccataaatgacaatgccacagtggaggatgcagcaacagactatgaattcatgatcaggcagctggttaaggtccgcacaataggagtctcagagagaaacgactgtcccaagttcgatctcatccttctcaccatgggctccgatgggcatgtggcctcgcttttcccgaaccaccctgccatggagctgaaagacgactgggtcacctacatcaccgactctccgcagcctcctcctgagaggatcaccttcactctcccagtgatcaactcagcatccaacatagcaatagtgtccactggtgatgacaaagcaaaggctgttcacatagcagtttctgacatggccgaaggtcttgatgctcctacatcactgcctgctagaatggtccagccaacggacgggaagctggtatggtttctggacaaggcggcggcatcattccttgactccaagaacgacgacgacgacgcttgctacgatcgtcacgagtgactaactctgaggatcgttggtcgttttgaagcgaatgaacggaggtgtgtgtaagtaggtggtggcgtatgatggaagacgcgctgttccccttttagctcgatgcatgggttaattttgttctgagggtttttagctccggaaatctgaaattgcccttggtccttttgcagtgaggtgatttaaaagcgatgaaatgtgtatgcgatgttgagtcgtcaaagaacaccggaatttaactgtggtcgtataatattatgtgctacattctatgctatggcagttagttttttttgttttgtatta

SEQ ID NO: 142004 - DNA, 1357 bp, Zea Mays
ataaaccaggggaaacgcgcagcgcacacaacacaatccgcgggccgcggcaggaagtgcagaggagaattcacagatcaaactcgtatgcaagtgcagatcaaaactcaaggagaatattggtgaagcaataacttgatattgggttctagaccaaagaagcaatggaaaaggaatcatctgccacatacgagccaaaaaggaacagtgaaataagggtttttgagagttcagatgagatttcaacggatcttgctgagtatatctcacaagtttcagaaatttctgtcaaagaaaggggatactttgccatcgccttatctggaggtcccctagtcagttttttggggaaactttgtgaagctccatacaacaagacactggattggtccaaatggtacatcttctggtctgatgaacgtgctgtggcaaaaaaccatgcagagagtaactataggttaacaaaagaaggattcctcgccaagtaaaaaggttgatgccgattgcaagtagagcacatgttgaggtaccgattctgaatggccatgtctactccataaatgacaatgccacagtggaggatgcagcaacagactatgaattcatgatcaggcagctggttaaggtccgcacaataggagtctcagagagaaacgactgtcccaagttcgatctcatccttctcaccatgggctccgatgggcatgtggcctcgcttttcccgaaccaccctgccatggagctgaaagacgactgggtcacctacatcaccgactctccgcagcctcctcctgagaggatcaccttcactctcccagtgatcaactcagcatccaacatagcaatagtgtccactggtgatgacaaagcaaaggctgttcacatagcagtttctgacatggccgaaggtcttgatgctcctacatcactgcctgctagaatggtccagccaacggacgggaagctggtatggtttctggacaaggcggcggcatcattccttgactccaagaacgacgacgacgacgcttgctacgatcgtcacgagtgactaactctgaggatcgttggtcgttttgaagcgaatgaacggaggtgtgtgtaagtaggtggtggcgtatgatggaagacgcgctgttccccttttagctcgatgcatgggttaattttgttctgagggtttttagctccggaaatctgaaattgcccttggtccttttgcagtgaggtgatttaaaagcgatgaaatgtgtatgcgatgttgagtcgtcaaagaacaccggaatttaactgtggtcgtataatattatgtgctacattctatgctatggcagttagttttttttgttttgtatta

SEQ ID NO: 142005 - DNA, 1612 bp, Zea Mays
agcgcacacaacacaatccgcgggccgcggcaggaagtgcagaggagaattcacagatcaaactcgtatgcaagtgcagatcaaaactcaaggtgtcgccttcttcttctccctctcgctgcgctgatgtcgacgcccccctcgtcacgatttcttttttcgggtgtttttttaatattagtcgccagcagtactgtacgcaacaggttgagtacaaagatcgtaggcagtatatgcgcgtgagcgcgcgcgcgcttgcgcttccttccttgcttcccctgccctcttctttttattccccgtctcctttgttcgcttgcgggctgcggcaagggggagggagaggacgtgacgaggggaggggaggggaggagggagggcaggcgggccgacgaatgcacagtcccggagaatattggtgaagcaataacttgatattgggttctagaccaaagaagcaatggaaaaggaatcatctgccacatacgagccaaaaaggaacagtgaaataagggtttttgagagttcagatgagatttcaacggatcttgctgagtatatctcacaagtttcagaaatttctgtcaaagaaaggggatactttgccatcgccttatctggaggtcccctagtcagttttttggggaaactttgtgaagctccatacaacaagacactggattggtccaaatggtacatcttctggtctgatgaacgtgctgtggcaaaaaaccatgcagagagtaactataggttaacaaaagaaggattcctcgccaaggtaccgattctgaatggccatgtctactccataaatgacaatgccacagtggaggatgcagcaacagactatgaattcatgatcaggcagctggttaaggtccgcacaataggagtctcagagagaaacgactgtcccaagttcgatctcatccttctcaccatgggctccgatgggcatgtggcctcgcttttcccgaaccaccctgccatggagctgaaagacgactgggtcacctacatcaccgactctccgcagcctcctcctgagaggatcaccttcactctcccagtgatcaactcagcatccaacatagcaatagtgtccactggtgatgacaaagcaaaggctgttcacatagcagtttctgacatggccgaaggtcttgatgctcctacatcactgcctgctagaatggtccagccaacggacgggaagctggtatggtttctggacaaggcggcggcatcattccttgactccaagaacgacgacgacgacgcttgctacgatcgtcacgagtgactaactctgaggatcgttggtcgttttgaagcgaatgaacggaggtgtgtgtaagtaggtggtggcgtatgatggaagacgcgctgttccccttttagctcgatgcatgggttaattttgttctgagggtttttagctccggaaatctgaaattgcccttggtccttttgcagtgaggtgatttaaaagcgatgaaatgtgtatgcgatgttgagtcgtcaaagaacaccggaatttaactgtggtcgtataatattatgtgctacattctatgctatggcagttagttttttttgttttgtatta

SEQ ID NO: 142006 - DNA, 1579 bp, Zea Mays
gttctggtccagaattcttcaactttctttatccctttagcacaaaaggaaagagagatgattttcttttattttcatttctatgttctttgagttgatgttacggcctgtgcaattcccgtgtgtaatgctacgagttttgttccttcttcaccagtttatagcttcagttttaatgacgcttaaacttggtgaagatcattgtcatgcttcccgtgtgcagccttttcatatgaggtcatccgcagctgaacgtttaatgggtcgtttttgctgagatgctcatgatatgatttttgtgatagtcagttggacgcccaatcatggttaggattggatttcgaggcttatctattaatgatctgtagtcagccagagaatattggtgaagcaataacttgatattgggttctagaccaaagaagcaatggaaaaggaatcatctgccacatacgagccaaaaaggaacagtgaaataagggtttttgagagttcagatgagatttcaacggatcttgctgagtatatctcacaagtttcagaaatttctgtcaaagaaaggggatactttgccatcgccttatctggaggtcccctagtcagttttttggggaaactttgtgaagctccatacaacaagacactggattggtccaaatggtacatcttctggtctgatgaacgtgctgtggcaaaaaaccatgcagagagtaactataggttaacaaaagaaggattcctcgccaaggtaccgattctgaatggccatgtctactccataaatgacaatgccacagtggaggatgcagcaacagactatgaattcatgatcaggcagctggttaaggtccgcacaataggagtctcagagagaaacgactgtcccaagttcgatctcatccttctcaccatgggctccgatgggcatgtggcctcgcttttcccgaaccaccctgccatggagctgaaagacgactgggtcacctacatcaccgactctccgcagcctcctcctgagaggatcaccttcactctcccagtgatcaactcagcatccaacatagcaatagtgtccactggtgatgacaaagcaaaggctgttcacatagcagtttctgacatggccgaaggtcttgatgctcctacatcactgcctgctagaatggtccagccaacggacgggaagctggtatggtttctggacaaggcggcggcatcattccttgactccaagaacgacgacgacgacgcttgctacgatcgtcacgagtgactaactctgaggatcgttggtcgttttgaagcgaatgaacggaggtgtgtgtaagtaggtggtggcgtatgatggaagacgcgctgttccccttttagctcgatgcatgggttaattttgttctgagggtttttagctccggaaatctgaaattgcccttggtccttttgcagtgaggtgatttaaaagcgatgaaatgtgtatgcgatgttgagtcgtcaaagaacaccggaatttaactgtggtcgtataatattatgtgctacattctatgctatggcagttagttttttttgttttgtatta

SEQ ID NO: 142007 - DNA, 1839 bp, Zea Mays
gtgggcaggaacactgaccgggggcctctgcccacggccgagcaagaggagggtttgtcccttctaattcttgcctactttatttctcatccattgattacataaataggccagttggccacccttatctagctagagatccttatcttcttaaaactctcctaaaaactctcaacaaactaactgttaaccttcctagataatctcaactaatctcctaaataatctcaactaatcttctaatcttatctctaactatccttatctaatctcccttggagggcccatggctgttgctaccgcagcccctccatgggcctccttaggccctgacagatattttcaaacttcagaatgctatatcctgtgccagcttgggggtggggcctgattaaggctgtctaactaccactttaatagttccatgttccagctactttggaagcaccctgcaccaaccactcattttcattgctatccatcattaccccgtataagactaaaaagttattgaaatggttaattcaacagaataactggctctgaactggtgtcctcgcgctagttcgattggatgttaaggtttttaggttccatttctgtagactacaatatttcttagtccaaggagcttaacaaaaaacagtgaaccatttgttttttgatctctcgctatttggcatatccttaatatttttcccttcgtgggcccattttaatatctatagggaccaaactgttttggttgtctaaaagcctcaataaaaccgcagcattccctcttctgctagtgttactgttgcatgagatttagccaagtgtgtcattcatgttctctggagtatttcgactatatgtctgcttcatactattccctttcttgccatctcggttacagtgattcccatctttatctcatcaaggaacaaacaattgaactaagatgtatcagtattgttgcaatgtttttgccaagttaactacctgatgtttgaatgtcctttacaggtaccgattctgaatggccatgtctactccataaatgacaatgccacagtggaggatgcagcaacagactatgaattcatgatcaggcagctggttaaggtccgcacaataggagtctcagagagaaacgactgtcccaagttcgatctcatccttctcaccatgggctccgatgggcatgtggcctcgcttttcccgaaccaccctgccatggagctgaaagacgactgggtcacctacatcaccgactctccgcagcctcctcctgagaggatcaccttcactctcccagtgatcaactcagcatccaacatagcaatagtgtccactggtgatgacaaagcaaaggctgttcacatagcagtttctgacatggccgaaggtcttgatgctcctacatcactgcctgctagaatggtccagccaacggacgggaagctggtatggtttctggacaaggcggcggcatcattccttgactccaagaacgacgacgacgacgcttgctacgatcgtcacgagtgactaactctgaggatcgttggtcgttttgaagcgaatgaacggaggtgtgtgtaagtaggtggtggcgtatgatggaagacgcgctgttccccttttagctcgatgcatgggttaattttgttctgagggtttttagctccggaaatctgaaattgcccttggtccttttgcagtgaggtgatttaaaagcgatgaaatgtgtatgcgatgttgagtcgtcaaagaacaccggaatttaactgtggtcgtataatattatgtgctacattctatgctatggcagttagttttttttgttttgtatta

SEQ ID NO: 142008 - DNA, 2017 bp, Zea Mays
cccgcacgcagtcgtcttttcctccctgacccgcgttcctttatatatatttccccccaattccaccaccaccaacctcctcttcgtcctcatcaacccctgctcccccgccgtcgcctgctgttccgtgaaggactagtaatccatcggtccactgcctcagctatgttgcagctcgcggcgcggtcgctgctgctgttcttgctcctggtctcgccagctgtggcttcagctggcatcgcgaagctcaactcctcgtcgcccctctttggcatcgagttcccgccgttcaacaccgccgtcgccgacaccggctgcgacagcaagttgggtgcagccgaggacgcggcggatgagcagaagccggcgagcccgtcctcgtcgctgaagctgcacatgacccaccgccgcggcgccgaggggggcaggacgcggaaaggttcgttcttagatttggccgagaaggatgcggtccgcgtcgaggcgatgcaccggagagtggcgtcctcgtcctcgtctccgcggcgtgggcgggcgctgtcggagtcggagcgcgtggtggcgacggtggagtccggcgtggcggtcgggtccgccgagtacctcatggacgtctacgtcggcacgccgccgcggcgcttccagatgatcatggacaccggcagcgacctcaactggctgcagtgcgcgccgtgcctggactgcttcgagcagcgcggcccggtgttcgaccccgccgcgtcctcctcctaccgcaacctcacctgcggcgacccccgctgcggccacgtggcgccgcccgaggcgccggcgccgagggcgtgccgccgccccggggaggacccctgcccgtactactactggtacggggaccagtccaacagcaccggcgacctggccctcgagtccttcacggtcaacctcacggccccgggcgcgtccagccgcgtggacggcgtggtgttcgggtgcggccaccggaaccgcggcctcttccacggcgcggcgggcctgctgggcctcggccgcggcccgctgtcgttcgcgtcccagctccgcgccgtctacggcggccacaccttctcctactgcctggtggaccacggcagcgacgtcgccagcaaggtggtgttcggggaggacgacgccctggcgctggcggcgcacccgcggctcaagtacacggcgttcgcgcccgcgtcgtcgccggcggacacgttctactacgtcaggctcacgggcgtgctggtgggcggcgagctgctgaacatcagctcggacacgtgggacgcgagcgagggcggctccggcggcacaatcatcgactccggcaccacgctgagctacttcgtggagccggcgtaccaggtgatccgccgcgcgttcatcgaccggatgagcggctcgtaccctccggtcccggacttcccggtgctcagcccgtgctacaacgtgtccggcgtggagcgacccgaggtgccggagctgtcgctgctgttcgccgacggtgccgtctgggacttccccgcggagaactacttcatccggctggacccggacggcatcatgtgcctggcggtcctgggcaccccgcgcaccggcatgtccatcatcggtaacttccagcagcagaacttccacgtcgcctacgacctgcacaacaaccgcctgggcttcgcgccgcgccggtgcgccgaggtgtagccgccgccgagagcctgcccgagaggaccaacaattccaactcggtcctcggcttgattgaatgcattgggtgtagatactttttggtcaaagtataaagttttgttttttttttctctttgcacttttcaacgaggagagaagataggaacgttgtagtgctagagcctagaggtcgttgcaacgggaaacacgggatttgaataaatggctaaaattgaggattgcaaaaacacacgaatttcatatgtggtgtttgaaacacagaatttgaaaatcgaggaccttagactaatacacagtattctttggc

SEQ ID NO: 142009 - DNA, 1658 bp, Zea Mays
atggccgtgaccactgctcctccgggcatgtccacaggcggcatgtcggcgacaaccttgatgccgtacaaccacaaccagcgcacggagacggtgtggcggactggcggggcaccttgcagagcgcggggaaaggagctgctggcgcgcggtggtctatcgctgcctctagatgcagttggggaaggagatgcacgcaagggcatgggaattccttgggaaatcttgcactgtatactgctattggaggtgtacagccatccgctgtgggtacttaacatgcgatgtcagtgggttcaggagagccatgctagcatcggagaagccgccgccggcagtggtcgtggagaaagtgggcaacgaaggtggaggagagggagcatcgagtttgaggtgacctacctcgacgacgacacatgcgtcacccacccacccgctcatagctctttgcagctgaccacagttataggcgatggtctacacaccaccaaaacagcaggaatcaacgcgagctgtcagaagcgtctatcagaagcaagtgctctgtcagaagctaccctaacacatccgcacagtttcaagcattccataatagcagaattaagttatcctgattatgtgcttaaagagggtgaaggaggcacaattgtttttggcatgtcatccctcctcatattttcacctcaagaacttgactatctaatatgtggccaacaagaaatttgggagtctagaatacctggtgcagttacatggatgttaggatataagattgctatagttttatccaaggagtggatgatcacaatgttctactctagcacggtgacgggggcatcacaatgtcctactctagcgcgcagctcgcagagggcatgtggccacagttcactagccgttgaggaaccgctactaatattttatggcatgcaacattacctgccaatagctggttcacttgtctttgttcctttgatactcgtacctgcaatggatggttctgatgaggataccgcaacagtcatctccaccatgttattagtctctggtcttactacaatactacatacttttttgggttctcggcttccactgattcaaggaagctcctttgtatatttggctccagcgttggtaattgcaaactccgaggagttcagaaatcttagtgacaataaattcaagcacataatgagggaactacagggggctatacttgttggttcagtattccagataatattaggatacactggtcttatttcactgtttctgaggttaataaatccagtagtggtggcaccaactattgctgtagtgggtttggcattttttagttatggtttccctcaggctggcagctgtgtagaaatcagcatgcccctcattctgttggttcttctgtgcactctgtacatgagaaaaatatccttgtttggcaaccatatcttccttgtctatgcggtgcccctcagtgttgcaattgtatgggcttatgcattctttctaattgctggtggagcatataacttcaaatgctgcagctcaaacatacccagttcaaacatattgttggattcatgcagaaggcatttagagaccatgaggcgctgccgtactgatgtttctactgcgtggaaaactactgcctgggtgag

SEQ ID NO: 142010 - DNA, 95 bp, Zea Mays
ttgcaaatcatgtactatgtgctggttaggtgttgcgatggtccgttagcttctaaagtatgtacgacacgtcatatacacggtgattgttgtcg

SEQ ID NO: 142011 - DNA, 883 bp, Zea Mays
aactcgtgtgtctcttgtgattgcttttctgtgtgattattgtgattcgcaagagctcgctctatagccacttggttttatcattctaacacttaaccaagttttgtggttattagttgttgaattttacaggatcacctattcacccccctctaggtgctctcatgcttgatggctagcgtgccttgacatggttgtgcatatgcagctttcatcgtaccatgccgcttcactgctggtaaatctaagcccaccaacacgtggagttgtcagcagagcgattgggcttgaagcggtttcaacgtttattgctggagtgtggggtacaggtacaggatcgacaatgttaacagagaacatacacaccctcgaaacaaccaaaatgggcagcaggaaggctttgcagcttggggtagtcgtgttagtcatcttctccttatttggtaaaatcggagctctcctagcctctatacctcttgccttggccgcctctgttctgtgcttcacctgggcgctaattgtcgcgcttggtttgtccacattgcgatacacccaagcagcaagctccaaaaacatgataatagttggattttccctattcatctccttgtcgatatccgcatactttcagtagtatgaacccagctccaacctaatcttgcccagctatcttctttcatatgctgcagcgtcaagtggaccagttcgcacagccagcagcgggctgaactatgcagtgaacacgctcctatccatcgacgttgtggtggctctccttgtcgcgttgatccttgacaacacagtgccaggcagtagacaagagcgcagtgtgtacatttggacagatcccaaatccctcgaggtggatcctgcgacattgagc

SEQ ID NO: 142012 - DNA, 85 bp, Zea Mays
gccaaccctaccgattgccggagaaggtttcgtgctggttcaggtgggcaaagtgtgtcaaggttttgctctttctcacacaaca

SEQ ID NO: 142013 - DNA, 2002 bp, Zea Mays
cgcgacacacccggccgaaagaccgccctgtctcttcctgcatgcgtaagtctgcatccccggtcagtcagacacggcgcgcccgccagaaacctcacaccgccatcgccatcgcataaactaggcgagaagagagaggggaaagttgcttctctctctgacccgcccactccctccttccctgctccggtcgcactccgtagttcctccgcgcacttacgtacagcagacagacacgagatcgagtggtacagggcccgccagaaacctcacgagctagctgggttcctgccgcgccgccgatccacgcatggcgccgccgccgctcctgcccgcgcgcttcgtcgccgcctccgtcgcgctgctcgccgtcgccttctcctcctctctaacgcgtccgtcaggtgcatacgatccgctcgatccgaacgggaacataacaatcaagtgggacgtgatacagtggactgcggatggctatgtggccgtcgtttcgctatacaactaccagcagtaccgccacatccaggcgccgccggggtggaggctaggctgggtgtgggcgaagaaggaggtgatctgggcgatgaccggcggccaggccaccgagcagggcgactgctccaggttcaaggccagcgtcctcccccactgctgcaggagggacccggaggtggtggacctgctgcccgggactccctacaacacgcagaccgccaactgctgcaggggaggagtgctcgcctcgtgggcgcaggaccctagcgacgccgtcgcctcgttccaggtcagcgttgggcaggctgggtccaccaacaggaccgtcaaggtgcccaggaacttcaccctgctggcgcctggtcccgggtacacctgcggagccgccaagcttgtcaagcctaccaagttcatgtctcaggatggcaggagatcaactcaagcgcacatgacctggaacgtgacgtgcacgtactcccagttccttgcccagagatctccaacctgctgtgtctcgctctcgtcgttctacaacgacaccattgttagctgcccagcatgctcctgcggctgccagaacaacaacagcagtagcaccgccgcgccaggaagctgcgtagagggtagtagaaggtcgccctatctggcttccgtcgtcaacgatcctagcaagaacagcttggcgccgctagtccagtgcacctcacacatgtgcccggtaagggtgcactggcacgtcaaggtcagctacaaggagtactggagggtgaagatcacggtcaccaacttcaactaccggatgaactactcgcagtggaacctggtcgcgcagcaccccaacttcgacaacctcaccaccattttcagcttcaactacagacctctcaacccctacggagtgatcaacgacacggcgatgctatggggcatcaagtactacaacgatctgctcatgacggccgggccagacgggaacgtgcagtccgagcttctgttccggaaggagccgtccacgttcaccttccacaaaggatgggccttccccaggcgagtctacttcaacggagacaactgcgtgatgccgccgccggacgcctacccgtggctgcccaacgccgcctcgccgcggctgtcgccttcgcttctcctcccgctcgttgcggctgcttggacagcattcgcagtcctttcgtgatgggcccatatgcgtagggaaggcaaggcaaggcacacaatgtcccatgacaagttctgacctgattcagcgttgttgcttgctgctgatcattagtcgatctgttgcgaagttttatttggtgtcttgaatcttgattcaggaacaggttcagatgtgcattcacgtactaccaagcatgtacattcccaatacttgtaaatttctgcaaagactgactggcaagtgacagtagaaataatctgtttctctctccgcatcatggaaagtttcgtgctcaaataccatcggcagtttcacaaacaagaa

SEQ ID NO: 142014 - DNA, 1470 bp, Zea Mays
ggaaagttgcttctctctctgacccgcccactccctccttccctgctccggtcgcactccgtagttcctccgcgcacttacgtacagcagacagacacgagatcgagtggtacagggcccgccagaaacctcacgagctagctgggttcctgccgcgccgccgatccacgcatggcgccgccgccgctcctgcccgcgcgcttcgtcgccgcctccgtcgcgctgctcgccgtcgccttctcctcctctctaacgcgtccgtcaggtgcatacgatccgctcgatccgaacgggaacataacaatcaagtgggacgtgatacagtggactgcggatggctatgtggccgtcgtttcgctatacaactaccagcagtaccgcctggtcccgggtacacctgcggagccgccaagcttgtcaagcctaccaagttcatgtctcaggatggcaggagatcaactcaagcgcacatgacctggaacgtgacgtgcacgtactcccagttccttgcccagagatctccaacctgctgtgtctcgctctcgtcgttctacaacgacaccattgttagctgcccagcatgctcctgcggctgccagaacaacaacagcagtagcaccgccgcgccaggaagctgcgtagagggtagtagaaggtcgccctatctggcttccgtcgtcaacgatcctagcaagaacagcttggcgccgctagtccagtgcacctcacacatgtgcccggtaagggtgcactggcacgtcaaggtcagctacaaggagtactggagggtgaagatcacggtcaccaacttcaactaccggatgaactactcgcagtggaacctggtcgcgcagcaccccaacttcgacaacctcaccaccattttcagcttcaactacagacctctcaacccctacggagtgatcaacgacacggcgatgctatggggcatcaagtactacaacgatctgctcatgacggccgggccagacgggaacgtgcagtccgagcttctgttccggaaggagccgtccacgttcaccttccacaaaggatgggccttccccaggcgagtctacttcaacggagacaactgcgtgatgccgccgccggacgcctacccgtggctgcccaacgccgcctcgccgcggctgtcgccttcgcttctcctcccgctcgttgcggctgcttggacagcattcgcagtcctttcgtgatgggcccatatgcgtagggaaggcaaggcaaggcacacaatgtcccatgacaagttctgacctgattcagcgttgttgcttgctgctgatcattagtcgatctgttgcgaagttttatttggtgtcttgaatcttgattcaggaacaggttcagatgtgcattcacgtactaccaagcatgtacattcccaatacttgtaaatttctgcaaagactgactggcaagtgacagtagaaataatctgtttctctc

SEQ ID NO: 142015 - DNA, 829 bp, Zea Mays
attcatccagatagagttccacgtacgacgtagcagtgatccattcccacgtacgttccagaagaatctgcagcagggagggacgagcagctagctagccatccatccaaatgggccgttggttgaagccagatgtacgtatatacgcgtcgtcggccactcaaccatgcatcgttgtttcgttctcgatgtcgtcgctgcagagatccctgcagtgaaccggccgcgcgctcacgctcacgtcttatttgtctttcactatgtgcgtcgtacgtgcatgcaggtgtacccgctgatcgcggccatgtcgttcgtgacggggatgtgcgtgttccagctggcccggaacgtgctgatgaacccggacgtgcgggtgagcaagaccagccggcagagcgccgtgctggacaacgccggcgagggccagcgctacagccagcacgccttccgccgcttcctcgccacgcagcgcccggaggtcttccccgccctcaacagcttcttctccgactccaataataataacacccccgccgacaagtgataaattcatctcatcgacggtctggtcttaattactcttacgccgccggccggcgacgacggcgcgcgcgtgtctgtaatcatgccacatatatatagtgtacatgtgccggtcgaataaaagttgagtctcttttagtccttccatacgacaggccgggatcgggtctggactggagctcgtgaactacctgcacacggccccgctggtggtgctgggggcgaccggcgacgctcgtgacctacctgcacatgatcctttcataaagaccacgatctgactgaa

SEQ ID NO: 142016 - DNA, 544 bp, Zea Mays
atccagatagagttccacgtacgacgtagcagtgatccattcccacgtacgttccagaagaatctgcagcagggagggacgagcagctagctagccatccatccaaatgggccgttggttgaagccagatgtgtacccgctgatcgcggccatgtcgttcgtgacggggatgtgcgtgttccagctggcccggaacgtgctgatgaacccggacgtgcgggtgagcaagaccagccggcagagcgccgtgctggacaacgccggcgagggccagcgctacagccagcacgccttccgccgcttcctcgccacgcagcgcccggaggtcttccccgccctcaacagcttcttctccgactccaataataataacacccccgccgacaagtgataaattcatctcatcgacggtctggtcttaattactcttacgccgccggccggcgacgacggcgcgcgcgtgtctgtaatcatgccacatatatatagtgtacatgtgccggtcgaataaaagttgagtctcttttagtccttccatacgaca

SEQ ID NO: 142017 - DNA, 1574 bp, Zea Mays
ctttcccctttccttcagaaacaaacaacagctgcgccggctccaccgcaccagcccacacccgccgcggccgttacatccccgcttccccggccaccttccttccatttatacccctccgtttcccacccttccctccccactccggcagtccccgtcccaccactacagccactgctgcccggccggccgcgtccctcttcctccgccaggcgccagccgcccgcactccagcaatggcgtctgcctcgcacgccccgacgccgctgctcaaggacgagctggacatcgtcatcccgacgatccgcaacctcgacttcctggagatgtggaggcccttcttccagccctaccacctcatcatcgtgcaggacggcgaccccagcaagatcatccgcgtccccgagggcttcgactacgagctctacaaccgcaacgacatcaaccgcatgctggggcccaaggcctcctgcatctccttcaaggactccgcctgccgctgcttcggctacatggtctccaagaagaagtacatctacaccatcgacgatgactgcttcgttgccaaggatccattagggaaggacatcaatgcacttgagcagcacatcaagaacctcctgagcccttccaccccatttttcttcaatactctgtacgacccttaccgtgttggcgccgattttgttcgtgggtaccccttcagccttcgtgagggtgtcccaactgctgtttctcacgggctttggctcaacattccagactacgatgcccctacccagcttgttaagccccttgagagaaacaccaggtatgtggatgctattcttacgatcccaaagggcaccctcttccctatgtgtggaatgaaccttgcatttgaccgtgagctcattggtcctgcaatgtactttggtcttatgggtgatggccagcctattggtcgctacgatgatatgtgggcaggatggtgcacaaaggtgattacggaccatctgggcctgggtgtgaagactggcctgccctacatctggcacagcaaagcaagcaacccgtttgtgaacctgaagaaggaatacaacggcatcttctggcaagaagagctgatcccgttcttccagtcggtctcccttccaaaggaggccaccaccgtccaaaagtgctacctcgagctggccaagcaggtgagggccaagctcggtaaggtggacggctacttcaacaagcttgccgactccatggtcacgtggattgaggcctgggacgagctgaaccccccaaaaggcggagtccccacagcaaatggccctccaaagaagtaaaacactatgtagtgtaaacttcactcgttcatgtggaccgtcgtactgaaaggaaatactgttttggggttagtgctgatggactgagatcactccgctgtaactcgagattttcacgtcccggaaaccgccctgccggttttagggcgtttacatgttttttttttcatttttcgtgtgatacaacaggtgtaatgtcggattggattagaataaagtttatgatcttcatcttttcctcagaaaccataa

SEQ ID NO: 142018 - DNA, 844 bp, Zea Mays
acctcatcccaaatctcaacccaagaacaaaaatggccaccgccaccactgaagccgaagtccgtgagtccctcggcacgaagttcggtcgcctcaaggaacaggcgaaagacatggcctccaggcaccccgtcgctggagccgcggccgtcatcgctgtcagcgccgtgggcgcctacttcttgtggcccgtggcggccccggccgtggccatgatgaaggcgcctggatccggcggtgtgctcgtctcccgcgcggcgtttctcgcgaagaaggagctgtacttcaagctcttgcgcaccgggggcgttgcggcggcggtcgccgctttggcgtagctgcgcatgcagtagtggtacatgctgttcgtgaacgagcggcgggccggacgtttcaggttgtatgttgaccaagtggttattagtactttcctttcgttggtgttgagtctcgactctcgagtttggattatctgtcaaaaacctatgtatgcgtgcatgatcagtttgatgaataatggaactcttttaagaaataaagcaagttaaagtccagataaacatccacaccgaaagcgccgggaatagcagattacaaaagaagctcaaacagtctgaatttttatcaattcatccaccgtaaaagtacgtgggtttcatgtttatcctgaattatcattattttcttgtgattgaagtcatgccaacatcttgatctatcgtgtcttcatcctgtacaaccctcactctattcataactccacattttaagtgctagtttgggaatcctaattctctctggaatccccgtaattttctcgaatagtaatatccagaggtgtcat

SEQ ID NO: 142019 - DNA, 147 bp, Zea Mays
ggttgggcgcgcgcctgggcggtctctggaagactactagtaaaataaaagtggcgacagtagtgtcctctcctccttggtgcacgtggacgtggtgtactggtgttttgtcgtcgtcgcttgcaatataatgcctattttattact

SEQ ID NO: 142020 - DNA, 1476 bp, Zea Mays
cgtgcgcccactcgcccgaaaaccacactgtcagtcagtcggtggcagagacgagcaccttctccagtttttttctcagttctcactccatggccgccgcggcctgcaacccagtggctccttccgggcctgtgccgttcaaggacgtcgacgacggcagtgttccagagcacactcccaaggaggagttcggcgacctcgtggccgcgctgccgagcaggcagcagtccatcctggagctgcgcctgtaccagggcttctggctgccggagcactgggtgccggggaccatcgtgttccagcgccgcttcacgccgcgccccgacgacgtgatcctcgcgagctaccccaagtgcggcaccacgtggctgaaggcgctggccttcgccacggcggcgcgtacggcgtacccgcccggtggcgccaggcacccgctccgacggctcaacccgcacgactgcgtcccgttcatcgacgagatcttcgccagcggggaggaggcgaagctcgaggccctcccgtcgccgaggctgatgaacacgcacctgccctacgccctgctcccggcgcccgtcaccgccaccgccaccgggtgcagggtcgcgtacgtgtgcagggaccccaaggacatggtggtctcgctctggcacttcctccggcgcgccaagccggacctcttgttcgccgacacgttcgagtccgtctgcgacggcaccgtggtggtcggcccggtctgggaccacgtcctctcctactggcgtgcgagcgtggcggccccggacagggcgctcttcctcaggtacgaggacatgctgcgggaccccggcggcaacgtgcggcggctcgccgagttcatgggccgcccgttctcggccgccgaggaggccgccggcgacgtcgcggccgtcgtggagctctgcagcttcgacgagatgaaagggctggaggtgaacaggcctggtagcggcaccgcggggaggtaccgccccatgccgcgcgacgccttcttccggaagggtgtcgccggggactgggcgaaccacatgacgccggagatggcggcgcggctggacgggatcttccgtgaaaagctccaagggacggggcttatcttctcataatgcaaatgtgtatacggctcttgatttgcgtggtcatctcttctgatcttttccgtggtgtcttgtgtttacacgagatatgttagatccaaaataagtagtgatgatttaatatatacatcatatgcatcaatctcccatgtacaccagatatgttttcccttttatattgttcacacgaattcgatcaaattaattatccatagcacgtgggacaatgctgcggccagttcgctaaataagactataggagcaagtgcaacaatggattaatggactctaaatctgcttagggcatgtacagtggagagacaccaaaacggttctccaagcacagaagacaactaagagactc

SEQ ID NO: 142021 - DNA, 1023 bp, Zea Mays
atgtatgtagaggtggttccgcctatggacaagcaacggtgtctagagcagattcttagagatcaagaaaggggctcaaaaatcatcatattttgctcaactaagaaaatgtgcgaccagcttgcttgtggcattgatcgcaattttaatgctttaagcatccatgatgataaatcacaggccgaaagagataatgttctcaatcagtttcgaactggcagggctccaatattagtagccacaaatgttgctgctcgtggacttgatatcaaagatatcaaagtggtaattaattatgacttcccaactgggatagaggactatgtgcatcgcatagggcgtacaggaagagctggcgctactggagtctcgtacacctttttctctgaacatgattggaaacatgctggtgatttggctgctgggatgagtcgttgggatggacctggtggtagtcattttgaacctggtgctggtggctctgttggttatggtggtgttagggagggtcctagaggttttggtggtcgtgagggcccaggtggatttggtgtccgagaaagcccagccatgttatggtggtcacgcagcagaagccacaacaggagctggagccataatcggagccgaagcagtagccggagtcgcagcagaagcaagagtcgtgaccatggtgcagcaccagagcgcaggcctcgggcaagatctagttttgatgtgctgcctcctgcaactggagctgctggaccagcacctgcgcccgtacctggaccagcagcaccacctgttcctgctctcgcagctcaacattcattggccgatacatcttcaatgtcaccaatgtctcctggtggcatagtccagccagctgctgcaccgttgatatgcggtgggaatgacaacaactttggcggcataccgactggccaacctttgcaggggactgatgctgcattccctagttttcctacaagcgaaaaatttccaggcgcaacagttcaacatgccgctcctgatgtataa

SEQ ID NO: 142022 - DNA, 351 bp, Zea Mays
atggttcggtttatttcagctcttttcgttcaagctcgtgcaataggacgtttgatccttctacaatttgctagcgaggttcaaaattgtgacctccaactggtacagcccacagcaacagaagaacaaatcctggtttcccaaaaacctagttttgaagacaaaactattgaagaactgcttgacatagatccagacatccacaaggttatagatgcactgttactttcacccgttgtacaagatagcaaatggtggtacccatcttgcaaaaagtgcaagaaatctataggtcaatcacctaccgggtaccgctgcacaacatttctcagggtccttcagcagacctag

SEQ ID NO: 142023 - DNA, 2772 bp, Zea Mays
cagaaaccctttcttttgcgttgtactaaaccctagccgaccgcgtcacgccgccccccgccgccgccgaccgcgtcacgccgccccccgccgccgaccgcgtcacgccgtcccccgcagccgccgtcgccgaccgcgtcacgccgtcccccgccgccgaccgcgtcacgccgtgccccgccgccgccgaccgcatcacgccgtcccccgccgatgagtaatcgaccgcgtcacgctgccccccgccggttagcctcgtcgtctaccattcgccgtctcatacaggacggtgacctggccgtccccggctcctctgcggaggacgtcgcccacgctctccgcaaccaccgtcctgagctccgccgcaagaggctcaagcccttgacggaagccgtccgccgtgtactatcctctgactttgatgacgacgatgatgacgactccgcctcccgcggtcaccaaggtgcccacgccaccctctcctccaccacctctctctcggacgaatccgcccacccgccgcctccaccctatttcgatgccaccaagaccatgcttcgctcccagtatgcctcgcagacgtccaaacagaacccaggcactaaccagcagctggaaatcgagatgaccgctgagaaggctcgccgcctcatcacatctgattgtggaggcggaggtggcgatgccaagccagaggctccggtctccgaaggagtggtcaatggggacaagtggccgcgttttgctgatctcggcgggatggatcaggtgttagatcagcttgtggtagaagtggtggtgcccctgtgccatccggagctgccggattaccttggggttaggcctgttgctgggctactgctgtacggaccgccaggttgcgggaagaccacccttgcacatgccattgccaatgagactggtgtgccgttctacaagatctcagccccagatatcgtgtctggagtatctggaggttctgaagaaaacatcaggggcttatttcagaaggcatataggactgctccctcaattgtattcatagatgagatagatgcaattgcatccaagagggagaatctgcaacgagagatggagcgacgaatagttactcagctgatgacatgcatggatgaattccaccagaatattggtggtgatggttctgatgccgattcatctgaaaagaaaccaggttatgttattgtcattggagctacaaataggcctgatgctgtggatcaagctcttcgaaggccaggaagatttgatcgagagatatatcttggggttccagatgtgaattcaaggaaacagatactgatgatgcttgctcggaagcttcgacttgaagggcaatttgactttttaaagatagcaagggccacaccaggttttgttggtgctgacttgaaagcattagtcaataatgcagggtatctggcaatgaagagaataattaataaaagaagagctcagtattgttctgaggtaaaggtaaaatggtggaagcagctgtcttgggatgcaggcgagatggagagtgtacatgtcaccatgaacgactttgaggaagcaacaaaattggtccaaccctctttgaggagggaaggattttcttccattcctgatgtcacatgggatgatgttggaggtcttgattcgttgaggaaagagtttcaccgctacataagatgtattaagagccctgaagattgtgatttatttggagtgagaatgcaagatggcttcctgctgtttggacctccgggttgtggcaaaacactcatagcaaaagcagtggcacatgaggcaggggctaattttattcatattaaggggcctgatatattgaacaagtatgttggcgagagtgaatcagaaattaggaaaatattcaaccgagcacgtattaatgccccatgcattgtattttttgatgaggtagattcattgacaacaaaaagaggtaaagagggggggtggggttgttgaacgtctcctaaaccagttacttatcgaacttgatggtgctggtcagcgtaaaggtgtctacgtgataggagctacaaacagaattgatatgatagatgatgctatgctacggcctggtagattcgggaagaaacattatgtacctatacctggtgctcgcgaaagggtttcaatattaaaggcactagccagacgcatacccgtttcatcaaccgttgatttggatgtgttggcacttcgagaagagtgcagcaatttcactggcgccgacctagcatcactggtggatgaggcagccatgttagctatggcagagagatggatgtacctcgatagcaggacatcaacgagtccatcttctctgattgagccatcacactttgaagaagccttatcaaaggtgaagccatcaatatccaaaaagcaaaagagactttacgaaaaaatgcgcaagaaacacttgtcaacaacctgatcagatcaccatacatccatcttgtgtgtgtggcacaaactatgccatcgctacctatgaaaatggttctgccggcactgcagaatgctactataaatttgtgcattacaatcatgcttgaaatataatgataaaccgtatactccctctgtttttttacttgacattttttagttcaaaaacacactatccggcgtcaaatatataagattggaggtagtaccagacatgccgtggcttatttgtactgtcttcacctgctggaatttttgcacgtgagctaccaatgcatggcttgttag

SEQ ID NO: 142024 - DNA, 3062 bp, Zea Mays
gcgtcggcacgtccgccccacctcttcgcttaggcacgcgccaaaaccagtcaccggccgcaatctgccaatctcccgagccgcagtcctacgctccggctcctccacctcctaaccgcatttgttgatgacggcggagcaggagtggagtgaggtccaggtccgggccctcgacgggcgatccacggtcgtcaagctgccccttggcgcctccgtccgggacctcaaggccgcgctccggacgtccttcttgcccgcgcaagtctcccccagcttccacctcttcctgaagggtgctaaattgcgtttagacgctgagattggcagccttgctatcggcgatggggacttcattgttctcgtacccttcacaaggacgccacagcagcatttttcagttagcacagcaagtcaagatcagggccactgtccaccaaaacaaccagaagtgtcttctgcggctaattcagcttggcaagacattatggatgacctctcagcaatgccagccagcccacagtctgatgctgcttccaaagatttttactcctcatgtgacccgtgctctgggagatttacggaggatatgaaagcgggtcaaatttcgacaagtgggtcatcaaggaaaaggaggaaaacatgcaaggaaaacggaaatggttccccacaaatggtgtcctcgtctgaagcaaatggtacagctgagaaacacaacataagcaagaaaagtggggtggccaaatctgctgctatgttatgtcatgatatgcaacctttgaaacctgctgaaatggttgaacatctgaaacaaggacttggaaaggaggggcagatcgtacatatccaagagatatcatctagagaggcatcatttacagaacttccttgtaatctttcagaagctatgagagaagcgctgaagagtattggaatatctagactgtatagccaccagtctcaagccataacatcctctatttctggaaggcacattgtcgttgcaacttctacatcaagtggaaagtctctatgttacaatattcctgttcttgaatgtctttcccaagacttgatggcgtgtgctctgtacatatttccgatgaaggctttagctcaagatcagttgaggactttaataaagttgaagaatgcatctcatattgatgttgatgttaaaatatatgatggtgatactcctagagaagatcgtttgtggatcagggataatgctcgactgttaattaccaacccggatatgttgcatgtgtcaatcttgccgtatcatggtcaattccagagaattttatcaaatctcaggtatattgtcattgatgaagcacattcatacaagggggcatttggctgccatactgcgctcataattcggagattgaagcgtatttgttcaaatgtttatggtagttgtcctacattcatattttgtacagcaacctcagcaaatccatgtgagcatgtcatggaattggccaatttggatgaagtcgagttgattcagaatgatggaagtccttgtggttccaagtactttctcttgtggaatccctcactacctatgacagaaggaaggtcaaaagctagttcagtacataggcgctcaagctcaatagtagaggtttcatatctattttccgagatggttcaacatggcctccgctgcattgcattctgtaaaagtaggaagctatgtgagcttgttctagcttacacgcgtgaaattcttcaggagactgcaaaagaattggtagattctatctgtgtatatcgtgctggctacatagctgaggacagaagaaaaatcgaggctgatctttttggggggaaacttcatggagtcgctgctactaatgctcttgagctaggaattgatgttggacatattgatgcaacattgcatcttggatttcctggtagtattgccagcttgtggcagcaagccggtaggtctggaagaagagctaaacaatcactagccatttatgttgcctttgagggtcctttagatcagtatttcatgaagttcccacataaactatttggcaggtcgattgagcattgccaagttgattcacataatctaaaggttttagaacagcaccttccttgtgctgcttatgaacatcccttgtgcgtgcaatacgatgagtgctactttggctctagtctcgatagtgtaatgacaacccttaaagacaaaggttatatcatcaataatcgagctggacctttttcttcaagcatgtggaactatattggacccgagaaaagcccttcacaggctgtaagcatacgggcaattgagcaggacaggtataaagtgattgacaagttaaatagtcgattacttgaggaaattgaagaaagtaaagccttttttcaggtttatgaaggtgctgtttacatgcatcagggtgccaattacttggttgaggaacttgacttggcatcaaggacagccttctgtaggaaagctgatttgaaatattacacgaaaacacgagactacactgacatcaatgttctcggaggagaatttgcttatcttcctacaagtatatgtagaactaatcgggtgaagacaactgctcaagcaaatgactgcacggtgactactaaatggtttggtttttatcgcatatcaaaatctagcaatacaatatccgacagcttcgagcttaacctgcccccatactcctttacttcccaggcatatgatgtgcagtgcttctgacctaggaacagagtgcgctaatcctcatgaaagccgtggcatcccagacagaatccttttatatgatagacatccaggtggtatcggcatagcatcacaggcccaaatgctcttcgaggaactcctcctggctgctttagaagtcgtttccacgtgcaactgcacaagtgccgttggctgtccaaactgcatccaatcactgacgtgcagcgaatataacgaagttttggacaaggaggcagcgattttgattctgaagggagtaatcgactacgagagatcgtattttgaagcggaagacgcttctcagcga

SEQ ID NO: 142025 - DNA, 794 bp, Zea Mays
aactgttcatctcgtcctccttccccgatggcggccggcgcggccctgcagccagcgtgggcgcgcggccccggcgagcgcggcccggcgcaggcacagcagcctcgacgccgatcctctctggcgcgtggcgccgaccatggcccagcccgacgcggctgcggcggtccggtggcctggcccccacgcctagcatggggcccggcgcggctgcccggccacggcacgggcgcgtaggcgacggccccgtccctgacggcgcgcgggcgcagccccggtgtggcgggcacggcctccagcgggcgcggccttagccgcggaggcgagcgcgcggcctcggcccgatggcgggcgcggccccgtgggcggcgcgtgggcgctaggccccatgcgcgacggtgcgggcgcgaggccccctacgcgacggtgtgcgcgcatgggcaggcggccccgacgggcgtctcccctgtccaggcctcggcggcctctgcggtgcggccccaccatcctgcgggctcgtggccacggcatgagtgtgctgccacggctgggcggtcgggcaccggcgcgggcacgaccccatcctggcacaggcgccatagccatgcccgcatgcgccttggccgtcgtcgctgttcacttggatgcaggcaagcaaaagcctgcaggtctcaagcgcaggagtggcagaaatattcattaataatgaacttgtaagtgtgcagttcgtaccttgtaaaatcagacttctctgatttgtttatttgaacgaatgctcttataaaattggtgaa

SEQ ID NO: 142026 - DNA, 1206 bp, Zea Mays
atgcgctgcgaggtgacacaacaggagtctggcgacagccctcaggcaagaaggaacggctcgctctcgcggcccgcatctccgatgcgtgggagtctgggagacaagcgctgcgacggtggatccggcggcccacgggcgtgggagacgaagacgagcgattataaacgcccctcaatgacaaggactcgtcatctgctccactgccactgcccttatcatcattcatcagcggcctgcctgcacgagataccgagggacaggacagggagatccatggccgcgtcagaccaaccgccgaggccagagaagcccccgctgccgtggcgcgcgaggctgcttgtgggcgccgcgtccgcgctgcacgccgcctcgctccgccgcgacggcaccgttaaccgcttcctgctctccctcttcgaccgcgccgcaccgcccaccccgacggcccccctcggcggcgtggcatctacggaccacgccgtctccgaccacctgcgcgcccgccttttcgtcccggagacccccggcggcggcaacgagctcccggtggtcgtgtacttccacggcggcggtttcgtcttccactccgcggcgtcggccatcccggccgtcatcgcctccgtcgactaccgcctcgcccccgagcaccgcttcccggctccctacgacgacggcgaggcagccctccggtgggccctcgccggcgcggcaggcgcgctgccgtatccccccgacgccgtcgcgggcctcctcgccgtgcagcctttcttcagcggcgaggcgccgacggggtcggagatgcggctccgcgacgccccgttcgggagccccgagcggctggcgtggctgtggcgcgcgttcctgccgcccggcgccacgcgggaccacgaggccgccaacgtgcccgccgcgatcaggcgcgacgcgggcgcgggcgcggaccggtggcgggcgttcccgcccacgctggtgtgcgtcggcgggtgggacgtgcatcaggacaggcagagggcgtacgcggatgcgctccgcgccgtgtgctccgaggaggtcaccgtggcggagtacccggacgccatccacgccttctacgtgttggacgacctcgcggacagcaagaagtttgtgggtgacgtcgcggagttcgtgaaccggcatgcacaacagcggaagaaacccgcactagaccatgccaaggactag

SEQ ID NO: 142027 - DNA, 101 bp, Zea Mays
tctttagatgtactcaacagactatcatgtgtgcttgctttgtggaagcagccttcactaacgacggaaccaacaacaagaccgcaagcaaagtgtaagag

SEQ ID NO: 142028 - DNA, 130 bp, Zea Mays
aataacttcaaactctatgactaggttgcttttttggagttttcggagcaacaaaaaaggtactctaaaaaattatactgcagctccaaaaactccataaaatttataactttagagttagattatttag

SEQ ID NO: 142029 - DNA, 3607 bp, Zea Mays
ttatctcaccgctatttttgactttgttctttctgtcgttatcacatcacaaccttaccggtcacgagtcacgaaccgaagccccaaacgagatgcgctgccccccgaaggaaaaccaccaaccgtttgccctacccgtgcggcccggcgccgctgcgctctcccgaaagagaggtgccgaagcgcagtagattccccttcctctccatcgacccctctcctcaccatccttgcttcccacctgtccgtctccttcctcgctccgcgcctcgccgcctcctctccccgcctccgcggagagggagagagcacgtcctgcccacgagtgcccccgccccgtgaggaaaccctcgcccgccccttccgttcgcccgtcctgccactggtctccctgaacccccccgccgccgccgccgccgccgccgttcggtttccgtgtggcgtcacttctgagggattttctgggtctgacaaggatcagcgctggagtggcctcgccgctgccctccgttacatggaggagttcctgctcaccctgaacccgttccggttcaagccgctctggccgacgacgactgcccccaaatccttctgaggccctaggaaatcctactcccgcccggcttcatagaatccccgggccgcccccccttccccgactcccttttgtcctcagatagtcatccgggttttccgagaggcacccctcctcccctgcgaatcgagagcccctagggccgtaagcccgtaaccataagtcctcctccactttccgaggccccgccgcccgcgccccggacctgctgtgagcgtccttccttggtggcgttaagcgttgcggacggggatggcgagggaggaggacggcccgcagttcgtgcggtggagggaggagttcgtgtctcaggagcgcggcagccgcgtcgtgcactactacctcgaagacgcggccggcgtgtcacatctcgccgtcatcggcaccgagaggagcctgcgccatatgctctacgtggtctcggaggacttcaacgccgcgtgggggtgcggcggcagcgctgacggtggcggcgcgccgccagtgtttgcgcgcaagtggcggtcacgccgggaggtggtggattggctcgggtccttcctcccggtgaaggcacttgactcaaaattctcaaaatatggatcttttgcggataatgacattgggtcagatggatacggggaaacaaatggttttttgcaccaaaatctgggtaaagactgcagctcagacattacatggtctggttcgttctggacatgtagcaagcagcttcggcactatcaagctttttgtcgcaatggaaccacaatatctacccacacttttgtgctggtcttgtcagaggaacaaaaccgctatcttgcatacttggaagacatgtatgaagataagaagggacagaagaagatcaaagtgcgatggtttcatcaaaaccaggaaattgcttgtgctatacctcctccgcctcatccttgcgaagttttcatcactcctttcacacaagtaatcagtgtggaatgtgttgatgatattgcaactgttttaactcgtgatcattatgaaaaatgctcccatgcaatgtcaattatgactgggatccgtttctgctctcgccagtatagtaaaaataagttcaagtattttgatttaagaacgttgcgtggatattttagtcaagcagttgttaggtccatgaaatttccagctgagtcagaaaaggacagtgaatattgtacacctgggaaagctaaatttccaaagcaattagagaggctttattcaaaatgtttgggcactaaaatttgtcgaagcccccaggcagactccataccatcttatcaaatattaagtaacgagcagcctcctgggaagcatctctcaatcaagtttatagtgccccagaatcaactaaagccgacatataatactggtgacagattagagatcttatctcaagacagtggcattattggttgctggttcaggtgcactgttctgaagtcatgcactaatcataacagattgaaggttcagtatgatgatctccaaaatgctgatgatagtgggagattggaggagatggtacctgcctctgcattggctcttcctgataaactgggactgagacaccaagaccggctaagaatcaggccacgtcctcaagaaaatagttttgttgatggggctgctcttttacctggaactgctgttgatgtctggcaatttagtggttggtgggaaggagttgttgtcagtttggacaacattgtggcagatagccttcaagtatattttccaggagagaactttttccgtgcgtgccagctaaggaacattagaatctctaaagattgggtcaagaaccgatgggttgatattgaaacaaagtcagatgtgttgtcacagataccttcagatagtatccaagcaaagcaaactgataatcatgcactgtctgttggtgtgacgggctccagcagttctgcaatgcctgagcaagagattgcagctacccaagcaaactccaatggagatgcagcggtgcctaagcaagagcttacagttgcccaagcaaactccaatggagatcaacctgtgcctaagcaagagcttgcagctacccaagcaaactccaatggagataaatctgtgcctgaccaagagcttgcagctatccaagcaaactccagtggagataaacctgtgcctaagcaagagcttgcagctacccgagcaaactccaatggagataaacctgtgcctgaccaagagcttgcagctatccaagcaaactccagtggagataaaccagtgcctgaacaagagcttccagctacccaagcaaactccaatggagataaaccagtgcctgagcaagagcttccagctacccaagcaaactccgatggagataaaccagtgcctgagcaagagcttccagctacccaagcaaactccagtggagataaaccagtacctaagatagagcttgcagctacccaagcaaattctaatggagataaacctgtgcctgagtttacagctacccaagcaacctccaatggaaataacagacaaatagaagcaagcaagcaatccgaagttagtatgacagatgaagcctctcctttggcggaggatgacaagcgaacaattctagggaagcgtcccagggatgttagtatgactgatgaagggtcagctttggtggaggatggcaagcgaacaattatagggaagcatcccagggatgaaggtaatgctgaacagagatgcaacggggaagtaggtgtagtcgttagcaagacatgatgtttgggacgcccaaactcattagactcgtgtacatagctatagatatggtgattgaaacctccaatggcgcggggttttttgctacgctgctcgtatcaagagcgtattgccgcttctttggcatacctctcctagtcttcttattttgctggtagtttgtgtttatgttaagggacacatggattgcaagctgaatggtacccttcccagttcccggacacgttgtgctgcaatccgagtatatgatttttttta

SEQ ID NO: 142030 - DNA, 2112 bp, Zea Mays
gtatttcaaatcccctcgcatccaaacacttccgtggaaaaaaaacaattaataatttattactggcagaagggggaagaagagatggtggacgaggcatgggagcgggcggtggaggcggcgctgcacgccggcggcgaggggagctcgtcgccggcgcggagcctgacgcttgacggcgccgtcaagtgcacgcacgggcggctgccggcggcagagatactggagcggcaccagagcctggagcacctttcgatcgctggcgtcggggtcacgtcgctcgagggtttcccgcggctgcggaacctcacgcggctcaccctctccgacaaccgcatcgccggcggtctcgaccacctcgtcgccgctggcctgtcctcgctgcgggacctcgacctcagcaacaaccgcatccaggacgttgacgacctcgcgccactcgccgacctgcgcctcgtctcgctcgacctctacgagtgccccgttacccgtgtcaaggactacagatccagggtcttcgagatgatccggacgctcaaatacctggacaagatggatgccgacgagaacgagcgccccgagtccgatgacgacgatgacgacggcgagggcgatggcgagggcgatggcgacgatgatgacgaagatgaagaagacgaggaagaccctgggagcggcgaggtagcgaacggcggcgtcgcccatgcgcgcgcgggcgtgccctcgcacccggtggaggtgaatggggtgatcgatgtggacgaggaggagagcgacgctgacgaggtcatcccgaacggtggtgtcgagcacagccatggcgcaaacgggtttcgtgtcgcggctgctggcgaagcccgtggcgaggaggatgaggacgtggaggaagatgacgacgacgacgatgactttgaggaggaggatttgggggaggagattgatgaggatgttgatgacgaggatgctgttgtggaggtgcatgatgtaccaagtagtgacgaggaggaagatggcgtggaggaggatgaggaagaagaggatgaggacgaagatgatgaagaagaggaggaggttgaggatgaaggtgaagaggcggagccacagagcagtggtagggttgccatgatgacaggcgaggatgaaggagaagagatagatgggcatgaacatggagaaggggacgatgaggatgaaaatggtgagattggtgaagaggatgaggagggattggaggtggggaatgatgacgacgaagacgacgcagatgcggatgatgaggatgaagatactgaatatcttgtgcaaccaatcgctcagcctcaagccatggctattggaagtgaattagatggagttgaccctgatgatgctgacgaggacaaggaagaagtcgacaacgatgatgatggggccacagatcagccttcatcctcgcatggagccaagcggaagagagatgatgatgatctgtcaggcagtggtgatgacagtgaggatgacggtgttgaggacttgaggcccttcaagcacaagtgatggagcagccaatgtacatggatccctccctcccccttcttcagctagaagtaagcagcaagatcagcagcagcaggaggaggcagcaggaacagaaatatggtgggtttcccctgtcttctttttaattgttttttcttgtaaaaactttgaattgagagagagcttctgcctccttggaatagcagattttaggaggtaatggagagaaacaccttgtgtagcctagtaggccagtaggtaaccagttcggttcttcagtctctcaccttgccggcaagcccccttttgtgttcgatttttccctccaactttcaaatggtagttgcaaccgtggggcttccctccatcctttgaaatttctgttgcactggccgtgtagggttgcacaaactgtagtttccctccaaaagaaagcccgggaaatgccccccctttcaaatgcccatggtagccgttgcccccatttgaattcttgaggtactgcacctccaatcggctgaattgctttctgttatggttactgctttgagataggtgaaatggctgtggttgcagcgatggaggcaaaccggg

SEQ ID NO: 142031 - DNA, 2195 bp, Zea Mays
gtatttcaaatcccctcgcatccaaacacttccgtggaaaaaaaacaattaataatttattactggcagaagggggaagaagagatggtggacgaggcatgggagcgggcggtggaggcggcgctgcacgccggcggcgaggggagctcgtcgccggcgcggagcctgacgcttgacggcgccgtcaagtgcacgcacgggcggctgccggcggcagagatactggagcggcaccagagcctggagcacctttcgatcgctggcgtcggggtcacgtcgctcgagggtttcccgcggctgcggaacctcacgcggctcaccctctccgacaaccgcatcgccggcggtctcgaccacctcgtcgccgctggcctgtcctcgctgcgggacctcgacctcagcaacaaccgcatccaggacgttgacgacctcgcgccactcgccgacctgcgcctcgtctcgctcgacctctacgagtgccccgttacccgtgtcaaggactacagatccagggtcttcgagatgatccggacgctcaaatacctggacaagatggatgccgacgagaacgagcgccccgagtccgatgacgacgatgacgacggcgagggcgatggcgagggcgatggcgacgatgatgacgaagatgaagaagacgaggaagaccctgggagcggcgaggtagcgaacggcggcgtcgcccatgcgcgcgcgggcgtgccctcgcacccggtggaggtgaatggggtgatcgatgtggacgaggaggagagcgacgctgacgaggtcatcccgaacggtggtgtcgagcacagccatggcgcaaacgggtttcgtgtcgcggctgctggcgaagcccgtggcgaggaggatgaggacgtggaggaagatgacgacgacgacgatgactttgaggaggaggatttgggggaggagattgatgaggatgttgatgacgaggatgctgttgtggaggtgcatgatgtaccaagtagtgacgaggaggaagatggcgtggaggaggatgaggaagaagaggatgaggacgaagatgatgaagaagaggaggaggttgaggatgaaggtgaagaggcggagccacagagcagtggtagggttgccatgatgacaggcgaggatgaaggagaagagatagatgggcatgaacatggagaaggggacgatgaggatgaaaatggtgagattggtgaagaggatgaggagggattggaggtggggaatgatgacgacgaagacgacgcagatgcggatgatgaggatgaagatactgaatatcttgtgcaaccaatcgctcagcctcaagccatggctattggaagtgaattagatggagttgaccctgatgatgctgacgaggacaaggaagaagtcgacaacgatgatgatggggccacagatcagccttcatcctcgcatggagccaagcggaagagagatgatgatgatctgtcaggcagtggtgatgacagtgaggatgacggtgttgaggacttgaggcccttcaagcacaagtgatggagcagccaatgtacatggatccctccctcccccttcttcagctagaagtaagcagcaagatcagcagcagcaggaggaggcagcaggaacagaaatatggtcagggggatgtcgcggtcggcgggcgtaccctctttggtgactgcggatggatttgtggttcatgggtggatggatttcaggatttggaattacgcgaagttacggcgcggttgttgctcccaccggaatccctgcctgcgcgagcgggacggaaataaatggcgtggacccggttcacggggcaatcgcgccgggcctccatgtgggcgtggttctccgcctgcgacctgcctatcctccagcagctgtgagcgtatggtccgagtctatgtcgacggtcgtatgaaatggtgacaactcgcgacggaagtattacggcggcggcaggcaccacagctcatcacgctatacccgtgatgggagcagaacaacgcggaatacgacgtgggcgaagaagggtcggtacggagcaactagcaagacgtgtaccgcccatgcctcattttcttttctcccttcacatctcgccttcgttaggccgcctgttgtggggaatgtaaataaatgtacgtattttgagaaaggttaaataaaatacttcaattacaagcgaa

SEQ ID NO: 142032 - DNA, 1246 bp, Zea Mays
cagcccgcagccgcaggtgcaggtgccgatcagatagcgtggcgccaaaccactgccgtccaactgaaccagtggacaggagccacccctgcacggctgcactagactacacgagggacccccgtccggtctggccgtctccggtaaaaccagccgcctcatcctctagccgatctccttttttgtcgcctccgtgcgtgccccgggggccttgatcgcgcgcaccggtcagctcagcccgtctgattcgcgtgctgccagccctccgccgatcgtgaaacacaaccgtcggtggtttgcttgcttgatcgctgatcctcgcggacgctcacggtcatggcgcctcagcctttgcgcgctccgaggctgagcgcccccgctggccacgcggcgtgcaggtgctcggccgcgccgctattcgggaagcgggcgccccccgtcgtcgcgttcccccgcgcccgtagcggcggcgccgtcgcctcgtgctcggccgtgcaggagtcgtccacctccaccactggtacgggtcttgctaccctaattgcggggtgggtgggatctcttctgaataagttctctcgagacgtagatcggcatgttagcaagaagaaggatgccgcggacggggccaaggaggccacagcggaggcggcgaagccggccgcggccgccaagccaaagaaggccgcggcgctgccgctgccggagatgatgcagcaggagatcatcccaccgctgaaggatgccttggaggcggaggacgacgtgtcccaggtgcagctcgccttccaaaacaacacgctggagggatccttcataaagaacgacgtcccttattatttttgggccttctttccaaaaggagacctcacaggaccgaagggctttgcgctatcgtcctacagcaacgaagtgagcaccatcgagccgttcctgatcgatgagaagaggataacggccaagtacgtggtgttctgggtctacaagaggctggctgggcaaggcatccttccggtctggaaggaagaggagggggaggaggaggccgcgaagtagtaggttgcgcaggcgcatacgcatacacatacacacacacagggtgctgccgtgaacatacacatgtaacgctgtaaagttcatctgctagtaaaagttcatctgctgtgaacatacacatgtaacacagatacttcagtttcagcagttaaaaacctaccgtcgttattcttctggtgtgagataagaa

SEQ ID NO: 142033 - DNA, 1168 bp, Zea Mays
cagcccgcagccgcaggtgcaggtgccgatcagatagcgtggcgccaaaccactgccgtccaactgaaccagtggacaggagccacccctgcacggctgcactagactacacgagggacccccgtccggtctggccgtctccggtaaaaccagccgcctcatcctctagccgatctccttttttgtcgcctccgtgcgtgccccgggggccttgatcgcgcgcaccggtcagctcagcccgtctgattcgcgtgctgccagccctccgccgatcgtgaaacacaaccgtcggtggtttgcttgcttgatcgctgatcctcgcggacgctcacggtcatggcgcctcagcctttgcgcgctccgaggctgagcgcccccgctggccacgcggcgtgcaggtgctcggccgcgccgctattcgggaagcgggcgccccccgtcgtcgcgttcccccgcgcccgtagcggcggcgccgtcgcctcgtgctcggccgtgcaggagtcgtccacctccaccactgttagcaagaagaaggatgccgcggacggggccaaggaggccacagcggaggcggcgaagccggccgcggccgccaagccaaagaaggccgcggcgctgccgctgccggagatgatgcagcaggagatcatcccaccgctgaaggatgccttggaggcggaggacgacgtgtcccaggtgcagctcgccttccaaaacaacacgctggagggatccttcataaagaacgacgtcccttattatttttgggccttctttccaaaaggagacctcacaggaccgaagggctttgcgctatcgtcctacagcaacgaagtgagcaccatcgagccgttcctgatcgatgagaagaggataacggccaagtacgtggtgttctgggtctacaagaggctggctgggcaaggcatccttccggtctggaaggaagaggagggggaggaggaggccgcgaagtagtaggttgcgcaggcgcatacgcatacacatacacacacacagggtgctgccgtgaacatacacatgtaacgctgtaaagttcatctgctagtaaaagttcatctgctgtgaacatacacatgtaacacagatacttcagtttcagcagttaaaaacctaccgtcgttattcttctggtgtgagataagaa

SEQ ID NO: 142034 - DNA, 1060 bp, Zea Mays
ctttttttattgtcattttattttgttccgtgagcacatcacaccaccatcgacatggcgagtgacgacgggttgaaaaccgaagcaccgaacacacgcgcaccgcaggccgcagcttgtcagttgtccgtatcgccgcccatcgccatgctcgcctacctcctccacggcccagccgccgccatcgccgcggcgcccagcgccttcctcctccgctccctcccgccggcgaagaccccgttcctatcctctctcccgcgcccggtctcgccgaggcgcgctgccgcagccgcgttcgccttcaaccccgctgccgcagcggcccccatcgtggcgtcgctgctcgagggccccgtgctggtctgggccggccggctctgcctctactacgcgctcctccacgtcgggctcgccggctccccgcgcaaccccttcctctctcacgagatcggcggcgaggacggcgccggggatagcgacctagggttctccaagtgggccgagaagctccgtggcggtgcctcaggtgaaaaagatgctcagcataagagaaagctaactagcaaatggaagcccacgaccaaaggcacactgaagagaacctaccgagtacgttcaacggatgaaggaaggcggatcctgaaggagattgcttcagttctgtcccaagatgatcattttgtggatgcttcgtctcacaagggttgccaaattaggagggaaagtgctcatggcgaaagtgtttgctgctacaacgtgagagcgttgttcgatgagcttccaactcctcacttgcttctggagataacaccgtttcctgctggacaacttacggacaacgactaccgtaaggcagagaggcttgagatggtcctgaggctcagcacttctatttaaaaaacctggggactgatttttcaatttcccctaatacttaatttgcccaagttgtaaattgtcttcctatgggcctgtaaattgacgcagttggcaaagaatcacttgaaaacacaagttctggttgcatggattgatccattgagatactttagttcattaa

SEQ ID NO: 142035 - DNA, 1305 bp, Zea Mays
ctttttttattgtcattttattttgttccgtgagcacatcacaccaccatcgacatggcgagtgacgacgggttgaaaaccgaagcaccgaacacacgcgcaccgcaggccgcagcttgtcagttgtccgtatcgccgcccatcgccatgctcgcctacctcctccacggcccagccgccgccatcgccgcggcgcccagcgccttcctcctccgctccctcccgccggcgaagaccccgttcctatcctctctcccgcgcccggtctcgccgaggcgcgctgccgcagccgcgttcgccttcaaccccgctgccgcagcggcccccatcgtggcgtcgctgctcgagggccccgtgctggtctgggccggccggctctgcctctactacgcgctcctccacgtcgggctcgccggctccccgcgcaaccccttcctctctcacgagatcggcggcgaggacggcgccggggatagcgacctagggttctccaagtgggccgagaagctccgtggcggtgcctcaggtttcgtgcagttctctaaattttgtttgcccgattacaattgtttgtttgcttatttatttatgcattcctcggatttgtcgttgatgctctgttcggtggaagtggatgctatgaaagagttatacggttctgcccttcggcatctgtaaggagattctggatgtgaaaaagatatctttttttgcagaatctgattctactgccttgctaggaaggaccatatagtacatgactacatggtggtgaaaaagatgctcagcataagagaaagctaactagcaaatggaagcccacgaccaaaggcacactgaagagaacctaccgagtacgttcaacggatgaaggaaggcggatcctgaaggagattgcttcagttctgtcccaagatgatcattttgtggatgcttcgtctcacaagggttgccaaattaggagggaaagtgctcatggcgaaagtgtttgctgctacaacgtgagagcgttgttcgatgagcttccaactcctcacttgcttctggagataacaccgtttcctgctggacaacttacggacaacgactaccgtaaggcagagaggcttgagatggtcctgaggctcagcacttctatttaaaaaacctggggactgatttttcaatttcccctaatacttaatttgcccaagttgtaaattgtcttcctatgggcctgtaaattgacgcagttggcaaagaatcacttgaaaacacaagttctggttgcatggattgatccattgagatactttagttcattaa

SEQ ID NO: 142036 - DNA, 1131 bp, Zea Mays
gcctgccttctctctcctcacttaaaccctcctccgctcgacgacaccacacgaaaatatacgtcagaataaaccgcagcaaatcttctccggcaccggcagcgcccaaatccggcaatccgctgctccgaatggactcaggttacaatccccggacggtggaggaggtgttccgggacttcaagggccgtcgtgccgggataatccgcgcgctcaccactgatgcggaggatttcttcaagcaatgcgacccggaaaaagaaaacttgtgcctgtatgggtttcctaatgagagctgggaagtaaatttgcctgctgaagaggtgccacctgacctcccagaaccagcattaggcataaactttgcaagagatggaatgcaggaaaaagagtggttgtccatggttgctgcacacagtgatgcatggttactttctgttgcattttacttcggtgctcgattcggtttcaataaaaatgacaggaagcgcctctacagtttgattgatgatcttcccatggcttttgaaattgttagtgggaagagtgaaaccaaggcaccagcaccaccaagcagtagtaaccacagcaatatcaaaccgaagtctaacaacaaaaagaaaccaccggagcctaaggtgaagcagccaaagccgcgtgcccctgcagaggaaggcgaggaggaagatggcagtgcaagcgagggcgagcacggggagacgctgtgcggcgcgtgcaaggaaagctacggccccgacgagttttggatctgctgcgacctctgcgagaagtggttccacggcaagtgcgtcaagatcacggcggccaaggccgagcacatcaagcagtacaagtgcccgtcctgcaccggcggcggtggcgtcagcaacagcggcaccaagcgagcccgcccatcatagctgcgacttttagtgatgtaaactgcttagaaaaactgttgcggacatagcgcccatcatagctgcgactttttaaatggtggtgtaaacttttgtagtgcgactaggccgtttgtcaccctatcatacttggcttcaagtaggttttctgtttttcagttttcattatcatactcgcttgaagtagtgtgaatgaatggcgtaaaatatc

SEQ ID NO: 142037 - DNA, 1241 bp, Zea Mays
gcctgccttctctctcctcacttaaaccctcctccgctcgacgacaccacacgaaaatatacgtcagaataaaccgcagcaaatcttctccggcaccggcagcgcccaaatccggcaatccgctgctccgaatggactcaggttacaatccccggacggtggaggaggtgttccgggacttcaagggccgtcgtgccgggataatccgcgcgctcaccactgatgcggaggatttcttcaagcaatgcgacccgggaagggttggctgcatgcctgcaaagataggagctatatctatatctttcctgctttgtgtatgtaatgtaatggaaggctgctggcagttgaattctgaacccatggtgaaaaagaaaacttgtgcctgtatgggtttcctaatgagagctgggaagtaaatttgcctgctgaagaggtgccacctgacctcccagaaccagcattaggcataaactttgcaagagatggaatgcaggaaaaagagtggttgtccatggttgctgcacacagtgatgcatggttactttctgttgcattttacttcggtgctcgattcggtttcaataaaaatgacaggaagcgcctctacagtttgattgatgatcttcccatggcttttgaaattgttagtgggaagagtgaaaccaaggcaccagcaccaccaagcagtagtaaccacagcaatatcaaaccgaagtctaacaacaaaaagaaaccaccggagcctaaggtgaagcagccaaagccgcgtgcccctgcagaggaaggcgaggaggaagatggcagtgcaagcgagggcgagcacggggagacgctgtgcggcgcgtgcaaggaaagctacggccccgacgagttttggatctgctgcgacctctgcgagaagtggttccacggcaagtgcgtcaagatcacggcggccaaggccgagcacatcaagcagtacaagtgcccgtcctgcaccggcggcggtggcgtcagcaacagcggcaccaagcgagcccgcccatcatagctgcgacttttagtgatgtaaactgcttagaaaaactgttgcggacatagcgcccatcatagctgcgactttttaaatggtggtgtaaacttttgtagtgcgactaggccgtttgtcaccctatcatacttggcttcaagtaggttttctgtttttcagttttcattatcatactcgcttgaagtagtgtgaatgaatggcgtaaaatatc

SEQ ID NO: 142038 - DNA, 1483 bp, Zea Mays
cctcctatgaactccctgtgtcactgtaaccacagtacatagctccgagctatgagaccaactaggcgacgagctatcagactgtgttcaatggttccatctatatttcaccccctatatcccactatcccgccacgtcagcaaccggtctcctcctatgttttcactctctgcagcggttcctcctaaattctctccctatatccaactacctccataaaatatcatttttcatacctatttatcatccattaccaatttttcatccactaccaaacaccaccgtctcaggtcactgtctttctcactgaaaccaccaagccctctacatctttaaccctccccgtcgtcacgctgacctaaccatgatttgcctcaaagccatctcatcccctctccacctcccgaccttccgccgcctcacccccacctcctccctccgcgccgccgccgccatgtcctcctcctcgtccgcggtcgccgccccgatcgagcacttcgtgctcttcaaggcccgcccggaggcggtggcctcgggcgccgcggcggcgatggtctcctcgctgcaggcgctggccacgctcgtcccgggcctggcctacatccacgcaggaccggtgctccgcctccgatccccggccgcggaggcgctgggccccacgcacctcctccacacccgctacgccaccaaggaggacctggcgtcctacgcggcgcacccggcgcacgtggccgccgtgcaggggcacgtcctccccaacgcgctcgacatcaccgccgtcgactgggtcaacgccgcgccgctcccgtcccccgtggcccccggcagcgccgtgcgcctcacgctggcgaaggtgaaggaaggggtggaggtcgcgcagctcgtggagaaggtggccgcggcgacccaggccgccggggacgccaaggtgagcttcggggagaacttttccccggcgcgggccaaggggtaccagttcgggatggtggcggtgttcgacagcgtggaggagctggacgccgtggaaggggacggcaaggtggaggaggccaaggccttggtcaggccgctgctggacgaggtgatggtcctggacttcgtcgtcggagatgctccaacgcccgcgagcctctgattacaggctgcagggtctcactttcgggattctgagtgtgttgttgatgtcggaataatggatagatggactccctggtcctggtcctgcagcttttcaacttgtgatttgtgaaattgggaatgacagtgcaatgaataagaattgcttccctcgattaaggatctgttcggcacatctccgtctctttaatcttaggttagcctagtcaagacgcatggcacattcgtcaatctttcacttgactagcacaagtgcactcatccaactataaacgatgttctgccatgccatttcatttgattgtatttgtatatatggttacgtgaaaattaaacaaccattgt

SEQ ID NO: 142039 - DNA, 946 bp, Zea Mays
gcgagggcgtcagccgcagcccgcaggggcgctagcagacgagcagagcaggctagcagcactgcagcagcaccgcagcggcgcagcgcagtccgcagccggccagccgcagcggcgcagcgcagtccgcagccggccagccgcagcccgcaggcaggggcggtaggcgcgccgcgcgcgtagccgccaggcgccaccgcgccaggggcagggcacgagcagcgggcagcggccagccggccaccggccaggccagcgacgcgcacgcgccgacgcccactccactcgaccactcgcccaggcccagtgaccagccgccagcgtgctgtactgctgtttcactgttccagttccaggcttccaggtttcaggccagcgtgaggagagtggagatcatcccgatgatgatgcgaggtggaaggctcacgggtttgacctctcaggttctgaggtgcttcagcacggagatatttgtcagcagattatcattctatacgacagaggaagaattcaaagatattttttcaccatttggcaccgtagaggaagctcgacttatgagagaccaccaaactggaaggatgaagggatttggttttgtcaaatattcatcgcaagcagaggcagagaaagctgtcaaggcaatggatggcaagattctacgtggaagattgatctttgtggagatggcaaaaggacacgaaagcaagtaggacaccctccccacgagaggatttcactgaacatgaaacatgagagcgccatcagcttatgccagatggcaaatatcccaaattctcaattgatgttgcaacttatatacaaagcacaagttaattttagctagcttatctttgataacactgctaccttgccatctgaaaggttgccgtgcattggtatccgttgacctgtgtaagaaatgttggcagctctgtgccctacg

SEQ ID NO: 142040 - DNA, 501 bp, Zea Mays
acttctgcgtatgcacgagtatttcgtgtgcaccgaatattgggatttgggaggacaggcgcccgcactccgcctccgcttccctccgcctcgactctcgaccgcatctgagcactccgccggaggtccgcctccgcaggcaccgccacgccatgtcgaagccagcggatcagcagccgtcggacatgcaggtcgactcctccgtcgccgaggagaagccggccatcagattctccatcaacgtgcttgagctcatgagggaggcgcagatgcagcatggtctccgccagagcgactacacgcggtaccggtgcgttgtgtcacgcgctgtccactcgatcctgcgcgacccctccaccagatctgcgcgtctagttcgattattagtctcctttccgtcttatcggctgctgtgatctaaaatttgatttgggacggagtgtttccttaccgaattgctgtactgcgatccaattctacacatttgtacctgtatcccgc

SEQ ID NO: 142041 - DNA, 2241 bp, Zea Mays
acttctgcgtatgcacgagtatttcgtgtgcaccgaatattgggatttgggaggacaggcgcccgcactccgcctccgcttccctccgcctcgactctcgaccgcatctgagcactccgccggaggtccgcctccgcaggcaccgccacgccatgtcgaagccagcggatcagcagccgtcggacatgcaggtcgactcctccgtcgccgaggagaagccggccatcagattctccatcaacgtgcttgagctcatgagggaggcgcagatgcagcatggtctccgccagagcgactacacgcggtaccggagatactgctctgcacgactcagaaggctgtacaagtctctcaagtttttgcatggccgaggtaaatacaacagaaggaatataaccgagtcaacagtcacggatgtgagtgttttatatggccgagcgagcatggagtcatgccatggagaagaaaactgctggtacaaacgcaaaacaacgcatctacatgttgggtcgatttcggaaagcagttaaatgggcatcacttttttcacaattatgttctgtaaaaggagattccaggacatctctagaagctgaggcatatgcttcatatatgaagggtgctttgttttttgagcaagacaagaatatagatgccgcaatgataaatttcaagaatacgagggctatatatgaggagcttgggaagtatggcagtatagaaaatcaacttttatgccgtcagcgcatcgacgaagtggagcctatgattgatttctgttcacataaactaggtggatcatatttgcaagcacatgaactcctggatactgctaatgatcttctcaaggcgaagatggaggctgtattgtctgagacaagatcacagcaggcagcttccatgactgagtttaaatggcttggtcgcacttttcctattacaaatgcaaagacccgtgtctctattttgaaagcccagcagcttgagagagacttgagtgctgcagccacagaatcagttgctgctgacaaaaagcttgctatatttgataaaatattttctgcataccatgatgctcggagctgcatccgcaatgacctggcttctgctggcaatgctgaggatataaaagatgacctgaatggtcttgacaaggctgttagtgctgttctaggattgagaactatagaacgtaaccagttacttgttagcattggtaaaagtaaattcacaaagcatcgagatgaaaaaaatgagcgaaccacaaagccagaagaacttgttcggctatatgatctgcttattcagaatgtaacggacttgacagatttagttagctctggaagaaacaaaaatgaagaagaaaactcttttattcatgagtatgagctgaaaggcttggctttccgagctgagagatgtttctttttggctaagtcatatagttcagcaggcaaaagagctgaagcatatgcattattctgccatgcccatactctcactggttctgcactgcaacagcattcaaacagtcatgacaaggctttaatacaagatctggagtttctatctaacaactgtagatcaaatagctgcatagaacatgcaacaggcattatggaggaggagattgttcctttaaaactttctaaaggagtctcaactatgtcacttgctgataataaaacaaaggagaacaagtatctccttgatatgctagagagctatgaatcagcgattggtgagccgaacaccaaagctccatgtcgcattgctcaattcccacctcctttccaagcagttccatgcaatcctattgtgcttgacatggcttacaactcagttgagttcccaaaccttgagaaccgtatgaaaaaagaaaagaagggtcttctgagcaggttctggggttgaaagatggcatatgcctaggattttggtacattgtcccatcatttgatatgctttgtgcatgaacggtgtaaaactagaatgtcctgataatacctctctgatgggtgaaagatcttcagtattccgcccaaggatttttgagattctttatcagaaggttaatttagccgttgcaaagtacatctagctcggtgactgatcagcataaccttttgctgttactaaattttgagcaatgactgatttcttggattatcgatatttaagttgattcattttcatatcccaaagtaggcagggaacaataatgaaaatgttttcaatatt

SEQ ID NO: 142042 - DNA, 2255 bp, Zea Mays
acttctgcgtatgcacgagtatttcgtgtgcaccgaatattgggatttgggaggacaggcgcccgcactccgcctccgcttccctccgcctcgactctcgaccgcatctgagcactccgccggaggtccgcctccgcaggcaccgccacgccatgtcgaagccagcggatcagcagccgtcggacatgcaggtcgactcctccgtcgccgaggagaagccggccatcagattctccatcaacgtgcttgagctcatgagggaggcgcagatgcagcatggtctccgccagagcgactacacgcggtaccggagatactgctctgcacgactcagaaggctgtacaagtctctcaagtttttgcatggccgaggtaaatacaacagaaggaatataaccgagtcaacagtcacggatgtgaggtttctccatgtagtgttttatatggccgagcgagcatggagtcatgccatggagaagaaaactgctggtacaaacgcaaaacaacgcatctacatgttgggtcgatttcggaaagcagttaaatgggcatcacttttttcacaattatgttctgtaaaaggagattccaggacatctctagaagctgaggcatatgcttcatatatgaagggtgctttgttttttgagcaagacaagaatatagatgccgcaatgataaatttcaagaatacgagggctatatatgaggagcttgggaagtatggcagtatagaaaatcaacttttatgccgtcagcgcatcgacgaagtggagcctatgattgatttctgttcacataaactaggtggatcatatttgcaagcacatgaactcctggatactgctaatgatcttctcaaggcgaagatggaggctgtattgtctgagacaagatcacagcaggcagcttccatgactgagtttaaatggcttggtcgcacttttcctattacaaatgcaaagacccgtgtctctattttgaaagcccagcagcttgagagagacttgagtgctgcagccacagaatcagttgctgctgacaaaaagcttgctatatttgataaaatattttctgcataccatgatgctcggagctgcatccgcaatgacctggcttctgctggcaatgctgaggatataaaagatgacctgaatggtcttgacaaggctgttagtgctgttctaggattgagaactatagaacgtaaccagttacttgttagcattggtaaaagtaaattcacaaagcatcgagatgaaaaaaatgagcgaaccacaaagccagaagaacttgttcggctatatgatctgcttattcagaatgtaacggacttgacagatttagttagctctggaagaaacaaaaatgaagaagaaaactcttttattcatgagtatgagctgaaaggcttggctttccgagctgagagatgtttctttttggctaagtcatatagttcagcaggcaaaagagctgaagcatatgcattattctgccatgcccatactctcactggttctgcactgcaacagcattcaaacagtcatgacaaggctttaatacaagatctggagtttctatctaacaactgtagatcaaatagctgcatagaacatgcaacaggcattatggaggaggagattgttcctttaaaactttctaaaggagtctcaactatgtcacttgctgataataaaacaaaggagaacaagtatctccttgatatgctagagagctatgaatcagcgattggtgagccgaacaccaaagctccatgtcgcattgctcaattcccacctcctttccaagcagttccatgcaatcctattgtgcttgacatggcttacaactcagttgagttcccaaaccttgagaaccgtatgaaaaaagaaaagaagggtcttctgagcaggttctggggttgaaagatggcatatgcctaggattttggtacattgtcccatcatttgatatgctttgtgcatgaacggtgtaaaactagaatgtcctgataatacctctctgatgggtgaaagatcttcagtattccgcccaaggatttttgagattctttatcagaaggttaatttagccgttgcaaagtacatctagctcggtgactgatcagcataaccttttgctgttactaaattttgagcaatgactgatttcttggattatcgatatttaagttgattcattttcatatcccaaagtaggcagggaacaataatgaaaatgttttcaatatt

SEQ ID NO: 142043 - DNA, 2416 bp, Zea Mays
acttctgcgtatgcacgagtatttcgtgtgcaccgaatattgggatttgggaggacaggcgcccgcactccgcctccgcttccctccgcctcgactctcgaccgcatctgagcactccgccggaggtccgcctccgcaggcaccgccacgccatgtcgaagccagcggatcagcagccgtcggacatgcaggtcgactcctccgtcgccgaggagaagccggccatcagattctccatcaacgtgcttgagctcatgagggaggcgcagatgcagcatggtctccgccagagcgactacacgcggtaccggagatactgctctgcacgactcagaaggctgtacaagtctctcaagtttttgcatggccgaggtaaatacaacagaaggaatataaccgagtcaacagtcacggatgtgaggtgtggtctcttctgctgataatatgctatatagcatgttgcttgtcttcatatttctctttgcagtgttatataaaccttgtctgatgtttggagttggactattacaatttgtttaaacctggagaagacttatgaagcaatttaacatgtgggagtaggtttctccatgtagtgttttatatggccgagcgagcatggagtcatgccatggagaagaaaactgctggtacaaacgcaaaacaacgcatctacatgttgggtcgatttcggaaagcagttaaatgggcatcacttttttcacaattatgttctgtaaaaggagattccaggacatctctagaagctgaggcatatgcttcatatatgaagggtgctttgttttttgagcaagacaagaatatagatgccgcaatgataaatttcaagaatacgagggctatatatgaggagcttgggaagtatggcagtatagaaaatcaacttttatgccgtcagcgcatcgacgaagtggagcctatgattgatttctgttcacataaactaggtggatcatatttgcaagcacatgaactcctggatactgctaatgatcttctcaaggcgaagatggaggctgtattgtctgagacaagatcacagcaggcagcttccatgactgagtttaaatggcttggtcgcacttttcctattacaaatgcaaagacccgtgtctctattttgaaagcccagcagcttgagagagacttgagtgctgcagccacagaatcagttgctgctgacaaaaagcttgctatatttgataaaatattttctgcataccatgatgctcggagctgcatccgcaatgacctggcttctgctggcaatgctgaggatataaaagatgacctgaatggtcttgacaaggctgttagtgctgttctaggattgagaactatagaacgtaaccagttacttgttagcattggtaaaagtaaattcacaaagcatcgagatgaaaaaaatgagcgaaccacaaagccagaagaacttgttcggctatatgatctgcttattcagaatgtaacggacttgacagatttagttagctctggaagaaacaaaaatgaagaagaaaactcttttattcatgagtatgagctgaaaggcttggctttccgagctgagagatgtttctttttggctaagtcatatagttcagcaggcaaaagagctgaagcatatgcattattctgccatgcccatactctcactggttctgcactgcaacagcattcaaacagtcatgacaaggctttaatacaagatctggagtttctatctaacaactgtagatcaaatagctgcatagaacatgcaacaggcattatggaggaggagattgttcctttaaaactttctaaaggagtctcaactatgtcacttgctgataataaaacaaaggagaacaagtatctccttgatatgctagagagctatgaatcagcgattggtgagccgaacaccaaagctccatgtcgcattgctcaattcccacctcctttccaagcagttccatgcaatcctattgtgcttgacatggcttacaactcagttgagttcccaaaccttgagaaccgtatgaaaaaagaaaagaagggtcttctgagcaggttctggggttgaaagatggcatatgcctaggattttggtacattgtcccatcatttgatatgctttgtgcatgaacggtgtaaaactagaatgtcctgataatacctctctgatgggtgaaagatcttcagtattccgcccaaggatttttgagattctttatcagaaggttaatttagccgttgcaaagtacatctagctcggtgactgatcagcataaccttttgctgttactaaattttgagcaatgactgatttcttggattatcgatatttaagttgattcattttcatatcccaaagtaggcagggaacaataatgaaaatgttttcaatatt

SEQ ID NO: 142044 - DNA, 158 bp, Zea Mays
aactttgttcccaaacagggccttagatgcaacgaaccaaatacacctataatcaatgcatgtgaagagtcggccctcctaatgggggcaaccaaacacacggtaagagaatgtggcagtacaattgcaatcaagattattacttaaacgagtttcag

SEQ ID NO: 142045 - DNA, 3691 bp, Zea Mays
ctcgtatattaaccccgcctctgcctctcttcccctctttccccccgtctccgcctccctcccaccgccccacggccccaccagattcctccgcaccgccatggacgacctcgagcaggcaatactgctggcctccgactctcccgccgccgccgcggcgtccccgtccgtccgcgcggaggctctcgccttctgcgcccgcgcccgcgacgagtcgccgccgtcgtcgctcctccgcctgtgcctctccggcatcgcctcctccccgcacgcgcaggtccacttctggtgcctccagtccctccacgacttgctcctccgccgccgcctcgtgctccccgacgacctcgcgctgctccgatcctctctcctatcgctggcggtttcctctcacgccgcgtcgccgcctttcctccgcaacaagctcgcgcagcttgtcgcgctcctcgtccgcctcgactacccccatgtctacccttcctacttcctggacctcctcccgcccgcgccgccgcagcccggccccacggacatgttcgcgcgggttctaatctccctcgacgacgacctgctctcccaggagtacccccgcagttctgaagaggccgccgacgctatgcgggtgaaggattccatgcgcgtgcagtgcgtgtcccagatcgccagccactggcacaccgccgccgtgaccctccgtacagccgaccctgcggttgcggcagtggcccttgacgcggcgcgcaggtgcatttcgtggatcgatgtcggactggtcgccaatgatgtgttcgttcctcttctctttgacattgccatgtcccctgcaagcatgcctccgcttgctgctgcagcggtggggtgcctttctgctgtggcaacaaagaggatggatttcagggcgaaggtgggattgttgaggtcactcctggctgcacatcaggggcttggtagcccagacagtggggtgaagatggcacccttggtgacaacatatgcagccgaggctctggaatgtcatcgcaggcttggccctactgatgctgatggagctgcagcgttggagatgctggaagaggtgctaccagctgtatttgcagctgcagagagcggtaacgatgaagatgtggattctggttccgtgcttgagttcttatctggctatgtgagcataatgaaggcaccgtctgagaagcagttggcgcacttgggacggatcttggatctggtgcgggtgcagatgtcatttgatccagtatatagggggcaccttgacgtgcttgacaagatagggaaggaggaggaggacctcatggcggagcaacgaaaagatttgattgtattgttccggagcatttgtcgtgtcgcaccagctgccgctcagctgttcataagagggctgattatgacagctctctcgtctgcagaagctagtgtggaggatgttgaggttgctcttaccctgttcttccggcttggagaagctgtgggtgaagaggagattcggagtggggcagggctcctaggagagcttgtgcccatgctcctttcagcgaggttcttgtgtcacacacatcgcttagttgcattggtgtatctggagacagttacccgctacatgaagtttgtacaggagcatgtgcagtatgtaccacacctgcttggtgtgttcttggataaccgtggaatacaccatcagaatgcccacgtgagccgtcgtgcaggatacttattcatgagggcagtcaagtcattgaaggcaaatctagtgccttacctggataccatattgcagagtctgcaagatgtactaagtcaattcacttctatggattgggcaaacaaagatactaagttccccagctccgaggatggcagccaaatttttgaggctgttggattattgattggcattgaagaggtatcaccagagaagcaggctcaatgcttgactgctcttctaaatcctctctgtcaccagattgagtcacttgttatggatgccaaagcacgagggcttgaggaatcattaccaagagctattagtcttcaacaaatcattgttgcattgaatatggtcagcaagggctttaatgagcgccttgtgatggtaaataggccagctattggggtcatgttcaagaaaacccttgatgtagttttgcaagtccttgtttcatttcctagtgtaagacctctgcgatctaaggtgatatcgtttctgcatcgtatgatcgagatattaggtatctcagtgcttccatgtattccaatcgcactgagacaattgcttcttgataacgaggctaaggatatggtggaatttctcgtattggtaaatcaaataatctgcaaatttaaatcgtcagctagcgccatattggaggaagtcttccctactattgcaagtcatttgtctgtgatattatcacaagatgcattttcagctggtcttgcaagcaatactgaggaaatgcgagaactacaagagttgcagaggacattatacatattcttgcatgccatggcaacacatgatctttctacagttctccttacttctagctctaggcagtatctggagaccataatgcaattgcttttatttacctcatgcaaacataaggatatactgctacgcaaggtcaggatttttgtttaacttgattttttatcttcttttcaatccatctgcattatcgaactcgataataagttacctgtggatgccatttacgtggttcttcattgtttcttaggcatgtgttcagattttcgtgaatcttgtaaaagactggtgctctaactctgaagataaggttcctggcttccgagtatttatgattgagaagtttgctactaattgctgtttatacagtgtacttgataaatcatttgatttacgcgatgcaaactcgcttgtcctttttggtgaaattgtgctggcccagaagattatgtatgaaagatttggggaggaattcattatgaactttgtagctaaaggtcttcctgaagttcactgcccaccggacctagctgaacagtactaccagaagttaaagggaaatgatatcaaggcattcaggtcattttatcaatcacttgttgagaagataagaccacaaggaaatgggagtcttgttttcagatagcatcattctttgattttcaatatgtcttccaccaaaagactcctcaactgtgttattcaattataggctagttgtgccatcaatgtacatagagctataatttctgagattggaagacgtattactgcggcattatctttaccaagtttggcaaccatggtggcgtccttattcattatattctatctgagatgcaggggaattcatcccacaatagtttctactttctactaagaaggaaatacatggttctactttctcatcttggcctttctccccaaatcggactgttctgctgtctgggcctgaaattttgcatggtatttcctgtgaactagttgtgtataggggcaaaaagagtgtcgtgtaggctgtgttttttcctgatgaaaaatgtcgcaccgcctgttgtgttatgagtcgggttgtaccaaattttgcgaaacggcagcggttttttgcaccccccctgttgccatctggggtgatgtacatatttttttttggcattccccattttatttcataaattcttttat

SEQ ID NO: 142046 - DNA, 1584 bp, Zea Mays
gacaatctaccccaccacacacacacatcctcctctcaactcaagcagactcggatcaccccaccttatcgcgcgcgaagcctttctccctttgtctccactcccgaccgcgatcgcgcgcgcggcgttcgtggccacagacccagcaagccttgcactcgttgcaccaccagccggcggcgaccgcgcgatgagggccaggaaggcgaagacggcgacgtcgtcgtcgttttggaggtcgctcctgggcggctgcctcggcggaggcggcggcggagggcgggcggcgggggacaggcagcggaaggtgcggccgggcggcgggggcgggcggctgtcgttcacggacctgagcggcgccgcggaccaggacctgtcggcgtcgctggtgggctccaacctgcacgtgttcagcgtggcggagctgcgcgaggccacgcgcggcttcgtctccggcaacttcctcggcgagggcggcttcggccccgtctacaggggcttcgtcgccgacggcgccaagaaggggctcaaggcgcaggccatcgccgtcaagctctgggaccccgagggcgcccaggggcacaaggagtggctggcggaggtgatcttcctggggcagctgcggcatcccaacctggtgaagctggtgggctactgctgcgaggacgagcaccgcctgctcgtctacgagtacatggagcacggcagcctggagaaccacctcttcaaacagattcctgccgtgctgccctggtcgacccgactaaacattgcagtaggcgccgccaagggtttggcgttcctccacgacgccgagaagccggtcatctaccgtgacttcaaggcctccaacatcttgctcgactcggactacaaggccaagctgtcagacttcgggctggccaaggacgggccggagggcgacgacacgcacgtgtcgacgcgcgtgatggggacgcacggctacgcggcgccggagtacatcatgacgggccacctcacggccaagagcgacgtgtacagcttcggcgtggtgctgctggagatcctcacgggccgccggtccgtcgacaagacccgccccagccgggagcagaacctggtggactacgcgcggccgtgcctcaaggacccgctcaggctgggccggatcatggacccggccatggagggccagtactcgccgcgggcggcccagagcgcggcgctggtcgcgtaccggtgcctcagcgccagccccaagaaccggccggacatgtccgccgtcgtccgggcgctggagccgctgctcgacctccacgacgacgtgcccgtggcgcccctgggccacgccggccccgtcgtgctgttcgtagcggccgccgccgaggaggagaagaaggagcgggccccgaggaaggacgtccacgtccaccggcgcaggcccatgtcgcccaaggcgagccccaggaagcgccccggcaccggcgccggcaccaaggaggagttctgggtgtggcatctgccggtgccggccgaccataagacacgtccgaccttgggcggcggcgttgtgcaagcgtgtgcgtgagccaaggtgctatt

SEQ ID NO: 142047 - DNA, 611 bp, Zea Mays
gcagtccacacccacacagagacacgtcggagacgtacaccggcacacaaacacacacactgcacgctcaggcctgccgcctgcgcacacgctgcgatcgaaatggttggtgccagcgctagaccatctgcaggccgggacgggggcccggagacggcgctcccgaagctgcagctgctgccatgttggcttgacggagcggtagtgaagctcgtcgcggccgatggcgacggtgacgacctcctcgccggttcagcgtcgtcagggaagcggcggccgacggcgcaggctgccgctggccttgcgcgcggcgtgaaggcgttgctgagcgaggtggccgagatgatcaggaccaagttcgggcgctcgatcccggcggccaagttcggccatgtcgcctacatcagatgaagccttcctgttgtgcctgatcttggcgcgcgtcgcgtcctcgtgctctgctctccttgacgtgatgacgtcagtggcctccctgccagtttcggcacggatacgctgctgtggtagcttccttaactttctctactctgcttccagcactgcagatatgtatatctggtggcttttgatctagcagtgattactgcagc

SEQ ID NO: 142048 - DNA, 262 bp, Zea Mays
atcagaattcacaaaatcataccatagcatttgtatttattatacagtggtttccaagcaacaaattaaccagtaaaagagagtaattctgcgcaattaaaaatccatggatgctgctacaaaggggaacaaaaatctctacacagtaactccatcctcatttgatcttgctctatttcagtgcatcttgggaacacaatcagcaccacagatgactgaattagtgataaccaggggcaggctggagcatggtgtaccgtga

SEQ ID NO: 142049 - DNA, 1079 bp, Zea Mays
atatgcaggtttctgaggttgtcaagttttcatttcaaagcaaatccagctggacagcaccaggtcacaagcaggttttttcaactttatctaattttgctgggcatctcacttcaaaggaagatgtttttcttttcgagattattggagaccaacttaccgagtggctctctttaagcatcatattgtactctgaaatgcaacaaggacaaattattgttcatcttgagaacctttggctcaagatgaagcagcgacttcttcaagctgcactcaatcacccacaccgccccatttcagttgcaacagcatcagtttgcagagtagcaacacatggcaacacaaccctgcaccctggtcgcttaatttctggatttgatgagttattaatgcatagaagaaaggctcgtgatagctccaggaaaacagtcatcacatccaatcctactgatctcacagtcgagaggtatgatggatctgtgaatgtctcagtgggtttggggaggaagaggctgaagatcatgaagtattcaactaaaccaaaggaactcaacaaaaatagagccaacatgggcatctcaccagaggaagacatagttaccttaccaccatgcatccaattaatcacgaagagagatcgatgtgctaaactcatgcttccgaccgatccatatacgtgccctggagacctgacgctgatgagcggcgcggagctgttcatgcgggaggacgtggggctcaccgacggcgaggtcgaggtgctggcggggtccatgaacgtgttcatgctcgcgtccatcctcgccgccggctgggtggccgaccacctgggccgccgccgcaccctcgtgctcgccaacgccttcctcatggccggcgcgctcgccatgtcgctcggcaccagcttcgccgcgctcatggcggcgcgcttcgtcaccagcgtcggctccgggttcgcccgccggagactggggacggacgcagacgaggagggggcgggggaggaggcggtggtggaaggggaggtccagacgatgagggccacggacgcgagcgtctggttgcatcgaattcaataa

SEQ ID NO: 142050 - DNA, 325 bp, Zea Mays
aggcatttcataaggccccttactaaggatcaaatggaggcaattatggagttggcaattcagggaaaggagaaagaagggaccaagaagaagggcagaaaggtggcacctctcaaggctcctttcatagaggctgctgagaggatctgagtgatgtttttagatcttgtgtgggtcggtctggtgcagaatgttatctcgcatgtgtaatagtctgtgggtcacccaactacttttgatgactgctttgggtagcaggttgtgggattgtcagcagtgttttttcttttggcttgctctgtcggtgtttctgtctgtcattatt

SEQ ID NO: 142051 - DNA, 2877 bp, Zea Mays
aggggcagtttcatcaatccacatctcgcccttcgcctgccttccttcacccggacgcagcagcggccaaccaaataaaaacacgccgcgccgccccgacgcggcgcgctccgtcttcctctctccccgatccctgcgacgggcgacgcggccttgccttccacatcaaaaccaacctgaccgccacagccgccgcgtcctcgtcctcttcctctgccatcctcccggcatcgcccttcgggatcaccgcgtcggaaccctaccggatcaccattcgttcgcgcgcgccccgccccgccatggaggacttcgcgcgcgcggtggaggacggactcaagctctcgaagaggctcgtgctcccgggaggggtgccgccgccgcgcccgccggcggggatggagcgcaccgtgtcggccgcctcggcgtcgggtcccgacccgcggctgctccctaccgcgccgatggcctacgcgctcgtcaccgacccggccgccgtcgacacccccgacgtgcccagctaccagccctacgtctacggcgacctcgacccgcccgcgctcatcccgctgcagatgaaggaggtcgacctggccgtcgactgcgcgctcgacgccgcgcacgtcaccctgcgcgcgcgctggtggctgcactgcatcacgcgaagccgcgactccgacgtgcgcctcgtcgtgcccttgggcgagcagggttcaattctaggcgctgaggttactgttggaagaagatcatataatacccaagtaatcgaagtagaagaccacactttggagaaacatgcaaaaattgagagtggtggccttttgcagccacatctgtttttcttgacaatacctcaggttgagggaggagcagatatttgtgctacatttcaatggtctcagaagttactttatgatagcgggcgtttctctgttgacatacctttccgttttccgtactttgtgaatccattaccaaaagtgttcatgaagaaggaaaaaattcagttgactgtgcacagtggtttcagtaaagagattttgctgcaaggaacaagccacccgttgaaggaaaagagtaggcaaggagataaattgtttttccatcatgaagccattgttgagaattggtcgatcaaagatttcaatttttcatacaatgtttactcgggtgatttgtctggtggtgtgcttgtgcaaccagcaacattatgtgactatgatgatagagatatgttctgcatttttcttctacctggaagtggcaacagaaaggtatttggaaaagcagttgtgtttattgttgacacaagtggaagcatgcaaggaaagcctcttgagaatgtcaagcatgcagtttctactgctctttcagagcttgtggaaggggattatttcaacattataacatttaatgatgagcttcactcattctcttcctgtttagagcaagtaaatgacaaagcaatagcaagcgcaactgagtggatgaatgcaaactttgttgctgagggtggtacagatattatgcatcctttgagtgaggcaatggcattactatcaagtgttcatgacacacttccacaaatatatcttatcacggatggttctgttgatgatgagcataacatctgccgaactacaaaaactgatctctccaacagagggtctaggtctcctcgaatttctacttttggactaggatcgtattgcaaccactatttcctgcgcatgttagcttcaattggcaagggacattatgatgctgcacttgggacagcatcaatcgagaatcagattcttaaatggttcaggagagcgtcgagtacaattgtggcaaatatctccattgatgctttgacacatcttgatgaattcgaagtggattctgagtacattccagacctttcagcgaactctcctttgtgtgtatctggaaaatacaaaggaaaattcccggacacaattaaagctaaaggttacttagctgacatgaaggagatctcggttgaactgaaggtccaacaactaaaggaaatacctcttgacaaagtattggtgatacaacagattgattttatgacatcaaaggcatggatgtctgcagataaacaagtggagagaaaggtgattaaattaagtacacaaaatggtgttccgtcggagtacacagatatgatctttcttcaaacaaatctggataaagtagaaggaacacaaaaggtcaagcaaaaactgaaaggacacaaaggcagagatgagcaacagatttatggcctgaaactgggattcggtaacaaagatgctacacgggaaaatctcatcacaggatttggagacatgaatccggcagagaaatctgtgatgctccaaaagggatcgggctgttgcagccgcgtcgcagactgcctctgctgcatgtgctgcatcaaggcgtgcaacaggatgaacgaccagtgcgccgttctgatggcacagatctgcgcggctctagcgtgcctcggctgctacgagtgttgtgcagaggtgtgctgtggagggtcggagtcgtagtaggaagtgttttgtatatttgtatggaagattggagaattggagtgtacataatagagttcgcggaagcccggttctggcccggctcttggttgtatccgtccaaacgttctataatttgctcgttacatgcaatgcaaaagagggatggcacacttgagtagtattttgctgttgtgcagtgcaaacgagggatgtatctgctggcagttcgtgtgcttggagtcggaggtgatataaaataacagttatcattagatctagatcggatgtaccagatcgtttgattgcatgcttgcatcaggataagtgattgcataggata

SEQ ID NO: 142052 - DNA, 288 bp, Zea Mays
atatttggatacacaaatgacttatgcattgctttgcaaaggagagagcaagatattgtgaatgcaatggatcttcttgagttcactatggtggaattgagtgttttgagagaaaatcatggatgaaatgaatttctttgaaaggtctattctttttgtgaaaaccacaaagttaaattggttgatatggatgggaagtacaaacctatataaagagataagaagttctataaaaatgccattaattaccaccagtttcatgctgatatgtttttgggtgtaattgat

SEQ ID NO: 142053 - DNA, 447 bp, Zea Mays
atgaggagtttgttcccggtactccctgtggcagtcctcaacgctgtgttcgtgtactggatcttcagctcgttgtcgaagacgctgaacaagctcaaggtgaggatcaacactgttttggccttccatttcggctttttatttcttcagtatgaaaaagcaacttttgatgtttgcagtcgaaaaaagaatgacgacgaagctggagatgtatcggaggttgaacaacgccttgatcatcgcggtggccatagcgcggcgaggtacgcctacctggatgacgaggaccgtgacatggaggacacgcggccgctgattaggcccggcccgctgtcgtatgtggacaaccgggcgatctctgtgtccaaggacaccaccaccatcatcttgagaaccgactcccgcgtgtacgcgaaagccgccgacgatggaggcaagtgggtgtag

SEQ ID NO: 142054 - DNA, 295 bp, Zea Mays
gatttaacaatgtctacttcgaacaataataatattaataccaggttacttggacgaggtaacatgaccaagcccaaatgaaaatttacatagtattgttggggtgcgccaggcccgggctgtagtgcaacgcccgagcgacacgtgaagactccagtagcaagctactgtggtgagtcttcccccacaaaaaataaatttaatatcgaagtgaacacatggtccacatatcagatattaaactgataagaacagatactacacttgatcttagccaaaaggccgagaaaggtat

SEQ ID NO: 142055 - DNA, 980 bp, Zea Mays
agcgaatacgaggataaacaatttcgagcaatccgttcccgtgggtttttagtcgcggcctcacgggatttgggtggaaaccgcggggggtcctttataagcgcgtgggcgcgcggcgtgctcacacgagcccccccgcgttcacgagccagaagagaagagaggctaaccaccgcagcggctgcgacctgcgagtgcgacaacctccgcggaggagttggagccggcggcggggatatttgcttgcccggctggggttgcggcggaaggagggagagacaatcggcgatggcggcgtccgcgaggcccggggagagggcgaccagcttcgccgtcgcgtgcagcctcctcagccgcttcgtccgccagaacggcgtcgcggctgccgacctaggcctcaggatcaaaggtgagcggcggaatccggcggcggccttgtcgaggccgggctccttctgctcggtggtgggaggatttcgaaatccgggagggtgtgtggggggtccagtttcgtttccagtggggagcgtgttgtgctggtgtgagatctgggcggggcctttgttatccggtttgaaaccacgttttcgggcttcgaattttacggtcccttatccagatgttttgttttgttttgttcccgttctcaggcgaggtcgagcagcagaggacgccggcgacaactaactcgctccccggagcggagggcgaggaggtcgaaaggaggaaggagaccatggagctgttcccgcagagcgtcgggttcagcatcaaggatgctgctgcccctaggtgcgtaccactgctgcttcacatcatctaaatccatttcgattttggtttgcgcaacagttgttacgtagtagcacagcagaactcaagcctagctgtcgtaggtctcctggacaaaaggccaagcaatttgactttgtaacatagagatctgagtttaatgagtgtttataggtggaacatgtggt

SEQ ID NO: 142056 - DNA, 1421 bp, Zea Mays
agcgaatacgaggataaacaatttcgagcaatccgttcccgtgggtttttagtcgcggcctcacgggatttgggtggaaaccgcggggggtcctttataagcgcgtgggcgcgcggcgtgctcacacgagcccccccgcgttcacgagccagaagagaagagaggctaaccaccgcagcggctgcgacctgcgagtgcgacaacctccgcggaggagttggagccggcggcggggatatttgcttgcccggctggggttgcggcggaaggagggagagacaatcggcgatggcggcgtccgcgaggcccggggagagggcgaccagcttcgccgtcgcgtgcagcctcctcagccgcttcgtccgccagaacggcgtcgcggctgccgacctaggcctcaggatcaaaggcgaggtcgagcagcagaggacgccggcgacaactaactcgctccccggagcggagggcgaggaggtcgaaaggaggaaggagaccatggagctgttcccgcagagcgtcgggttcagcatcaaggatgctgctgcccctagggaggagcaaggagataaagagaagcctaagcagctcacaatcttctatggcgggaaggtgctggtatttgacgatttccccgccgacaaggcaaaggatctgatgcagctggccagcaagggcagcccagtggtacagaacgttgctttgcctcaaccctctgcagcagctgctgtcactactgacaaggccgtgctggacccggtcatcagcttggccgctgctaagaagcctgctcgcacaaatgcttctgatatgcctattatgaggaaggcttctcttcaccgcttccttgagaagagaaaagatcgcctcaatgcaaagacaccatatcaaactgctccttcagatgccgcaccagtcaagaaggagcctgagagccagccatggctcggattaggaccgaatgccgtggattccagcctgaacctcagctagtacacaacaacacagccataataagacggcacagcaacggcacccaccatgacctggaatttgctttgccactagatcgagttcagaaaccataaatattcttagttatcgtgttttagtgttcgcttatgtcgtggttctacgccctcttgtcgcatagttctggatgtaaagaaaagtagccagtcatgaccatcaccgggagtcggggagaagtttttggagggtgttaacacacggcgactctgaattggccatgctaaggaaaaggatagtgcaatgtgaggtatatgtattttctgaaagccagatcgtttgggtctagccctgatgtatgcagaacaagtgattattgtaatggatcctgattatcctcatcatcctattgttgttttctgatcacatggcttcaccaacccaagtttgtttgg

SEQ ID NO: 142057 - DNA, 2100 bp, Zea Mays
tggacataaaataggctaatacacattacacaattttcagtcgagcacagtgaagttcgatgtgcgctgaatatggcccatcggatacaatactcagagagcatataagcttgtactcgctcctctaacgctcaccggaatatgatttccttttgttacctttttttttttttggttttgttcatagctgtttctgtttcttatcatgaggaacaacagatttcgtctccagccaaaccatcgttttgttacgaggttatagtagcttataagcttgcagcaaacgtcagttgacggcacaacttgtacctaggctaacaatacggcaggtttgcagcgaagaccaagccagatccttctcagtccctccacctgtgcccgcagcttgggttgcagcagatgaagtacagcgtcatggcttgttctcccttagtcggggcctgcgggctcaatgtatcagcattacatgtaacagcgcaaaactcaagtgcaacaaaaatcactggtaatgtatcagcattacatgtaacaaaaatcaagagcaactacgatagaatgaattgatgaaggatttcaaaaaccactggtaatggtgattccacggaaatcattttttcgtgggatactgatttggttccatctgaacagattggttcaagcttacattgtactcagtagccagtgggtggataccacagggggtatctcatgcaatttggcttggttgccgatgctaaccctccctagacaataatcccgaataaatcatgcaacagtgcacactactgttaccatgcttaggcattacatgttacatatgacataacacaaccatcgcctttagcgacagcggcagcaagtaaacagcacctgggtacaaacctgaaaaaaggcagcttctggatggttgcagttgtaacatctgacgcttctggtgcgaggcaggctaggatcagttgctgcatccttcaggacatctttgggctcaccaccaggcttacggataacccttttgtacacacaagtatcagtggcaatctcctgttcacatcaatggtttaaaaaacagaatgatcagcgaaactacgagcaagcttgttggttggaggtcaaataatttgaatagaaattgcaggttaaaaaaaaaatgagaaaaggccacacttcatgcacacaaaagaaagagcatacagggaaataagaaaaccttacaatctatctacttcatacgttctgtgcacttcaaaatcatcaagaagggcatttatttaaaagccattcaatttcaaactgggctctccttcactcttatccaggggcaaatgcaccccctcacagatataaaaatagtgactttggctagccactgattcaacatagtttctcaacaatacgtgtaacggtgtaaggccacaaagttaagatgttaaggcatggtaaggcgagacatggcaatcacccccttcccatcaggccatcacctaggaatggtgctaactgctaatgccactagtgccacaacagaaaggaaagagcaaaataaatggaatggttctaatgcaaaagagatcagagggctcaatattttttttaatgttgttagctggtgcagtccacccaaaatgcattagcgaaggatcctccactggggaccgtgctgtccatttaacgagatcacagcctccaatgatatatctcagatgatagacaatattgcatcacaaggatcaaggttagcacaaccaataataataataataatgtagtggcaaataaaacatcatgatttatcaggatactattttcgctggcatgaattccttctccttggtcaaggaaccctcaagcatctcagaactttgcaaactcattttatcactacttaaccaaatatacaacaaacaattttataactatttcagcttcattttgattaaggagtatttcttgaacataggttaggcttgtatcacagacactggtcaagttgttaggtgcaccacaagccagaaaggttgtaaacactacttgattaaagcagtattttgaaccgaactgatttttttggaggtaacagttaaagcaacaacggtcatctgt

SEQ ID NO: 142058 - DNA, 1016 bp, Zea Mays
tttttttttttttggttttgttcatagctgtttctgtttcttatcatgaggaacaacagatttcgtctccagccaaaccatcgttttgttacgaggttatagtagcttataagcttgcagcaaacgtcagttgacggcacaacttgtacctaggctaacaatacggcaggtttgcagcgaagaccaagccagatccttctcagtccctccacctgtgcccgcagcttgggttgcagcagatgaagtacagcgtcatggcttgttctcccttagtcggggcctgcgggctcaatgtatcagcattacatgtaacagcgcaaaactcaagtgcaacaaaaatcactggtaatgtatcagcattacatgtaacaaaaatcaagagcaactacgatagaatgaattgatgaaggatttcaaaaaccactggtaatggtgattccacggaaatcattttttcgtgggatactgatttggttccatctgaacagattggttcaagcttacattgtactcagtagccagtgggtggataccacagggggtatctcatgcaatttggcttggttgccgatgctaaccctccctagacaataatcccgaataaatcatgcaacagtgcacactactgttaccatgcttaggcattacatgttacatatgacataacacaaccatcgcctttagcgacagcggcagcaagtaaacagcacctgggtacaaacctgaaaaaaggcagcttctggatggttgcagttgtaacatctgacgcttctggtgcgaggcaggctaggatcagttgctgcatccttcaggacatctttgggctcaccaccaggcttacggataacccttttgtacacacaagtatcagtggcaatctcctgttcacatcaatggtttaaaaaacagaatgatcagcgaaactacgagcaagcttgttggttggaggtcaaataatttgaatagaaattgcaggttaaaaaaaaaatgagaaaaggccacacttcatgcacaca

SEQ ID NO: 142059 - DNA, 2457 bp, Zea Mays
cagcggatcccgctgactcctccgctcctactcccctgcgtctgctcgtcgtctccccgctccaaaccctaactcgaagccggaacgaccgacaaaattcgggaaaatcgctcacaatttcgctccaaactacttcctggacggtgatgcgatgatgcacatgctggtagccccggataggggcggaggggagctgcagccgtacgtagcgccgcccgcagagcaggagctggagctcctccgcgacaacgccgatgacggcctcgagggccacgtgcgatgcctaaggtgtggaatatcccggcaatgcgacgccccatatgcgccgggggcctgatggcccaagaactctttgcaatgcgtgtggcattgcttacaggaaggggaaaatgagaagaatgatagaagctgaaccacccatagatgaggctgctcttgcaaagctggttccagaggtaggcatggaatttgtgagtgaggaaaaggcatacgaattctacaacaaatatgctgggcatgttggctttagcgttaggaaaagtacatcacataaatcttcagaaaatattaccaaagttagaacttttgtgtgctcaagagaaggctacaacagggataaaaaatcactggaagccaagaagccaagattggatacacgaatcggttgcccagcgagattgattataaaagtcacaccagagtgcaagtatagagtaactgattttaaagcagatcacaatcatcagctggccccaccttcaacgatgcatatgttaaggtcgcagaggatattgacagaacttcagcctggagaagcagaattatcagatgattctgtagtgacaccaacaacaaaggcaactggtgatcttgttgtgagacaagtcagttttcttcggagtttatctctcctcccagctgattacaagaattatctccgttcgaagcgtatgaaggccatgcaacctggtgatggtggagcaatattgaaatatttacagacaatgcaaatggataacccctcgttcttttacactatgcagatcgatgaggatgacaaactgacaaacttcttttgggccgaccaaaaatcgagagatgacttcaactatttcggtgatgtgctctgcttagacacaacatacaaaataaacggttatggtagaccgcttgcgttattccttggtgtgaatcaccataaacaaacgattatttttggtgcagctatgctttatgatgaatcatttgattcatacaagtggctttttgatagttttaagatcgccatgcatggaaaacagcctgcagtagctttgatagatcaatctattccattgagcagtgcaatggcagccgcctggccaagtaccactcaacgaatttgtgcttggcatgtgtatcagaattctcttaagcacctcaatcatgttttccaaggttcgaagacattcgcgaaggacttcggcaaatgtgtctttggctacgaggatgaagatgaattcgtgttttcatggagaagtatgctggagaaatatgatcttagacataatgaatggttgtctaaagtgtttgctgagaaggaacagtgggccttggcatatgatagacatatattttgcgctgacatcataagtgcacttcaagccgagagtttcagtagtattttgaagaaattcttgagtcctcaactggagctgctgtccttcttcaagcactatgaaagagcagtggacgaacatcgctatgctgagctgcaagccgacttccaagctagtcagagctatccaagaatacccccagccaagatgttaaagcaaactgctcatacatataccccggtggtatttgagatctttcgtaaagagtttgagctattcatggactctgtgttattcagttgtggggaggctgggacgacatctgagtacaaggttgcttcatctgagaaacccaaggagcactttgttcggttcgattcaagtgattgctcctgtctgtgcacttgtaggaagtttgagtttatgggtatcccgtgctgtcacatgttgaaggtgctagattacagaaatatcaaagagcttcctcaaaaatatctgttgaaacggtggagaaggaccgccaaatctgcaaatgaagacaatgaaggcaatgcaacaaacgccaacaacgggtcattattgattgtccctgctcctcctacaaatcaccatgggcttcagagcttcagtgcaatgattcaagatgcttcagtttctagcatgcattagaatgcatctcatagaagctcttaatgcaggaacttgcagggtcaatgccaacgacgcgtttataccttgcaagactccacagcgttggccactgaagaagcattggatgggccggccaccgtcaagattcaaccacgcatgtgttcaccgtgtaagactcggcgccgttggccactgaagcaacagttag

SEQ ID NO: 142060 - DNA, 104 bp, Zea Mays
ttttcttcttctaggagactaggatacagaaagtcaaataccagagatgtaggtgtcgtagaagcagagtacgtactgtacagtacagcagtgttagtatgtga

SEQ ID NO: 142061 - DNA, 4575 bp, Zea Mays
gcgcgcgctcatcggattcggctacgcgccggcgagatccgggccgccgcagcacggtccggcagacgccgccgaaggcgcaagccgcgatcttgtcgccgcgggagctgcattggcgccccacgcggccgttccggcgtttcttgggaggttgcggcggcgggaggagttcgtgtccgggatccgccagatccgtgctcgccggcggcggcagcagtggtggtggccgccatggaggccgatgcgccgctcgacctcgcgctcttccagctatcccctcggcgtcagcggtgcgagctagtggtgtgcggcaatgggcggacggagaagatcgcgtcagggtcggtgaagccgttcgtggcgcacctgcgggctgcggaggaacaggcgtcggctcagccaccgccgctggccatccggctgcagctggagcggcccgccccgtggtttagcaagggcacccttgagaggttcgtgcgcttcgtgagcacaccggaggtgctggagttggcgaacacctatgatctggagatgtcgcagctggaaggggccaggaagatttatgcgcagggaggtactggagatgctacttcaggtggagctgtacaatcttgcatatcttctgttactgaatctagtttatgtaatctctggccatgcttattggcagctgaaaatgttacagcctcagcggcagcggcggcagatattacaaagaaagaacttcttagggcaattgatgtgcgtctaagttcccttaaacaagatctggccgcagcttgttctcgagcatcctctgctgggttcaatcctatcagtgtatctgagcttattctttttgctaaccattttggtgccagtcggctgagcgaagcatgcacaaagttcatgtcactttgccagcggcgtcctgacatcagtcctcaaactgcacagccagcagtttcatcacactggaaggtctttgacgatgggaatgtccgtggttcttcgagttcagacatgtctatagatgaaccactagttgatctcagtgaatccaagaacaaatctacagtcagtggaagtggctctcaggtccacagactaagcaacatccaaggtttagaatctgctgcagcacagcaacccaagccaaccatccaacaagcagtagataaacaagaagcagaaacagatgcgtctcctgcaccttctaaaggagagctttcaaggcggctgagtgtgaaggacaggataaacatgtttgagagccagaaaaaggagcagactccaagttctggtaacagcaactctgccggtactggtagagtggttccagggaaaggtgagcaccgcagggttccttctggcgcctccatggagaagttagttagaaggtggagcagtgttagcgacatgagtattgacctcagcaacaatgagagtagtagcttaaatgacaaaaaggataatggaactcctgccgggactccaacatctactgatttggaggccgactctaaagtaagagctaatgaggactctaatggacagaaggattcaatcacgtcacactcttggccttgtcaaaaggataatgtaccaatggatctggccaccacagatttgtgcccaccctcaattttaagtaatacacttgctcctcataaagagagtatatatggtgatggtgcagaaaacgacatggttatgaactctagcattgaaagtgaagcatcctttgggaaagaaccgggggttattcaaggacacacaaggatgtcaaatcatgctacttcaaatgtttccactcaagaccgtctaaaatcttctgcaaagtcagttgaagaagccttgctgaaaaataaagttattgtaactagtgcatcgtcagaggagcatgtctgcatgatagacaaggaaatcacagctgttgctcatgaagtaccagttgcaagtgaacagattccccagaatgatattagaggtctccatacaaaagatattcacactgaagcagaagtgactggaaggaaggatcagccttcacgatcatttggaagggtatctggtggtgttaatcctaaaccaaaagcctcatccaattcccgagctaatgctaaaggctcatctgttagggatgcgattgcctctacagaaactgagttccgtgacgttagtttgcagcggaatcgtctaccacggaagtcagaagatgtagggaaaaaggttacagctggttctgattcagattgctctggtcgtcagggaaaaaatttgagcaggcaatcatccattaccgatcaggaactaaacttgcaggctagagtgacaagaccaggaaaagggaaccaagatcggcatggtgaattgcaaatgaaggccaatgagttggagaaattatttgctgaacacaagttaacatcctcccgacgaggtaaacctacagatgtgcaggttgaaagcacacctatggtgagtgaggtaaagccgacaatggttcttcatgagacaattcatacaaaacaagttgtaaaggagagtataactgtcaatgattttgatgccggtgagcttctgaagatggtgaataatcaagaatttaacattagcacaccacaaaaacttggcattctaagtttagaagagtcgagagggaagttttatgagcattatatgcagaagagggatgcaaaactgaaggaaggctggaagctgcagagagaggagaaggaagcaatgttaaaggctatgcatgacagcctagaacggagcaaggctgagttgcttacaaaattctctcggtctgcagatgtccctgactcaacttatgtttcccattgttctcagaagattcctccttcgcgatcagcaagaaaaaataaagatcagggggttggctcattcttggtggaagaggaaatgaatagtgactacctatctggtgatggttcttccaggagtgctgattccagaaagcatttttcaaataaagttgcttctacccaaaatgcatctgctggtcctatccataaacgttcatcaagaaccgcaagctctggttatgctaatcgcaggaatccaccagaaaatcctctcgcacagtctgtccccagtttttctgacttgagaaaagaaaatacaaagccttcacctggagtcagtagagtgagtgcaagagttcagcaaaagtcttttgcccgtagcaagagtattattgaagagtcaaagagcatattgaaagaagatcaatcgaggaggtcacaatctatgaggaagaaccaaattcctgatgagcttaaggacatttcgtcagggaatgatgatatttacaattgggctccctcaagaatttccaagaatcaatcagagggaccttttgcttacagtacccgtagatcgggtccaccaaagccttttcttaggaaaggcaatgggactcaccctgttattggtatagctggatttcaggctgcagctgccatgatggcgaatgccctccagcatggtgacagtggtgattttgaagatcagcaagaggattcccctgatgatgccaaagaagaggaagaatatgaaagcatggaagaaaatcttagagaaagtgactttcctgctgattctgacagtgagaacccaagagtgagtcatgaatttggaaattcagatgacccagggtcagaaaacggtgatgctgattttccaagcaaaacacctgccattggcagtactaagttcactgcttttacaggaaatgttcacaatccagctggtgatgttccagcaccctggagttctcgtcttccacagctgttcccttacacgaatgataattcagatggtgacgcctttgctgattcaccatcgggaagtccatcaccatggaattctcattcactggatgaaataacagatgctgatgtatctcggatgcggaaaaagtggggcagtgcacagatgccttttgctggtgtcaatgcacctcaacagccacgcaaagatgtttccaaaggattgaagaaattgtggaaatttggtaggaagactagaggcggtgacggtttagtaaatgattgggtatctgcctccactgcctcagaatgtgatgatgacatggaagatggacgggatctggtagtaggatcttctgatgatttcagaaagtctcgaatgggttatcttgcttcatatgacggttttgttgagaacgaggttttttctgaacaaggtatttgactttctaattctgtaaaaggtcttctcgttgtcattaaattagttagtatgcttctcaaaatactattcccacaatttatttgcactagataaagtttaaagaaatgggcctttctaatatggtcatcacactcctaaaattcaaaaaaaagtatctgaaggttccaaccatgtctatgagttggcaaacaatttaattgataacttaagatttctgttctccatctacccgaacaaaattgaaactgttggaacagctattctgagcattactcattctcgatgaggtattcctaggatataacctcttattcttggctgatgttatgcgcactaaccctgggccattggttctgc

SEQ ID NO: 142062 - DNA, 4725 bp, Zea Mays
gcgcgcgctcatcggattcggctacgcgccggcgagatccgggccgccgcagcacggtccggcagacgccgccgaaggcgcaagccgcgatcttgtcgccgcgggagctgcattggcgccccacgcggccgttccggcgtttcttgggaggttgcggcggcgggaggagttcgtgtccgggatccgccagatccgtgctcgccggcggcggcagcagtggtggtggccgccatggaggccgatgcgccgctcgacctcgcgctcttccagctatcccctcggcgtcagcggtgcgagctagtggtgtgcggcaatgggcggacggagaagatcgcgtcagggtcggtgaagccgttcgtggcgcacctgcgggctgcggaggaacaggcgtcggctcagccaccgccgctggccatccggctgcagctggagcggcccgccccgtggtttagcaagggcacccttgagaggttcgtgcgcttcgtgagcacaccggaggtgctggagttggcgaacacctatgatctggagatgtcgcagctggaaggggccaggaagatttatgcgcagggaggtactggagatgctacttcaggtggagctgtacaatcttgcatatcttctgttactgaatctagtttatgtaatctctggccatgcttattggcagctgaaaatgttacagcctcagcggcagcggcggcagatattacaaagaaagaacttcttagggcaattgatgtgcgtctaagttcccttaaacaagatctggccgcagcttgttctcgagcatcctctgctgggttcaatcctatcagtgtatctgagcttattctttttgctaaccattttggtgccagtcggctgagcgaagcatgcacaaagttcatgtcactttgccagcggcgtcctgacatcagtcctcaaactgcacagccagcagtttcatcacactggaaggtctttgacgatgggaatgtccgtggttcttcgagttcagacatgtctatagatgaaccactagttgatctcagtgaatccaagaacaaatctacagtcagtggaagtggctctcaggtccacagactaagcaacatccaaggtttagaatctgctgcagcacagcaacccaagccaaccatccaacaagcagtagataaacaagaagcagaaacagatgcgtctcctgcaccttctaaaggagagctttcaaggcggctgagtgtgaaggacaggataaacatgtttgagagccagaaaaaggagcagactccaagttctggtaacagcaactctgccggtactggtagagtggttccagggaaaggtgagcaccgcagggttccttctggcgcctccatggagaagttagttagaaggtggagcagtgttagcgacatgagtattgacctcagcaacaatgagagtagtagcttaaatgacaaaaaggataatggaactcctgccgggactccaacatctactgatttggaggccgactctaaagtaagagctaatgaggactctaatggacagaaggattcaatcacgtcacactcttggccttgtcaaaaggataatgtaccaatggatctggccaccacagatttgtgcccaccctcaattttaagtaatacacttgctcctcataaagagagtatatatggtgatggtgcagaaaacgacatggttatgaactctagcattgaaagtgaagcatcctttgggaaagaaccgggggttattcaaggacacacaaggatgtcaaatcatgctacttcaaatgtttccactcaagaccgtctaaaatcttctgcaaagtcagttgaagaagccttgctgaaaaataaagttattgtaactagtgcatcgtcagaggagcatgtctgcatgatagacaaggaaatcacagctgttgctcatgaagtaccagttgcaagtgaacagattccccagaatgatattagaggtctccatacaaaagatattcacactgaagcagaagtgactggaaggaaggatcagccttcacgatcatttggaagggtatctggtggtgttaatcctaaaccaaaagcctcatccaattcccgagctaatgctaaaggctcatctgttagggatgcgattgcctctacagaaactgagttccgtgacgttagtttgcagcggaatcgtctaccacggaagtcagaagatgtagggaaaaaggttacagctggttctgattcagattgctctggtcgtcagggaaaaaatttgagcaggcaatcatccattaccgatcaggaactaaacttgcaggctagagtgacaagaccaggaaaagggaaccaagatcggcatggtgaattgcaaatgaaggccaatgagttggagaaattatttgctgaacacaagttaacatcctcccgacgaggtaaacctacagatgtgcaggttgaaagcacacctatggtgagtgaggtaaagccgacaatggttcttcatgagacaattcatacaaaacaagttgtaaaggagagtataactgtcaatgattttgatgccggtgagcttctgaagatggtgaataatcaagaatttaacattagcacaccacaaaaacttggcattctaagtttagaagagtcgagagggaagttttatgagcattatatgcagaagagggatgcaaaactgaaggaaggctggaagctgcagagagaggagaaggaagcaatgttaaaggctatgcatgacagcctagaacggagcaaggctgagttgcttacaaaattctctcggtctgcagatgtccctgactcaacttatgtttcccattgttctcagaagattcctccttcgcgatcagcaagaaaaaataaagatcagggggttggctcattcttggtggaagaggaaatgaatagtgactacctatctggtgatggttcttccaggagtgctgattccagaaagcatttttcaaataaagttgcttctacccaaaatgcatctgctggtcctatccataaacgttcatcaagaaccgcaagctctggttatgctaatcgcaggaatccaccagaaaatcctctcgcacagtctgtccccagtttttctgacttgagaaaagaaaatacaaagccttcacctggagtcagtagagtgagtgcaagagttcagcaaaagtcttttgcccgtagcaagagtattattgaagagtcaaagagcatattgaaagaagatcaatcgaggaggtcacaatctatgaggaagaaccaaattcctgatgagcttaaggacatttcgtcagggaatgatgatatttacaattgggctccctcaagaatttccaagaatcaatcagagggaccttttgcttacagtacccgtagatcgggtccaccaaagccttttcttaggaaaggcaatgggactcaccctgttattggtatagctggatttcaggctgcagctgccatgatggcgaatgccctccagcatggtgacagtggtgattttgaagatcagcaagaggattcccctgatgatgccaaagaagaggaagaatatgaaagcatggaagaaaatcttagagaaagtgactttcctgctgattctgacagtgagaacccaagagtgagtcatgaatttggaaattcagatgacccagggtcagaaaacggtgatgctgattttccaagcaaaacacctgccattggcagtactaagttcactgcttttacaggaaatgttcacaatccagctggtgatgttccagcaccctggagttctcgtcttccacagctgttcccttacacgaatgataattcagatggtgacgcctttgctgattcaccatcgggaagtccatcaccatggaattctcattcactggatgaaataacagatgctgatgtatctcggatgcggaaaaagtggggcagtgcacagatgccttttgctggtgtcaatgcacctcaacagccacgcaaagatgtttccaaaggattgaagaaattgtggaaatttggtaggaagactagaggcggtgacggtttagtaaatgattgggtatctgcctccactgcctcagaatgtgatgatgacatggaagatggacgggatctggtagtaggatcttctgatgatttcagaaagtctcgaatgggttatcttgcttcatatgacggttttgttgagaacgaggttttttctgaacaagaacaatcactacgcagctccattccaaacccacctgcaaatttcagattgagggaggatcagctgactggaagttctcttaaagcgccgcgttctttcttctccctgtcaacattccgaagcaagggaggtgatgccaggctcaggtgatcctcagaagacaccagaggtgtggtgtgtataaaatatcttgtcaagttaggtatggttatcaaattttcagggtggtacgtggatgctgctagcttgtgattatatatatattgtgtatctatggcggttcatataagctaccagttgagctctctccattgttgccgtttgattattcttttttcccctgtgtagagttggacttttgcaatctgttctttcaactggcccaggactcctgtattttttttcattgtttttgtgatatatctgtatctccctctcaacttgtttcttcattcacatatatcacaaattcaagatatatggtaattttgccaactatagcaaaccacctgagat

SEQ ID NO: 142063 - DNA, 734 bp, Zea Mays
acatgatagacacaggaggaaaacactagattaggggattacgctaatacccctggctatcataccttaacagcactcgcaggggtttattagctcggacttctgaatcttaagggacctgtaagcctgtatatcctttggttactgtccaattttaactcttgccacacattttttttattcaagcccagaagcttgatgaaggtccttaatttgcagaacaatcactacgcagctccattccaaacccacctgcaaatttcagattgagggaggatcagctgactggaagttctcttaaagcgccgcgttctttcttctccctgtcaacattccgaagcaagggaggtgatgccaggctcaggtgatcctcagaagacaccagaggtgtggtgtgtataaaatatcttgtcaagttaggtatggttatcaaattttcagggtggtacgtggatgctgctagcttgtgattatatatatattgtgtatctatggcggttcatataagctaccagttgagctctctccattgttgccgtttgattattcttttttcccctgtgtagagttggacttttgcaatctgttctttcaactggcccaggactcctgtattttttttcattgtttttgtgatatatctgtatctccctctcaacttgtttcttcattcacatatatcacaaattcaagatatatggtaattttgccaactatagcaaaccacctgagat

SEQ ID NO: 142064 - DNA, 288 bp, Zea Mays
atgggcaggtatggtgaaggcgaaaacactggcccagtatgtgtggcacggaggaagttgcagaatccaccagatttctatgtggagttccagatatatgaagccatttgcgcgatgatgaagatgtcggttcttcgcctcggtcatgttcacttaaagggggcaaagagaatcgatgagttgtgcccaccgaatccgaatgagttggacaacgccaccttcacttcacatctctccttctgtgaccctaccaagacgcccacgtcctgtatcaaagataagcattaa

SEQ ID NO: 142065 - DNA, 339 bp, Zea Mays
tttttttattaacaatagtaatttttgtacataggtgttctttcgacttgaccttctccatcgtgttagctggactcgtacattattctcaggtatacattgttttcgtaatttcggttaatgtgtcatttattatttactatatagttattagtcactcgttcggagggtgatcggagggtgatgtcttttgtttaatctccgagatattttttaatgtttagagttcagttttaatcgttaaccgtagcgaaccgtatgcgtcacccgttcgggaacggcaaacgtcacattggcttgtgaggttcgccgttccggaattgtccacgtattttggac

SEQ ID NO: 142066 - DNA, 282 bp, Zea Mays
atgttcccatctctaggcggctgctgctgctggaggaggcgcagctgcatcccacacatcatcacgcatcagcgggaggagctggagcagcaacccagtctgcaccagcagccgggacgccagcaggtggagctgcagcctcacggcctcaccctcaccagctccccactcgtcaccccagttgtcagctctaggggcagtatattctgcaactgcgccatagcccggagcaaccagagcctcttcttcctccttctcctttgcttcctctatgtcctgtag

SEQ ID NO: 142067 - DNA, 91 bp, Zea Mays
acattagatgcttggtataagttgatttatcctttatttttgacaaattctagtgtaaaccaattccacaacgcatatttatggtattaca

SEQ ID NO: 142068 - DNA, 1897 bp, Zea Mays
gccggtcgatttccggaccccatattttcttctatcttcccagctgccgttgccggcggaagaagccaattgacgtgatccccgccgccaagcccaaccccgccgaccggagctgcatcctctccttctctctcccataccacgacgagacgatcccatcggcgcccgcgcggtcccttcgatccaagcaagcgtagtcccttgttcctagtataacctctaaatgattccatgggaactccaaacgaaatgatggcatactcttccctgtccaaaatggacaccagccagaaccacggagctgctctgtccaatgtagttgctggaaacaactatcctgttcaggattatctttatgagcaagcatccgaaccagacttcccagagtatgattcaagggatgacctgttcgctccaacacgagctagtccaaaagtcaatctaaatactgttctaggtggtctggtttcgattgttacaggtgtaaacaagagtgaggatgatgcatcgcagcatgaaagttttagcacagacatatcattccttagatctgacaagaatggtaatgtcaatgtgcacccttccgtctgtgttccaagtgccccaccactacttgaagcgaatgctttacaatatagtgcatacaaggaggtgttgctagcagatccaccagagtggttgccagatagctctgctaatgtgtgcctacagtgcaacttgcctttcacggctctgactcgtggaaggcaccattgtcggttctgtggaggtatattctgcaaaaactgttccaaaggaagatgtttgatgcccatgaaattcaggatccgtgatcctcagagagtttgtgatgcttgctatgagaggcttgatccacttcagggattattgatcaactacaatagtaactgcatgcagcaagcaaaacacgatgtcatggattggacaagcactagaagctggttgaacatgcctgttggtgtatcaatggagtatgagatatacaaggctacaaacacaatgaagaaatattgtcaggttgctagattaaaccctgagaagtccatcccatcatctattctcaagggggcgaagggacttgcaattctaacagttgccaaggcaggtgcagttcttacatacaaagttggcactggtcttgtggttgctcgcagatctgatggatcatggtctgctccctctgcaattttatctgttggcctgggatggggagtgcagattggaggagaactgacagacttcatcattgtgcttcatgaccgtaaagctgtcaaggctttcagcagtcgcattcatctttcacttggggcaggattgagtgctgcagcaggacccattggcagagcatttgaggcagacgttcgggccagtgaaaagggttctgggatatgctacacttacagctgcaccaaaggtgccttcgttggggtttcactggaagggaatgtggtgacaaccagaatggagaccaatctacgcttctacggtgatgcatacctgacggcaaccgatatcctgtttgggagggtggagcggccccgagctgcccagcccttgtactcagctctagatgatctgttctccaaaatggtttgctagcccatttagattggcgtgatactctgcattggtggcatgcagtcatgtatgtatataaacataaggtagcagcaaaaatcctaaacaggagatatggaagcggaaagaatgtacagcttttgatggatggtttcactactgatagcagtccatacatgtaaatattggcagaagaagatttaagggctgtttggttcgcacactactgatatcagtacgctgcagtgtgccactggtggactcatccatgcaatggaaaattttaatacatttgtta

SEQ ID NO: 142069 - DNA, 1942 bp, Zea Mays
gccggtcgatttccggaccccatattttcttctatcttcccagctgccgttgccggcggaagaagccaattgacgtgatccccgccgccaagcccaaccccgccgaccggagctgcatcctctccttctctctcccataccacgacgagacgatcccatcggcgcccgcgcggtcccttcgatccaagcaagcgtagtcccttgttcctagtataacctctaaatgattccatgggaactccaaacgaaatgatggcatactcttccctgtccaaaatggacaccagccagaaccacggagctgctctgtccaatgtagttgctggaaacaactatcctgttcaggattatctttatgagcaagcatccgaaccagacttcccagagtatgattcaagggatgacctgttcgctccaacacgagctagtccaaaagtcaatctaaatactgttctaggtggtctggtttcgattgttacaggtgtaaacaagagtgaggatgatgcatcgcagcatgaaagttttagcacagacatatcattccttagatctgacaagaatggtaatgtcaatgtgcacccttccgtctgtgttccaagtgccccaccactacttgaagcgaatgctttacaatatagtgcatacaaggaggtgttgctagcagatccaccagagtggttgccagatagctctgctaatgtgtgcctacagtgcaacttgcctttcacggctctgactcgtggaaggcaccattgtcggttctgtggaggtatattctgcaaaaactgttccaaaggaagatgtttgatgcccatgaaattcaggatccgtgatcctcagagagtttgtgatgcttgctatgagaggcttgatccacttcagggattattgatcaactacaatagtaactgcatgcagcaagcaaaacacgatgtcatggattggacaagcactagaagctggttgaacatgcctgttggtgtatcaatggagtatgagatatacaaggctacaaacacaatgaagaaatattgtcaggttgctagattaaaccctgagaagtccatcccatcatctattctcaagggggcgaagggacttgcaattctaacagttgccaaggcaggtgcagttcttacatacaaagttggcactggtcttgtggttgctcgcagatctgatggatcatggtctgctccctctgcaattttatctgttggcctgggatggggagtgcagattggaggagaactgacagacttcatcattgtgcttcatgaccgtaaagctgtcaaggctttcagcagtcgcattcatctttcacttggggcaggattgagtgctgcagcaggacccattggcagagcatttgaggcagacgttcgggccagtgaaaagggttctgggatatgctacacttacagctgcaccaaagattgcactgttcgcagagtgaagtttgaatatgggtatgaggatggtgccttcgttggggtttcactggaagggaatgtggtgacaaccagaatggagaccaatctacgcttctacggtgatgcatacctgacggcaaccgatatcctgtttgggagggtggagcggccccgagctgcccagcccttgtactcagctctagatgatctgttctccaaaatggtttgctagcccatttagattggcgtgatactctgcattggtggcatgcagtcatgtatgtatataaacataaggtagcagcaaaaatcctaaacaggagatatggaagcggaaagaatgtacagcttttgatggatggtttcactactgatagcagtccatacatgtaaatattggcagaagaagatttaagggctgtttggttcgcacactactgatatcagtacgctgcagtgtgccactggtggactcatccatgcaatggaaaattttaatacatttgtta

SEQ ID NO: 142070 - DNA, 1676 bp, Zea Mays
actagaccactactggctcttgcttggattccctccgctccggctctgctgccaagctcctcgtctcgtgcctcctacgccattgggctagctgcctgctcgcccgccccttgcgccgggcatggcggccacgctggacggagctgccggatgcaggaagcgcaagcgcgcggcgcctggccttgccgacctgcacgacgacatgctcgagcgcgtgctcgcgcgcctcccaccggccagctacttccgcctccggggcgtctcccgccggtggcgcgccgcggcggagtcccgcagcttccgcgccgcctgcgcgcgcgtcacggcccgggacccatggttcctcatgctcgaggactccgaccaccaggaccaggaccaggacgagcggcggccgcgccccgccgccgtgttcgactccgccgagcgcgccttggcgcggtggcgtggcgcgccggtgccgctgcagccggtggccgccgcgagcgggctcgtgctctaccgcgacccgagcacgggtggcctcaccgtggtcaacccgctcacgggcgcgtcccgcgcgctcccgccgccggcgcgcgtggcgggcgcgctgcaggccgtcgccatgtacggctcgccgtaccgcgtggtgctcatcctgggcgagctgccggagctgtccacggtggcgtacgactcgtccacgaacgcgtggagcgagcaggcggcgctctcccgaaaaccagaggtggagggcgccccgtcccgggagcgcgtcgcggaggtcggcgacggcgacggcgacgacacggtctacttcctgagcaagtccggcgacgtggtggccagcaccatgcagcggagcgcgtcgcggcagtactcgtccgccgtggcgtgcggcggctgcggcggcggcgacgccgtggcctacttcctgagccgctcgggcacggtggtggcctgcgacctggcgcgccgcgcgttcgcggagctgccccggatcctgcccgcctaccacgagcactccatcgacgtggtggcctgcggcggcgccgcctacgcggtggtgctctcggagttcctcgacgccgcgagcctccgcgtgtgggagttcgcggggggcgcgtggcggcaggtggccgcgatgccgcccgccatggcgcacggcttccgcggcgccaaggcggacgtgaactgcgtcggccacggcggccgcctcatggtctgcgtcagctccagctccgccggcgccggcggctgcttcttgtgcgacgtcgggaccaaccggtgggaggagctccctcggcgcgccgcaggggacggcgacgccaccacgggcttcgtgtccgcgctctcgttcgagccgagaattgaggccgccgtctgacgagtctcatctctcggagcctcggcattgctggtttcttttgtgtctagtagtagtagatcgcttggcggcatccctggtgcctagtgagacatggattacgctgcgggcatcctgattccatgaattgttcgcgtgtgatttgagatggtttcgtgtgaatcaaatcaccaagcctgctagtccgtccgtcgcttccatcattccatgcgtgttgtggcattgtagtgctgctgcggatcctgtctgggctcagtgctcaggctgctgtcgtttctcgagtctcgtgccgctgggcgccgagccc

SEQ ID NO: 142071 - DNA, 1266 bp, Zea Mays
gttttcgtttcagtgctgctgcctgcaagccagcaattgcttctccttcctctccctccctctctcttcccgaccgtttgcgccaccggaaggtcctggaagctggaacattgtgagatgaggagcaatagacgacgccttggaggaagaggaggaggatggggtggccagggcggtggtgtaagtgtggccgcttccttcgccgcgctgttgggctgtgtcgtggccctcgtcggcggcgccgccgggcagggcccccggcccccctccgactacaaaaccctcagcggcgccgctccacttgtggtggccaaaggtggattttcaggagtgtttccagattctagccaaggcgcctattctttcgcgatgatcaccagcgcaccggacacggccatgtggtgcgacgtccaactaacaaaggatggtgttggagtctgccttcgggatataaatatgaaaaactgcaccagtgttgatcaagcctaccccgagagaaagcggacctatgtcatcgatggtgtgcggaaaactggatggtttgtttcagacttcaccattgctgagcttcagtctgtttctctaacacaagcaatttggcctcgcactaggagattcgatggcatctatcctatcatcagtattactgactttcggtcccttgtcatgccatctcctgtttggttgaatgtacagcatgacatcttctacaaacaacatggtttggacatgaggaactacatactttcgatcaaaaagggtgtatccatggattatatctcatcacctgaactgggcttcctcaaaaatatgtctggaagagttggtcgcaaaacaaagcttgtgtttagatttcttgaaaaggccctcttagatcattctataaatcaaacatatggttcactgtcgagtaacctaccatttattaaatctattgcatctggcataatagtccctaagagttacatttggccggtgacgaaggataactatctactgccatccacatcaattgtcacagaagcccacaatgcagggctggaaatatatgcctctgattttgccaatgatagaattatcccctataactacagctatgatccgttggcagaatacctgaactttatcaatgatggtggcttctctgttgatggtgtattgtcagaacacccaattactgcatcagaggcaattggtaagctagtaagttttgcattagtacatgttaaagatccagctacattatttgtcgggggtgataattag

SEQ ID NO: 142072 - DNA, 1384 bp, Zea Mays
gttttcgtttcagtgctgctgcctgcaagccagcaattgcttctccttcctctccctccctctctcttcccgaccgtttgcgccaccggaaggtcctggaagctggaacattgtgagatgaggagcaatagacgacgccttggaggaagaggaggaggatggggtggccagggcggtggtgtaagtgtggccgcttccttcgccgcgctgttgggctgtgtcgtggccctcgtcggcggcgccgccgggcagggcccccggcccccctccgactacaaaaccctcagcggcgccgctccacttgtggtggccaaaggtggattttcaggagtgtttccagattctagccaaggcgcctattctttcgcgatgatcaccagcgcaccggacacggccatgtggtgcgacgtccaactaacaaaggatggtgttggagtctgccttcgggatataaatatgaaaaactgcaccagtgttgatcaagcctaccccgagagaaagcggacctatgtcatcgatggtgtgcggaaaactggatggtttgtttcagacttcaccattgctgagcttcagtctgtttctctaacacaagcaatttggcctcgcactaggagattcgatggcatctatcctatcatcagtattactgactttcggtcccttgtcatgccatctcctgtttggttgaatgtacagcatgacatcttctacaaacaacatggtttggacatgaggaactacatactttcgatcaaaaagggtgtatccatggattatatctcatcacctgaactgggcttcctcaaaaatatgtctggaagagttggtcgcaaaacaaagcttgtgtttagatttcttgaaaaggccctcttagatcattctataaatcaaacatatggttcactgtcgagtaacctaccatttattaaatctattgcatctggcataatagtccctaagagttacatttggccggtgacgaaggataactatctactgccatccacatcaattgtcacagaagcccacaatgcagggctggaaatatatgcctctgattttgccaatgatagaattatcccctataactacagctatgatccgttggcagaatacctgaactttatcaatgatggtggcttctctgttgatggtgtattgtcagaacacccaattactgcatcagaggcaattgattttcaagtctactaagtagaaggcacaatattacaaacctccattggaatttatcttctaacgtctcatgttgatattagattgttctgtctcttaatcccccatttagtcttatagtgttcactgtccaatgatgaaatattttattgttgtcgggcttaaaataagcttactgcattttaagata

SEQ ID NO: 142073 - DNA, 3393 bp, Zea Mays
attgcttctccttcctctccctccctctctcttcccgaccgtttgcgccaccggaaggtcctggaagctggaacattgtgagatgaggagcaatagacgacgccttggaggaagaggaggaggatggggtggccagggcggtggtgtaagtgtggccgcttccttcgccgcgctgttgggctgtgtcgtggccctcgtcggcggcgccgccgggcagggcccccggcccccctccgactacaaaaccctcagcggcgccgctccacttgtggtggccaaaggtggattttcaggagtgtttccagattctagccaaggcgcctattctttcgcgatgatcaccagcgcaccggacacggccatgtggtgcgacgtccaactaacaaaggatggtgttggagtctgccttcgggatataaatatgaaaaactgcaccagtgttgatcaagcctaccccgagagaaagcggacctatgtcatcgatggtgtgcggaaaactggatggtttgtttcagacttcaccattgctgagcttcagtctgtttctctaacacaagcaatttggcctcgcactaggagattcgatggcatctatcctatcatcagtattactgactttcggtcccttgtcatgccatctcctgtttggttgaatgtacagcatgacatcttctacaaacaacatggtttggacatgaggaactacatactttcgatcaaaaagggtgtatccatggattatatctcatcacctgaactgggcttcctcaaaaatatgtctggaagagttggtcgcaaaacaaagcttgtgtttagatttcttgaaaaggccctcttagatcattctataaatcaaacatatggttcactgtcgagtaacctaccatttattaaatctattgcatctggcataatagtccctaagagttacatttggccggtgacgaaggataactatctactgccatccacatcaattgtcacagaagcccacaatgcagggctggaaatatatgcctctgattttgccaatgatagaattatcccctataactacagctatgatccgttggcagaatacctgaactttatcaatgatggtggcttctctgttgatggtgtattgtcagaacacccaattactgcatcagaggcaattggttgttttactaaactgaattcaaataagactgatcatggagaacccttagttatctcacataatggtgctagtggagactacccggactgtacagacttggcctaccatagtgcaattgatgatggtgcagacatcattgactgtcctattcaagtgacaaatgatggagttcttatgtgcatgagttccactaacctgcttgacactacgaatgttcagagaacaacttacaactctctggtttctgtcgttccagatattcagcctcaaccaggaatcttcacattcaacctcacttggtccgacattaacagtaatgttttaaaacctaaaatatcttctccagtgagtggttatttccttgtaaggaacccaagatacacaaatcaagggaagtttttgaagttatctgactttctagcaatcgcaatggataaagacttgtctggtgtcatgatcattattgaggtgatactttcgctcaaacattgtattaaaaagaagacattctcacataggtcgagaaaacctccaaactcctgctccacttatacacagcggcatcattgcccatgtaaggacgaccgcaaccggggccggaccttagaccttagacttgtactttgacgtgggacagacgagggaacgatcacgaccgggagggccttagacctataatttggcatgagatagacgagtgaattttttaaccacaaaatttgctctcaaggggagtcgaactcaagacccgaggagtgatattcagaccgactaaccaactcagctagaggccctttcgcttcaaagaattggactttccacctgatttttgtctccctattatgactttatgatacctgcccattttgttcaaaaaagtatgactatgttacaagcaaaagttcacatgatagttaaccacttaacctctcaatatgttgatacataatctacatatctcttttttgaaagagctcatcatctggtttcatttttacattgacaagttatataatttgctgaacggttgtcatcttgatgagttctgctacagctactagtatagactattgcttgtataaacctctgcaaagattgtattctccccttgcacatttccaaatattccactcttttttctagaagtcaaatgttatcttaataaatggaaatctttcttaaatgatcaatcgatcttttgtactacagaatgctgcatttttagtaaattcattgggaattgacattgttgattctttaaccactgccttaagtgctgctggcttcgataatcatcctaccaaggaagttctgatcaagtcaaaagatagtgatgttcttgtcaaactgaagcagcagaaaacaaaatgcaagcttgtttacactctaccctctggcatcggggatgcttctaattcctcgttgaaagacattaagaagtttgctgaatatgtagctgtggacagcaaatctgtttttactctaagctctgacttcatcataagacagaacagtcttgtgcaagatctgcagtcagcggggctagctttgtatgcagaggtgttccagaatgagtttgtagcacaaccattggatttcttcggagatgaaactgtggaaatcaattactatattcaatcatttaatttatcaggcatcataactgatttcccgaagacagtcagaagatataaaagaaacacctgtacagttctgggaaaggatatgcccagctacatgcagcctcctcaggctggttcccttgcacagtttctacaaaccttcaaaacccagcctccatctctgccaccaatgtcgacgctgaattcttcaagcgtggaggagccacctcttcctactgttgcgttaagaagtgtatctgatggtagtgcctcgggggcgaccaagactcctggcacaccttctgatgctccaacggctacagtaaatgctggcatgctacttgtgatggttttcacagctttgctaatctgagaagccacatgagattgtatagtagacgactgaagctaatctgatctcccttggattcaggtaagctttgactagtgatctggtactaccacacacttgttttcttatttccacctttacaaatttgtcagtagaaaatgttagagtatccatttagggtttggggtttaccccgtgtaattacccgcttacccctgtgtaataggccagaccgagctaacttagtctattaatac

SEQ ID NO: 142074 - DNA, 118 bp, Zea Mays
ttttttttttttttgctcttcttctatggtagcaaagagctcctgaaacaaaagagtgtatcagagcgtggacagaaacttgtcgccgggagccctggacgccggtggccggagcgag

SEQ ID NO: 142075 - DNA, 2498 bp, Zea Mays
taaaagttggtcctctttcttggagcctgcagacgaatggtgcagcggtgaaggcaggaggaggaggaggacataggaggggataggagccgccgcagacatggctggcggggtggccgttggggtcgtggcgctgttcttggctgcagcttcatttggggctaatgccaacaccgactcgaatgatgtgaatgccctcaatgtgttctacacaaccatgaattcgccgccgcagctgacgaactgggtgtcccaaaatggggatccctgtgggcagtcgtggctgggggtcacctgctcgggttccagagtgacagcaataaagttatctgggatgaggcttaacggcaccttgggctacaacatgaaccagctcactgcactagttcagctggatatgagcaataataatcttggaggcagtgacattccttataatcttcctccgaatctccagagcttaaatcttgcagtaaataacttcactgggactgtaccttactccatctcccagatggttgcacttagggatttaaatcttgatcataatcagctctcgaacatcaacgatatgtttagtcagctcacaaatttaacaacgttggatctatcatacaacacattctctggtgatatcccacatagctttaactccttgacaagtttgaaaacactttaccttcagaacaacaaatttaacggcacaatagatgttctcactgatcttcctcttactgacttaaatgtcgaaaacaaccaactcaccggttggatacccgataaactaaagggaatcaataatctccagacaagtggaaactcgtttaacaatggccctgctccaccacctccaccatcaccattatcacctccatcgacaaatacccctcctccctctcggcagcatgctgttccaagtagcgctggtaaaaataccccatctgaaaatggtggaaaacactcgaaacttggtggtggtgcagtagcaggaatcataatatgtttgctggttgttagcgcaatagttgcattccttgtgatcaaaaggaaatcatggaggttatcacagggacaagaccctgaacaaaatgaacctctcagcccttttgcttcaggacttaaacagatgaaatcgatcaaatctatcaaaatcgtatcaacaatgggaaaagaagaattgcagaagactgtttcgatgagtttgaagcctccaacaaaaattgacctgcacaagtcctttgatgaaaatgataccactaacaaggccatctcaaggaatgtaagcttgtcttccatcacaatacctgcatacacagtggcagaccttcagatggcaacgggcagcttcagtcctgacagttttatcggtgagggatcggtaggccgtgtttacaaagccaaattcggtgatcagaaggtcatggctgtaaagaaaataaacttctctgtatttccaagccatccttcagatttgttcattgagttggttgcaaacatttcaatgttaaatcatccaaaccttgctgagcttgctggttactgttcagagcatggacaatgcttgctggcatatgaattctaccgaaacggttctcttcatgatttccttcatctgaaagatgaacacagcaagccattgtcttggaacaaccgtgtcaagattgcgcttggatctgcaagagcattagagtacctacatgagacttgttcaccctctgtggtccacaagaatttcaagtcatccaacattttattggatggtgagctgaccccccacctctctgattctgggtttgcaggccttcttgcaaaccaggaattccaggaatcggatgagaactcaggatacagggcacctgaggtgatcttggctggtcagtactccctgaagagcgacgtgtacagcttcggagtcgtcatgctagagcttctgactggccggaaaccgtttgacaggacccgaccgcggcctgagcagtcactggtccgatgggctactccgcagctgcacgacatcgacgcgctggaccagatggtcgaccccgcgctgcaagggctgtacccgtccaaatccctctcccgcttcgccgatgccatcgccctttgtgttcagcctgagccggagtttcggccgccgatgtcggaggtcgtgcagtcgctggtgcgcctggtgcagagggcgaacatgacgaggatgcacgagagccagtcgcggcgccacggcgaatccggcggggactacgagttttgagcgagacaaaactgtgcctttgcctagatttttttcttctaaaagtataaaaatagttataaactctccttgagagttttgaacttcaaatattcacatatagtttcaaactatattagataggtagtagttcagaataagtatttatctgaaataagtattggttcacatttgcctttgcgttgcaggcattttgttttgctaaagacacccccaaaacatttggaacgaacttggttgagatttc

SEQ ID NO: 142076 - DNA, 2164 bp, Zea Mays
ataggaggggataggagccgccgcagacatggctggcggggtggccgttggggtcgtggcgctgttcttggctgcagcttcatttggggctaatgccaacaccgactcgaatgatgtgaatgccctcaatgtgttctacacaaccatgaattcgccgccgcagctgacgaactgggtgtcccaaaatggggatccctgtgggcagtcgtggctgggggtcacctgctcgggttccagagtgacagcaataaagttatctgggatgaggcttaacggcaccttgggctacaacatgaaccagctcactgcactagttcagctggatatgagcaataataatcttggaggcagtgacattccttataatcttcctccgaatctccagagcttaaatcttgcagtaaataacttcactgggactgtaccttactccatctcccagatggttgcacttagggatttggatctatcatacaacacattctctggtgatatcccacatagctttaactccttgacaagtttgaaaacactttaccttcagaacaacaaatttaacggcacaatagatgttctcactgatcttcctcttactgacttaaatgtcgaaaacaaccaactcaccggttggatacccgataaactaaagggaatcaataatctccagacaagtggaaactcgtttaacaatggccctgctccaccacctccaccatcaccattatcacctccatcgacaaatacccctcctccctctcggcagcatgctgttccaagtagcgctggtaaaaataccccatctgaaaatggtggaaaacactcgaaacttggtggtggtgcagtagcaggaatcataatatgtttgctggttgttagcgcaatagttgcattccttgtgatcaaaaggaaatcatggaggttatcacagggacaagaccctgaacaaaatgaacctctcagcccttttgcttcaggacttaaacagatgaaatcgatcaaatctatcaaaatcgtatcaacaatgggaaaagaagaattgcagaagactgtttcgatgagtttgaagcctccaacaaaaattgacctgcacaagtcctttgatgaaaatgataccactaacaaggccatctcaaggaatgtaagcttgtcttccatcacaatacctgcatacacagtggcagaccttcagatggcaacgggcagcttcagtcctgacagttttatcggtgagggatcggtaggccgtgtttacaaagccaaattcggtgatcagaaggtcatggctgtaaagaaaataaacttctctgtatttccaagccatccttcagatttgttcattgagttggttgcaaacatttcaatgttaaatcatccaaaccttgctgagcttgctggttactgttcagagcatggacaatgcttgctggcatatgaattctaccgaaacggttctcttcatgatttccttcatctgaaagatgaacacagcaagccattgtcttggaacaaccgtgtcaagattgcgcttggatctgcaagagcattagagtacctacatgagacttgttcaccctctgtggtccacaagaatttcaagtcatccaacattttattggatggtgagctgaccccccacctctctgattctgggtttgcaggccttcttgcaaaccaggaattccaggaatcggatgagaactcaggatacagggcacctgaggtgatcttggctggtcagtactccctgaagagcgacgtgtacagcttcggagtcgtcatgctagagcttctgactggccggaaaccgtttgacaggacccgaccgcggcctgagcagtcactggtccgatgggctactccgcagctgcacgacatcgacgcgctggaccagatggtcgaccccgcgctgcaagggctgtacccgtccaaatccctctcccgcttcgccgatgccatcgccctttgtgttcagcctgagccggagtttcggccgccgatgtcggaggtcgtgcagtcgctggtgcgcctggtgcagagggcgaacatgacgaggatgcacgagagccagtcgcggcgccacggcgaatccggcggggactacgagttttgagcgagacaaaactgtgcctttgcctagatttttttcttctaaaagtataaaaat

SEQ ID NO: 142077 - DNA, 804 bp, Zea Mays
atggtgtcgggctacgcgcagaacgggaggcatgaggaggcggtgcgcacgttcctggacatgtgggacggggccggggtgcggcccaacgagctcaccgtcagcagcgtcctgcccgcgtgcgctgcgctcggggccctcgcgctggggaggaaggtggagcgctatgccagggggagagggatgctcaggaacgtctatgtcgccaacgccttggtcgagatgtacgccaagtgcggcagcatccaccgggcttggaaggtgtttcggggcatggggacgcagagggatctttgttcttggaactccatgatcatggcgtttgtcgtgcatggcctctggacggaggcgctgaccttgtttcataaactgaggatgacaggggcaaaaccagatggcattacatttgttggagtcattttggcctgtactcatggaggcttggtggatgaaggcaagctgcttttcaactcgatgagaggggagttcggtcttaagccaagaatcgagcactatggttgcatggttgacctgctggggcgtgttgctaacctagtgatcctttcgaatatatacgcgtcatgtggcaaatgggacggtgttgcccgggtgtggaagctgctaaaggaaaaagatcataagaaatctgctgggtacaacgttattgagttagatggtaggatgcacaagttcctggttgaagataagtcgcatccaagatctgagaaggtatatgacgccctggatagcatcacgctggccatgaagcttgtcagctcggaaaatcctgaagtggaaagctga

SEQ ID NO: 142078 - DNA, 1073 bp, Zea Mays
atggaagaaggcaacaacgaatcagccgagctcccccctggcacaaccgccagtgtccacaacaaggcgctgtcggggaccagggaggaggtggagcgcggccgcgaggcggcggtgcaggcgtggctggcgtccatgccgctcggcgaggagctggagcggctccgcaccgaactagccgcggccaagacccgcctcgccgcgacggcggccgagataccgctgctcaagtcgcggatcgagtccacgaacgccgcggtcgccacgaggcaggaggcggcggcgaggaagaaggccgccgcggaggacctccgcctgcgcgtcgacggggcgcgcgccgagctccggcggctgcgcgcggaggtcgcggcgtcgaggggcgccaaggacgcgctggagcggcgggtgctcgtccggcgccaggccgcgcgggcgcttcagctggcggagcgcgccatcgcggcggaggcccacgcgctggcgtggtccgcggccgcggccgccgagctggccgcgcgcgcgcgcggcgacggggaggaggacccccaccacgacgtcgtggcgctgccggcgcggaagctccaggagctgcgcaggctcgtggacgccgaggagcggaaggccgaggcgcgcgtcgaggaggccgaagcagcgcggcacgcggcgaaggcgcgaagagcggcggccttggcgaggctgaacgcagcgcgcgccaagaggcgagtggctgctgaagctgaagctgagcttcgtcgccgcgcggacggggacgacgcccgcggcacgcgggcaagcgcgctggcccggaggagccggagccggagcgggaggtcgtgcttcgcggtgaagaagctgcggaggttcctgggcaacctaaccaaggcttgagcgttgaggtggctgcgggcgttcagaagagttcttcctgagccgaattgtggttggaggtgagcgtttcaatgggcttttgacaaataactagtagcgtcgtggttcaaaaaacatttacaagagatctttgtgtgcaattatattacgcaaggtttttgcataaagggaggcgatccatacag

SEQ ID NO: 142079 - DNA, 893 bp, Zea Mays
aatttggcccggggcttcacttaatcctggttccgccactgcagcgcaacctcgatcgcgcacagaggcccattccgccgaggagtggcacgaggagagacgacaggtgcggggatggggtcagttttgctgccaacgctgcggctgaagagtgaggtcgacgccgccatccgcgacaccctcgataaggtcctcgttctccgatttggtcgcgccaccgacgccacttgcctccacctagatgacatcctggataaatcttcttgggacatatccaagtttgctatggtagcattagttgacatggactctgaggagattcaagtttacattgactactttgacattactttggttccagcaaccattttcttcttcaatgcccatcacatgaagatggattcagggacacctgaccacacaaaatggataggttcttttagcagcaaacaagactttatcgatgtagttgaggcaatattcagaggtgcgatgaaaggcaaactgatagtgtcttgcccccttcctcctgagaggataccaagattccagcttcttttcaaggatgtctgagaaaactgcagctcatcacgtgcacacaatcagctacctagcccaaggtaagtagaaaagctgaagcttctataagagaagcacaacagaggggacaatgcaggcgtgttcgtgcttcgaagaaacctaattgtgctggaaacagccattttcattctcaagactgtttgcgcaaatctctgcaataatctaatgttgtacttgtccatattgcatgtttaggtttgtatttaatcacgttcatcaaatatgacgggtatagatttcttgtttggtgttaataccttgctactagtttatattgagttttggcattttac

SEQ ID NO: 142080 - DNA, 908 bp, Zea Mays
aatttggcccggggcttcacttaatcctggttccgccactgcagcgcaacctcgatcgcgcacagaggcccattccgccgaggagtggcacgaggagagacgacaggtgcggggatggggtcagttttgctgccaacgctgcggctgaagagtgaggtcgacgccgccatccgcgacaccctcgataaggtcctcgttctccgatttggtcgcgccaccgacgccacttgcctccacctagatgacatcctggataaatcttcttgggacatatccaagtttgctatggtagcattagttgacatggactctgaggagattcaagtttacattgactactttgacattactttggttccagcaaccattttcttcttcaatgcccatcacatgaagatggattcagggacacctgaccacacaaaatggataggttcttttagcagcaaacaagactttatcgatgtagttgaggcaatattcagaggtgcgatgaaaggcaaactgatagtgtcttgcccccttcctcctgagaggataccaagattccagcttcttttcaaggatgtctgagaaaactgcagctcatcacgtgcacacaatcagctacctagcccaaggatcacaggatctgagtggtgaggaaatatcaccatcttgtgtgtgtgtgtgtgtgggtgggtggatggagttcgtagctggagttgtcctgcgagattgaagcgaggtgttcctaggagccagaaggggcaccgcattggtttctgatgtacgcacactaacggtttctgaaatttgagctagtaatctgaatgaaatccaaaccgaataaccgatacagatttttgcttaccaccctaccttccgtggggaagaaatacagcagtctgtcagtcagtcaggaaaaa

SEQ ID NO: 142081 - DNA, 2143 bp, Zea Mays
atggatttctccggcggcggcggcggcggccgcagccgcgccgagccggcccggtggctcgagatcgcccggaagctactcgccgcgcgggacctggtcggctgcaagcgactggcggagcgcgcggttgaggctgacccgtacctccccggtgcggacgagctcctcgccgtcgccgacgtcctcctcgcctcccagcgcctgctcccctccggccgccccgatccggtcggcgtgctccagctccagcccgccccgggccttgaccccgccgccgccaagcgctccttccaccgcctctcgcagctcgtgtcttccccgcgtaatccccgtcccgccgcggacaccgctcttcatttcatccaagaagcctttgctgatctctccagcaacgcctccgctgatccacctcctgctcctgctcctgctgccgctcctgttcctgttcctgcccctgcccctgctgcccctcctgctcctgttcctgctcctgctgccgctccttctcttatcccagctcctgctcctgtttctggggacgccttggcctcggctgatggcaatgcgttctggacggtgtgcccctactgctgccatgtgtatcaataccagcgtgcgctggtggggcgcgcgctcaggtgccagagcgcgggttgccggcgagcgttcgaggccacagagatcccgaacgcgccgcctattgtgcccggcacagacatgtactactgcgcgtggggcttcttccccatgggtttccctaaggcagctgatttgagcaccaactggaggccattttgccccatgtttcctgggaattctgaatctccgctgcagccagcacctgcggtcactgtgaatgttgatgtacagaatcttgagaataatggcggcactgatgtacaaaatgttgagaataatggcattgacgacaattcaacgccagcaagtgtgcagcccccaggtaagagtggtgacattgaccgtgcagcaggtccatctagaggaaggatgaagaagacaacagcccgcaagaaagttggtgctgtatctaagaagcacagttccagtggcgtggacagtggcattgagccatctatgcttggggcagattcgttgaatgggaatgcaggaagtgggcagacagtgggtactagagagatcaacataaatgaggtggcaatgccaactgatagcgccacaatgcttaattttggcggggatgaggatatcaggtttgatttggatgttgatgcgactgatgctatattggggaatttgcacaacttaccattcttgagggaggatggcaataacagaaggatgttttagttgtcacaatgtgctcagtgtaggtgttcgtagaagtggtgtgtatcctattgttgaaggaattcctacttagtctgatccttcactactcccttggttccattgccaccatttctcatacttattctgtgttttgtagttagctagtctgctgtaccatctgggtcaataatcttcacaaatctgcagagtaaagtaccccaaattagttggggacatgtaatatgtgccacccgtgattaacataaggaggtaaatggggtgaatggaataacgcactcgacatggatgattgatgaagcttttagttttataagggttacagtgcaacagaggtcatatggagcactagcagataaatgccatttacaataatgtctcgatcaaaaactctacgcatttcttgccatcagttgattgccttcactagtcatcgaaggagctgaataagagaagtggtatggacgtgtgcctcagtttaggggccatccgtggcttgtagcctataattctttctttgttgtttgtcatatgccaagctattgatttcctcgcctgagctaatttttagtcaaacaccccctaaatggaatttgtctgtgcccaattttccatcgtaagcggaaaatagtaactgtggttggcagctagaatatttatttgtcaaccgtgttactgtagctcctggaagcattgccttcgtagtcatcacgagctccaatgctccatgacctcaaactgtactttgtatattggtatgaatttcaactacagcagcaaggatataaacaagaaaaaaagctccgaattccat

SEQ ID NO: 142082 - DNA, 662 bp, Zea Mays
gagccaaactcgagctggctcgtgagttactcgcgagccaaacgagttgtgcaaatatgcaagaaaagcaacttgatgctgtgatggaggagggacaaggggaggaattggaggttatgttgtcggaatcagatgatagtgagtttgataatgatgatgagtttccaccttccactgatggagatgaattgtcaaaaactgaaaagacgaagagaggaggaaagaggtcaagagctggtattcagttgtccccctccaagtgcaaggcgaatagagtaaagagggctggttgctggaagtattttaaggtggtcactgttgcttctagaaaggaacttggggttatggagacaaaagccaagtgcaagttctgtcatagatcttatttgtaccatcaagggggcagcactacaacactaaaccgacacctagacaagtgcacacagtatttgaacaagctggcacaagctaagaaaaatcttgctcaaggaagactattaaaaatgaatgcatgaagatctatgaatctgagaaagaactactcaagaagagtcttagagaggctgaatcaataagtttaactactgatttatggacatcaaatcaaaacattcagtatatgtgtttagtggcacattatgttggtgttgattggatcttgc

SEQ ID NO: 142083 - DNA, 3970 bp, Zea Mays
ccgtcgatctctcaagctgccaccgctccctgctcccttgactcctccctcactctcctcatggctacgtagcaagtgcgtgcgatgggcgggcgccgggggtggggattgcatcgcggggcgagcgcaggggcatcattcgtggggacgggcgcgggggcacgacgcgggggcaggcggggacacggtcgtgtgtttctcggcgacgggcgggggctggttttaggggaggggaggcgtcgttcgcggcggtcgggcgggtcgtggcgtttgcggcgggcgggcgggcgggcgggcaggcaggcgtagggaggcgggagcggtctacaccattctcttaatagttagtatatagagatttttaactagcatccaacattcaatgtcatatgtgctaaaatttagcattggaaatgaacgggcctgtaccagcgacgaagcgacaatcctacccgttccttggttcgtctgcatccatcgcggccctacgttcctttgcagcctttacccacggcccagcctctgtcgccgttttcgagcgaggcaccggcggccgcatagaaactcagcttccgtctctaaaccctcaaccctagcccgtcatgtggcgccgtctccccacccgccgcctcgcctccgccctcctctcctcctccccactccagcgcgccaccgccacgcacgctcctcctctcgagcgccacttccccactacggcctccggtctccttccgccgtcactcttgcccccgtggcagcaggagccgcgatggttctcatcctccgccgccgcggaggctgtgtcctcggaggatgccgaggagctgcaccacgcgatagaggagatcgtccgggcgcagccgagtccgaatctgcctcaacctcaggcggtggcagaggagcatcaggcacccgggcgggaccaccgtagccggcataggagaagtgggcgcgggcggcatgcggaagtgttggcggcggagcacgggatgacataccacaggtacacctcccttcgccggcgacaaatccgcatcgagacggaggcgtgggagcaggccgccaacgagtaccgtgagcttctcgcggacatgtgcgagcagaagctcgcccctaacctaccctacgtcaagtcgctctttcttggctggttcgagccgttgcgggatcagatcgccactgagcaagaacttgtggcagaccccgggtcccgggcctcgcacggtccatttttcagtatgctccctgcggacatgatggctgtcatcaccatgcacaagctcatggggttgctcatgacgggcagtggggacggcagtgttcgagtcatccaggccgcgtgccagattggcgaggcaattgaacacgaggttcgaattaacagatttctggagaagacaaggaagaaaaacaacaaagagatggaaaatgaagaagaagctggtgacacaaacattgctatagaacaacagcgtctaagaaagaaagtcaccgacctaatgaaaaagcaaaagttacggcaagtcaggaacatagtgaagaatcaagataaatccaggccgtggggtcaagatgctcatgcaaaagtcggtagtcgtttgattgatctttttattggaacagcacatatacaaccaccagcaagccaatcatcagatggtctgcctgacatccgtcctgctttcagacatgaaatgagaacaatggtgaaagaacagcagaagagtagtcgcagatatggtgtgatcaagtgtgatccactggtccggcaaggcttggatagaacagcaaagcacatggtcattccgtacatgcctatgttgattcccccaatctgttggacaggatatgacaaaggagcacacctctttttaccatcatatgtaatgcgcacccatggtgctcggcaacagagggacgctgttaaaagagctccaagggaacagatgcaatttgtttttgaggccttgaatactcttgggagcacgaagtggagggttaacaaaagagttcttagcattgttgacagaatctggtcaaatggtggccggcttgctgacttggttgatcgtactgatgttcctgtaccggagaagcctgacactgaagatgaaaccttgctaaagaactggaaatggcacttgagggcagccaagaagaagaacagtgaaaggcattctcagagatgtgatgttgaactcaaacttgctgttgctagaaaaatgaaggatgaagagggattttactatccacacaaccttgattttagaggtcgggcttatccaatgcacccttatctgaaccatttgggttcagatctttgtcgaggggttctagagtttgctgaaggtcggccacttggcaagtcaggattgcgttggctgaagatacaccttgcaaatttgtatgctgctggtgttgataagttgtcatatgatggccggattgcatttgctgagaatcatttggaggaaatatttgattctgctgataggcctttagaaggcagacgatggtggcttggggctgaagatccattccagtgcctggcagtatgcatgaatctcactgaagctttaagaagctcgtctccagaaacaacaatctcacatattcctgtgcaccaggatggctcttgtaatggtctgcaacactatgcggcacttggaaaggataagttgggagccattgctgttaacttagtcgctggagaaaagcctgcagatgtttacaccggaatagctaacagggtgatggaaattatgaggatggatgcacaaaaagatccttctgtagaacctgatgcagctcgtgctcgtctgatagttgaccaggtggacagaaaattggtgaagcaaactgtgatgacatctgtgtatggtgtcacatatattggagcacgtgaacaaataagaagaagactaaaggagaggggggtcattcctaatgactccgaactgtttggtgcatcatgctatgctgctaaggttactcttacagcacttggtgagatgtttcaagctgcccgtagtatcatgaactggcttggtgactgtgccaaggtaattgcttgtgaaaatgaaccagtgagatggacgactcctcttgggctcccagttgtacaaccatatcgcaaacttgggaggcatcttattaaaacgtcattgcaggttttgacccttcagcgggagacggataaggttatggtgaagcggcagaggacagctttccctccaaactttgtgcattctcttgatggttctcatatgatgatgactgctgttgcttgcaaaaggcaaggtctgaattttgcaggagttcatgattcatattggacccatgccagtgatgttgatacaatgaataaaatactccgggaaaagtttgtggaactctatgatacacctattctggaaaatctgttggagagctttgagaaatctttccctaaattaaaattcccaccgttgccggagaggggagacttcgatatgaaggaagtccttgagtctacgtattttttcaactagcacaatcaatgttaacagttgcattatacacgctgctgcccggacatatctgagttctgagtgtagatctaccaactcgaatgatgaaagctaggtcatacatgagcataacccgaagagtggctttgcagaagttatcagaagctaagttggtactctgagcattcacaaatgcatcggcatcatttatcgcgttgaagttggcaatgaggtttgctaaataaaagtgggaaccatatcaaagttaaacgagaatccctgtaaatgtaattatgtaatttttttttgtctttagtgtttttattttccttgatcttggtactgtcgagagaaattcggctgaccggtagtttgtcggctggtgctgagtagagattatttcatactttgtagtttaacaatataatttagtaataaagtgatatactagtatttttctc

SEQ ID NO: 142084 - DNA, 849 bp, Zea Mays
cttaatgatgattcactgaggaaggaattttattttggtgtatgaattgcttgatgaagtcattgtaagtactctacaccatcttgactggtgccattctgaactcatatcctttgtgacctggtttttacgtcactagcaaaacttaatgtgttctttaacaatgaagttgttggcttccatggtgatcagtataattcatctgttcatgggaatgcttactaccatcttctattagcatctgtatggttttgctaacaagttttattgtgcaatcaggattttcgaaaacccgcaaacaacctctactgaggttctgaagtcgtacatattcaatgaacccattatggttgatgctggaaggctgccaccacttggtcctgctgctatgttcatgcaaggcacaaagcgtatgcctgttacagctgttacaaaatctgtggttcttactgagccagggaagaatagggaggaaaaaatttttgttgatatcattgagagaataagtgtgacattcagctcgagtggctatatacttacatctgagattgacggaacaattcaaatgaaaagttacctcaccgataatccagaaatccgttttgctctcaatgaggatttgagcattggaagaactggatcttcatacaattacagttcttctggaggaggaacagtcatccttgatgattgcaagtttgcaacgtccatgagtcagtacatctggacagttttgacattgacagaattttgagtttaatgccacctgatggagaatttgctgtaatgaactaccggatgacccaagaatttaagccgcctttctgtgtaaccactctaatttgtgag

SEQ ID NO: 142085 - DNA, 983 bp, Zea Mays
cgggaaccggttccttcccggtggcctgtggaaggtggactcaggcgaaaggtggagcaacaacccacacccacgcacggacgaacggtgggcctagacaaactagaagatgggaccatgtaagttagtatatcaggcccaatgaacccttcgccagcccaatgggccttacatttccgtacttcctttctcttctcggctcccgactcccccgagtcgtcgtcttgtcgggtcttcaagccacaccaaaccacactgcgacacacagtaggcgaggcgaaggagaggcaaggcggcgcggcgggcaaggtacacctctttcttctcctagatctcacaagagtgatggccgatctgttctcgtggggatcccgtgccatttcgtcgaccgtcctcgcatgatgtttgacgatcaagacctgggcttctttgccaatttcctgggcatcttcatctttgtcttggttattgcgtaccacttcgtgatggcagacccgaagtacgaaggaaactgatgtcctctagtgcaaagatcctattatctgcaggccgaaatagggctatactgttagctaatgctagtgagatcgcttgacactttgagtgcatatcatggaagctggacatgcagttcctggcattttggttttgcccatgttttaatctgctgaattagtaaatcctggagaattcaaaagcgttttcaagtactgcagttggtggttgtttctggtcctagtgtatgcatgccagaatcttatgaataatattctttgttttgttgcctatttagctgtttagttggttgttagcctgtcaagaaactggggaacggctccgttactagactacattgagtcgtctctcacattggagtctgggagcaccaccaggcagaggcagccatgttcttatgttgttttgtgctgtctgctcaagctttcgttcatctcacctgaggcctcccttcgttgaagagagag

SEQ ID NO: 142086 - DNA, 891 bp, Zea Mays
cgggaaccggttccttcccggtggcctgtggaaggtggactcaggcgaaaggtggagcaacaacccacacccacgcacggacgaacggtgggcctagacaaactagaagatgggaccatgtaagttagtatatcaggcccaatgaacccttcgccagcccaatgggccttacatttccgtacttcctttctcttctcggctcccgactcccccgagtcgtcgtcttgtcgggtcttcaagccacaccaaaccacactgcgacacacagtaggcgaggcgaaggagaggcaaggcggcgcggcgggcaagatgtttgacgatcaagacctgggcttctttgccaatttcctgggcatcttcatctttgtcttggttattgcgtaccacttcgtgatggcagacccgaagtacgaaggaaactgatgtcctctagtgcaaagatcctattatctgcaggccgaaatagggctatactgttagctaatgctagtgagatcgcttgacactttgagtgcatatcatggaagctggacatgcagttcctggcattttggttttgcccatgttttaatctgctgaattagtaaatcctggagaattcaaaagcgttttcaagtactgcagttggtggttgtttctggtcctagtgtatgcatgccagaatcttatgaataatattctttgttttgttgcctatttagctgtttagttggttgttagcctgtcaagaaactggggaacggctccgttactagactacattgagtcgtctctcacattggagtctgggagcaccaccaggcagaggcagccatgttcttatgttgttttgtgctgtctgctcaagctttcgttcatctcacctgaggcctcccttcgttgaagagagag

SEQ ID NO: 142087 - DNA, 946 bp, Zea Mays
agcaggcgtcgaccttcgttgccggagtgcgcgcggcgagcagccgagctgctgccaccgtggctctttgtctgtggaggggggactccgggccatggcttctttagaataataaatgtttgtcgagtcgctttggcttctagaacaatcgcggcgtgtggagtcctgaaacctgttgataaaatatcgtgtgaacgctattttttgtgctgacgtggacgaacgtggttgcacattagcgtcctgctttgtattataattgagtgaaacattcctcaatcgcttgttgccaattaccaaaatattgtgcataacttgctggatattactggtaaccaaaatctgtttgcattcttaatttcagatgtttgacgatcaagacctgggcttctttgccaatttcctgggcatcttcatctttgtcttggttattgcgtaccacttcgtgatggcagacccgaagtacgaaggaaactgatgtcctctagtgcaaagatcctattatctgcaggccgaaatagggctatactgttagctaatgctagtgagatcgcttgacactttgagtgcatatcatggaagctggacatgcagttcctggcattttggttttgcccatgttttaatctgctgaattagtaaatcctggagaattcaaaagcgttttcaagtactgcagttggtggttgtttctggtcctagtgtatgcatgccagaatcttatgaataatattctttgttttgttgcctatttagctgtttagttggttgttagcctgtcaagaaactggggaacggctccgttactagactacattgagtcgtctctcacattggagtctgggagcaccaccaggcagaggcagccatgttcttatgttgttttgtgctgtctgctcaagctttcgttcatctcacctgaggcctcccttcgttgaagagagag

SEQ ID NO: 142088 - DNA, 1848 bp, Zea Mays
actggggagatccctcctcactctcactttacccttctgccattttccaacacacgctatattataaaacatacccaaagagatcgtcgcctcgatttctcttcgagtgccaagcagtactgctagttctacttctgtacttcagcagtaggaggccgctgtttgctacgattttgactgactgagatgggaatcctctgcctcggtgcttcctccacactgctctgcggggaggacaggaacaacgtactcggcctcggctgcggcaacgagctggtggaggtggggagcggccatgacggcttggactccgtcgtcggcgccgtgttccccgtggacacagatgaggccgtgcgggcgttgttggagaaggagacggaccacaagcctcaagacggctatgcggagaggctggagcgcggcggattggagtactcctggaggagagacgccatggattggatttgcaaggtccattcgtactacaggtttggaccactcagtctttaccttgctgtgaattacctggatagattcctctcctcatatgatctcccacacgataagccttggatgcgacagttgttgtcagttgcttgcctagcactcgctgtcaagatggaggagaccgtgctccctcttcctgtggaccttcaggtctgcgatgtgaaatttgagttcgaagcaaggactattgggaggatggagcttcttgtgctggccaccctgaaatggagaatgcaggctgtgacccccttcactttcatcagctacttcctcgacaagttcaatggtgggaagccgccgagtttggcactagcgtcacggtgcaccgatatcataattggcacactcaaaggctctacattcttgtcattcagaccatctgagattgccgcggcctcagctctagcagcagtttctgagaatcaggttgttggctcctcgagtgctctttcagcatctgaagtccctataaataaggtgatgattgctagatgctatgagctgttgcaagagcaagcgctggtgaggaagacagggcacgtcaatggaagcccttcagtgccgcagagcccgattggcgtgctggatgcaacatgcttcagctttaggagtgaagatgcaagactagtatcatcgcaatcaaacaacatcagtagtagtagtagtaacgacaatcaagtttctaagaggagaaggctaagcatatcaccaatctgagtggatcaaatctctgttggcagtgtcgcattgtgcgcttggttatgcattgatcatcttaacctcagagtttgtcagagcaacaagtagtggtacaaaaggacccagtgaagcattgtaacaagcagaggatggtgacagtaataagttagaagcagtctgttgatctctgagacgaaagaggtgacgaggaacgtttcttcctctagtaactttgaatccccttcctccccggcacctttgttttgttcctttttcctttttatcggtatctcaaggcatttgtggggagatatgtggatatgagattggagacgtgaggattagagagagagagggagggagggaggggagggagatcaacaacaacaaaaatcaggtttgttcctttgttctctgccaatatacaaaaaaactgtcgtgcgaaatcctccggatgtttcagtttattttgcttctgtagtctgaaaaatagccgtgctgattcatcgattgcattctcttatgactggttgactgcttgtttgtattacttgtccatgcctgacatttttgtgaagagaaccagccataggtacaagttatggcatggctttgcaaatataaagaaaaggagcaggcaaa

SEQ ID NO: 142089 - DNA, 768 bp, Zea Mays
acgtctctatcctcccacttcgacccggccggccctatcaaaagctggccccttccacagcgcactccctcaccttcctccacggctccaccatcccctctcccctgccctgcccccaccgccccgcttccttccgccttgctccgttgcttcctcccaccacagtccactccactcgccggccctgcagctcagtatttgactgagactggtggtggagctgctagcagcgagcctgctacttcctggtcctgacggtgcgttcagacctcagaccagtgccgacgacgagctgtgaggagagggcaaggaaacaagcctgtgaggaaggcggcgatggagaggtacgaggtgatcaaggacataggatcgggcaacttcggggtggccaagctggtccgggacgtcaggaccaaggagctcttcgccgtcaagttcatcgagcgggggatgaagattgatgagaatgtccaaagggagatcatgaaccacaggtcactgaggcatccaaacatagttaaatttaaggaggactacttggtggcaacttgtttctatgggtgttggatacttggatgtctatcagcattcagcagctatgggtagcatgcactagtgccatgccccttgagtcggggaagtgcttatggcatttgggcctcggagttttttttgccaataactcatatttgttgagtggctataatgcaatgactgagtgacagttccttagcagttagcagtctgctttgtcctcttgttcttctg

SEQ ID NO: 142090 - DNA, 1690 bp, Zea Mays
acgtctctatcctcccacttcgacccggccggccctatcaaaagctggccccttccacagcgcactccctcaccttcctccacggctccaccatcccctctcccctgccctgcccccaccgccccgcttccttccgccttgctccgttgcttcctcccaccacagtccactccactcgccggccctgcagctcagtatttgactgagactggtggtggagctgctagcagcgagcctgctacttcctggtcctgacggtgcgttcagacctcagaccagtgccgacgacgagctgtgaggagagggcaaggaaacaagcctgtgaggaaggcggcgatggagaggtacgaggtgatcaaggacataggatcgggcaacttcggggtggccaagctggtccgggacgtcaggaccaaggagctcttcgccgtcaagttcatcgagcgggggatgaagattgatgagaatgtccaaagggagatcatgaaccacaggtcactgaggcatccaaacatagttaaatttaaggagttatggaatatgctgctggtggtgagctatttgaaaggatctgtaatgctggaagatttagtgaggatgaggcgagatttttcttccaacaactgatttcaggagttagttattgccactcaatgcaaatatgccatagagatttgaaactagaaaacactctcctggatgatagtatagcacctcggctaaagatatgtgattttggttactccaagtcctctgtgctgcactctcaaccaaaatcaactgtcgggacaccagcttacattgctcctgaggtccttgctagaaaggaatatgatggaaaggtcgccgatgtttggtcatgtggagttactctgtatgtgatgcttgttggtgcctatccctttgaggaccccgacgaaccgaagaatttccgcaagacgcttactcggattatcagcgtccagtacgcggttcctgattttgtccgagtttcaatggagtgcaggcatctgctgtctcggatctttgtggcgaaacctgagcaacggataaccatcccagagatcaagaaccacccatggttcctgaagaacctgcccatcgagatgaccgacgagtaccagatgaacctacagctagtcgacatgaatgtcccctcgcaaagcctggaggagatcatgtccatcatactggaggcccggaagcccggcgacgggctgaagcatgcgggacagctccccggccttgggagcatggagctggatgacattgatgttgacgacatagacgttgaggacagtggcgactttgtatgtgccttgtgacgcggttcaggctgtccggcaccgttgctgcggtggactctcccccactctcctggtctttgtgtcttgctgttattccatgttgtttgtttcagcgagctccgagctcccattttgttgttgtaatatcacatgttttgtgtaaccaaggtagtgacgctgtggataaataatagacgttatgtgttgtattcttgctgaattgttgttcagctccttctgtttgccctgtatgaactgggcagtttcatgagtaccacaatgtgtatgttgatggctctgtcttcccttgtctcggcaatgtgttttttcttgtatttttgctagaagcaatcttatgagttacgagtactatttaccaccct

SEQ ID NO: 142091 - DNA, 1713 bp, Zea Mays
atcctcccacttcgacccggccggccctatcaaaagctggccccttccacagcgcactccctcaccttcctccacggctccaccatcccctctcccctgccctgcccccaccgccccgcttccttccgccttgctccgttgcttcctcccaccacagtccactccactcgccggccctgcagctcagtatttgactgagactggtggtggagctgctagcagcgagcctgctacttcctggtcctgacggtgcgttcagacctcagaccagtgccgacgacgagctgtgaggagagggcaaggaaacaagcctgtgaggaaggcggcgatggagaggtacgaggtgatcaaggacataggatcgggcaacttcggggtggccaagctggtccgggacgtcaggaccaaggagctcttcgccgtcaagttcatcgagcgggggatgaagattgatgagaatgtccaaagggagatcatgaaccacaggtcactgaggcatccaaacatagttaaatttaaggaggttgtgctaactcccacacatttggccatagttatggaatatgctgctggtggtgagctatttgaaaggatctgtaatgctggaagatttagtgaggatgaggcgagatttttcttccaacaactgatttcaggagttagttattgccactcaatgcaaatatgccatagagatttgaaactagaaaacactctcctggatgatagtatagcacctcggctaaagatatgtgattttggttactccaagtcctctgtgctgcactctcaaccaaaatcaactgtcgggacaccagcttacattgctcctgaggtccttgctagaaaggaatatgatggaaaggtcgccgatgtttggtcatgtggagttactctgtatgtgatgcttgttggtgcctatccctttgaggaccccgacgaaccgaagaatttccgcaagacgcttactcggattatcagcgtccagtacgcggttcctgattttgtccgagtttcaatggagtgcaggcatctgctgtctcggatctttgtggcgaaacctgagcaacggataaccatcccagagatcaagaaccacccatggttcctgaagaacctgcccatcgagatgaccgacgagtaccagatgaacctacagctagtcgacatgaatgtcccctcgcaaagcctggaggagatcatgtccatcatactggaggcccggaagcccggcgacgggctgaagcatgcgggacagctccccggccttgggagcatggagctggatgacattgatgttgacgacatagacgttgaggacagtggcgactttgtatgtgccttgtgacgcggttcaggctgtccggcaccgttgctgcggtggactctcccccactctcctggtctttgtgtcttgctgttattccatgttgtttgtttcagcgagctccgagctcccattttgttgttgtaatatcacatgttttgtgtaaccaaggtagtgacgctgtggataaataatagacgttatgtgttgtattcttgctgaattgttgttcagctccttctgtttgccctgtatgaactgggcagtttcatgagtaccacaatgtgtatgttgatggctctgtcttcccttgtctcggcaatgtgttttttcttgtatttttgctagaagcaatcttatgagttacgagtactatttaccaccct

SEQ ID NO: 142092 - DNA, 1782 bp, Zea Mays
aaaagctggccccttccacagcgcactccctcaccttcctccacggctccaccatcccctctcccctgccctgcccccaccgccccgcttccttccgccttgctccgttgcttcctcccaccacagtccactccactcgccggccctgcagctcagtatttgactgagactggtggtggagctgctagcagcgagcctgctacttcctggtcctgacggtgcgttcagacctcagaccagtgccgacgacgagctgtgaggagagggcaaggaaacaagcctgtgaggaaggcggcgatggagaggtacgaggtgatcaaggacataggatcgggcaacttcggggtggccaagctggtccgggacgtcaggaccaaggagctcttcgccgtcaagttcatcgagcgggggatgaagattgatgagaatgtccaaagggagatcatgaaccacaggtcactgaggcatccaaacatagttaaatttaaggaggttgtgctaactcccacacatttggccatagttatggaatatgctgctggtggtgagctatttgaaaggatctgtaatgctggaagatttagtgaggatgaggcgagatttttcttccaacaactgatttcaggagttagttattgccactcaatggtatgttctctccagctaacatgtgattagtaacttgaatagaacaaagccgttcgcttcagcttatcagctggtgtagctgctgttgctgcagctatttctatagtagatagaagtgtaggggctgcagccgcagctatagctatagcttcatctgtgagtctgacataatgatatttttgttcccttgctgcagcaaatatgccatagagatttgaaactagaaaacactctcctggatgatagtatagcacctcggctaaagatatgtgattttggttactccaagtcctctgtgctgcactctcaaccaaaatcaactgtcgggacaccagcttacattgctcctgaggtccttgctagaaaggaatatgatggaaaggtcgccgatgtttggtcatgtggagttactctgtatgtgatgcttgttggtgcctatccctttgaggaccccgacgaaccgaagaatttccgcaagacgcttactcggattatcagcgtccagtacgcggttcctgattttgtccgagtttcaatggagtgcaggcatctgctgtctcggatctttgtggcgaaacctgagcaacggataaccatcccagagatcaagaaccacccatggttcctgaagaacctgcccatcgagatgaccgacgagtaccagatgaacctacagctagtcgacatgaatgtcccctcgcaaagcctggaggagatcatgtccatcatactggaggcccggaagcccggcgacgggctgaagcatgcgggacagctccccggccttgggagcatggagctggatgacattgatgttgacgacatagacgttgaggacagtggcgactttgtatgtgccttgtgacgcggttcaggctgtccggcaccgttgctgcggtggactctcccccactctcctggtctttgtgtcttgctgttattccatgttgtttgtttcagcgagctccgagctcccattttgttgttgtaatatcacatgttttgtgtaaccaaggtagtgacgctgtggataaataatagacgttatgtgttgtattcttgctgaattgttgttcagctccttctgtttgccctgtatgaactgggcagtttcatgagtaccacaatgtgtat

SEQ ID NO: 142093 - DNA, 1211 bp, Zea Mays
tccccgcaacttatataaaaaccaatcgtctgtcctctctgccctctcgtccaaaaccctagccctcgcgccgccgcctccttcgccacccagcgctcgagctcctcgctccctgcgagcgcgcgccgcaacgccaccatgaagttcaacatcgcgaacccttccaccgggtgccaaaagaagctggaaatcgatgacgaccagaagctgcgtgccttttatgaccgaaggatatcccaggaggtcagtggtgatgctctgggtgaggagttcaagggttatgtcttcaagatcatgggtggatgtgacaagcaaggcttcccaatgaagcaaggagttttgacttctggtcgtgttcgtcttctgctccatagggggactccctgcttccgtggttatggcaggcgtaatggtgagcgcaggaggaagtctgtccgtggttgcatcgtgagccaagacctatctgttatcaacttggtgattgtgaagaagggtgagaatgatctgcctggtctgactgacactgagaagccaaggatgaggggtcccaagagggcctccaagatcagaaagctgttcaaccttaacaaggatgatgatgtacgcaagtacgtgaacacataccgcaggacattcactaccaagaacggcaagaaggtcagcaaggcacctaagatccaacggcttgtgacacccttgaccctccagaggaagcgtgctagaatcgctgacaagaagaagaggataactaagaagaagtctgaggctgctgagtaccagaagcttcttgcccagaggctgaaggaacagagagaccgccggagcgagagcttggccaagaggaggtccaagctttctgccgccgccaaggcttctgctgccacctctgcttaagaatgttcagtgttttgggatctttgtaaggtctatcttgtaacggcaaaagtgttttgggatctttgtaagctccatagttcacatcacttaagtgtttctgctagtagtggatccacaactatttgcttgcttggctctgagtcacacctgaccgatcaatgcaggtgtcactttgcttttaactgtttacatataaagagtcgagtttcgcacgtggccacctgggtcctgattaatctacccatatagctacgttgggtttagatgcttaggcattcttgtaaattgttttcttaaaactagttttgtttctc

SEQ ID NO: 142094 - DNA, 1297 bp, Zea Mays
tccccgcaacttatataaaaaccaatcgtctgtcctctctgccctctcgtccaaaaccctagccctcgcgccgccgcctccttcgccacccagcgctcgagctcctcgctccctgcgagcgcgcgccgcaacgccaccatgaagttcaacatcgcgaacccttccaccgggtgccaaaagaagctggaaatcgatgacgaccagaagctgcgtgccttttatgaccgaaggatatcccaggaggtcagtggtgatgctctgggtgaggtaaactttgggatgacttatttcttgatccatgactcttgctgatttcatacttaaatataggtgtgatatgtttctttgttttgcaggagttcaagggttatgtcttcaagatcatgggtggatgtgacaagcaaggcttcccaatgaagcaaggagttttgacttctggtcgtgttcgtcttctgctccatagggggactccctgcttccgtggttatggcaggcgtaatggtgagcgcaggaggaagtctgtccgtggttgcatcgtgagccaagacctatctgttatcaacttggtgattgtgaagaagggtgagaatgatctgcctggtctgactgacactgagaagccaaggatgaggggtcccaagagggcctccaagatcagaaagctgttcaaccttaacaaggatgatgatgtacgcaagtacgtgaacacataccgcaggacattcactaccaagaacggcaagaaggtcagcaaggcacctaagatccaacggcttgtgacacccttgaccctccagaggaagcgtgctagaatcgctgacaagaagaagaggataactaagaagaagtctgaggctgctgagtaccagaagcttcttgcccagaggctgaaggaacagagggaccgccggagcgagagcttggccaagaggaggtccaagctttctgccgccgtcaaggcttctgctgccacctctgcttaagaatattcagtgttttgggatctttgtaaggtctatctcgttacagcgaaagtgcctctctacttagatttatgagtaattgttgcttttttgtatgaacatggtaatggcttgtcggggtaccagaggtttactatgttggtttatgctgtgaacgtaagcgagccatattctttggtatgcagtctgaactatatgttaacgtttgggatttttgttaacatgaagtatcctgcttggttgccttgatcctttttgctgtatggttctattggggctttgctgcgatctctcttctcaatccgaagcttggc

SEQ ID NO: 142095 - DNA, 1208 bp, Zea Mays
tccccgcaacttatataaaaaccaatcgtctgtcctctctgccctctcgtccaaaaccctagccctcgcgccgccgcctccttcgccacccagcgctcgagctcctcgctccctgcgagcgcgcgccgcaacgccaccatgaagttcaacatcgcgaacccttccaccgggtgccaaaagaagctggaaatcgatgacgaccagaagctgcgtgccttttatgaccgaaggatatcccaggaggtcagtggtgatgctctgggtgaggagttcaagggttatgtcttcaagatcatgggtggatgtgacaagcaaggcttcccaatgaagcaaggagttttgacttctggtcgtgttcgtcttctgctccatagggggactccctgcttccgtggttatggcaggcgtaatggtgagcgcaggaggaagtctgtccgtggttgcatcgtgagccaagacctatctgttatcaacttggtgattgtgaagaagggtgagaatgatctgcctggtctgactgacactgagaagccaaggatgaggggtcccaagagggcctccaagatcagaaagctgttcaaccttaacaaggatgatgatgtacgcaagtacgtgaacacataccgcaggacattcactaccaagaacggcaagaaggtcagcaaggcacctaagatccaacggcttgtgacacccttgaccctccagaggaagcgtgctagaatcgctgacaagaagaagaggataactaagaagaagtctgaggctgctgagtaccagaagcttcttgcccagaggctgaaggaacagagggaccgccggagcgagagcttggccaagaggaggtccaagctttctgccgccgtcaaggcttctgctgccacctctgcttaagaatattcagtgttttgggatctttgtaaggtctatctcgttacagcgaaagtgcctctctacttagatttatgagtaattgttgcttttttgtatgaacatggtaatggcttgtcggggtaccagaggtttactatgttggtttatgctgtgaacgtaagcgagccatattctttggtatgcagtctgaactatatgttaacgtttgggatttttgttaacatgaagtatcctgcttggttgccttgatcctttttgctgtatggttctattggggctttgctgcgatctctcttctcaatccgaagcttggc

SEQ ID NO: 142096 - DNA, 1208 bp, Zea Mays
tccccgcaacttatataaaaaccaatcgtctgtcctctctgccctctcgtccaaaaccctagccctcgcgccgccgcctccttcgccacccagcgctcgagctcctcgctccctgcgagcgcgcgccgcaacgccaccatgaagttcaacatcgcgaacccttccaccgggtgccaaaagaagctggaaatcgatgacgaccagaagctgcgtgccttttatgaccgaaggatatcccaggaggtcagtggtgatgctctgggtgaggagttcaagggttatgtcttcaagatcatgggtggatgtgacaagcaaggcttcccaatgaagcaaggagttttgacttctggtcgtgttcgtcttctgctccataggggcactccctgcttccgtggttatggcaggcgtaatggtgagcgcaggaggaagtctgtccgtggttgcatcgtgagccaagacctatctgttatcaacttggtgattgtgaagaagggtgagaatgatctgcctggtctgactgacactgagaagccaaggatgaggggtcccaagagggcctccaagatcagaaagctgttcaaccttaacaaggatgatgatgtacgcaagtacgtgaacacataccgcaggacattcactaccaagaacggcaagaaggtcagcaaggcacctaagatccaacggcttgtgacacccttgaccctccagaggaagcgtgctagaatcgctgacaagaagaagaggataactaagaagaagtctgaggctgctgagtaccagaagcttcttgcccagaggctgaaggaacagagggaccgccggagcgagagcttggccaagaggaggtccaagctttctgccgccgtcaaggcttctgctgccacctctgcttaagaatattcagtgttttgggatctttgtaaggtctatctcgttacagcgaaagtgcctctctacttagatttatgagtaattgttgcttttttgtatgaacatggtaatggcttgtcggggtaccagaggtttactatgttggtttatgctgtgaacgtaagcgagccatattctttggtatgcagtctgaactatatgttaacgtttgggatttttgttaacatgaagtatcctgcttggttgccttgatcctttttgctgtatggttctattggggctttgctgcgatctctcttctcaatccgaagcttggc

SEQ ID NO: 142097 - DNA, 1362 bp, Zea Mays
cgggctagatcgatccacgcaacttatataagaaccaatcgtctgtcttctctgccctctcgtccaaaaccctagcccttgcgccgccgcctcctccgccacccagcgctcgagctcctcgcgtcctgcgagcgcgcgccgcaacgccaccatgaagttcaacatcgcgaacccttccaccgggtgccaaaagaagctggaaatcgatgacgaccagaagctgcgtgccttttatgaccgaaggatatcccaggaggtcagtggtgatgctctgggtgaggagttcaagggttatgtcttcaagatcatgggtggatgtgacaagcaaggcttcccaatgaagcaaggagttttgacttctggtcgtgttcgtcttctgctccataggggcactccctgcttccgtggttatggcaggcgtaatggtgagcgcaggaggaagtctgtccgtggttgcatcgtgagccaagacctatctgttatcaacttggtgattgtgaagaagggtgagaatgatctgcctggtctgactgacactgagaagccaaggatgaggggtcccaagagggcctccaagatcagaaagctgttcaaccttaacaaggatgatgatgtacgcaagtacgtgaacacataccgcaggacattcactaccaagaacggcaagaaggtcagcaaggcacctaagatccaacggcttgtgacacccttgaccctccagaggaagcgtgctagaatcgctgacaagaagaagaggataactaagaagaagtctgaggctgctgagtaccagaagcttcttgcccagaggctgaaggaacagagggaccgccggagcgagagcttggccaagaggaggtccaagctttctgccgccgtcaaggcttctgctgccacctctgcttaagaatattcagtgttttgggatctttgtaaggtctatctcgttacagcgaaagtgcctctctacttagatttatgagtaattgttgcttttttgtatgaacatggtaatggcttgtcggggtaccagaggtttactatgttggtttatgctgtgaacgtaagcgagccatattctttggtatgcagtctgaactatatgttaacgtttgggatttttgttaacatgaagtatcctgcttggttgccttgatcctttttgctgtatggttctattggggctttgctgcgatctctcttctcaatccgaagcttggctgaaaagttggcctcagcagctacttattatctccggcattgttaccgtctcatctgtaaacagtgtatccatgttataggaaatttcttaagatcattgagttgaaattgcgttgaatcaagtaaacaaataagaagata

SEQ ID NO: 142098 - DNA, 1171 bp, Zea Mays
tataagaaccaatcgtctgtcttctctgccctctcgtccaaaaccctagcccttgcgccgccgcctcctccgccacccagcgctcgagctcctcgcgtcctgcgagcgcgcgccgcaacgccaccatgaagttcaacatcgcgaacccttccaccgggtgccaaaagaagctggaaatcgatgacgaccagaagctgcgtgccttttatgaccgaaggatatcccaggaggagttcaagggttatgtcttcaagatcatgggtggatgtgacaagcaaggcttcccaatgaagcaaggagttttgacttctggtcgtgttcgtcttctgctccataggggcactccctgcttccgtggttatggcaggcgtaatggtgagcgcaggaggaagtctgtccgtggttgcatcgtgagccaagacctatctgttatcaacttggtgattgtgaagaagggtgagaatgatctgcctggtctgactgacactgagaagccaaggatgaggggtcccaagagggcctccaagatcagaaagctgttcaaccttaacaaggatgatgatgtacgcaagtacgtgaacacataccgcaggacattcactaccaagaacggcaagaaggtcagcaaggcacctaagatccaacggcttgtgacacccttgaccctccagaggaagcgtgctagaatcgctgacaagaagaagaggataactaagaagaagtctgaggctgctgagtaccagaagcttcttgcccagaggctgaaggaacagagggaccgccggagcgagagcttggccaagaggaggtccaagctttctgccgccgtcaaggcttctgctgccacctctgcttaagaatattcagtgttttgggatctttgtaaggtctatctcgttacagcgaaagtgcctctctacttagatttatgagtaattgttgcttttttgtatgaacatggtaatggcttgtcggggtaccagaggtttactatgttggtttatgctgtgaacgtaagcgagccatattctttggtatgcagtctgaactatatgttaacgtttgggatttttgttaacatgaagtatcctgcttggttgccttgatcctttttgctgtatggttctattggggctttgctgcgatctctcttctcaatccgaagcttggc

SEQ ID NO: 142099 - DNA, 633 bp, Zea Mays
atgcgtcaaatcatcaccgtccgtctcgtcgcctccgcttcaagcctcctccatccctcgatcgcaactgctcgctaccctcctctcccggcctcacccgcgctcctccagccgcggccgctgccgctgctgcgctgccacgcgccctcccagtacaaatcccagctccgcttcctctcctccctctcctcctcatccgtgcccaccagctcagatgctcccagcgacggcgggggcggccgcgacggggaagaggatggcgcgaagagcggcgaccacgtcgattacttggggatgagcaacgaggagctcatggagcagtgcgatatgggcacgttcaaggcgtccggccccggcggccagcaccgcaacaagcgcgagtccgccgtccggctgaaacaccttcctaccggcatcatcgcacaggttgtggaggatcggtcacaacataagaaccgagcgtctgctttatctcggcttcgaaccctaattgctcttaaagttaggaggccgataaacctggaagactacactccacctgttgagcttcttcagatattacccctgaagtccagcgttagaggaaaagatgttggcccccaaatcggtccaaataactcaaaattttctcca

SEQ ID NO: 142100 - DNA, 788 bp, Zea Mays
agactcgagtactagactagagtctcaactcttgagcagggaaaacgagagatccttggagtcagcaatggagtctaccgcgctaatgaccgcgagactaccactgctgacctctggctcccgttccaaacccctcccctttgcttccttcaccagggcggcttgccgtctcgcctccgcccccttctccggcagcggcagcgtcgtcctgctgtcgcgccggagccgcgactatgctggcgttggttccttggtctccgccgcggcggatcctggggatacggcggacgccggatccgagtccatcctgctcagcgtccaggggatgatgtgcgacgggtgcgccgcgagcgtgaagcggatcctggagagccaagtatgattatcgttgttcgttcctgtctgagactttgagatgagactgcagcatgattgttgctttacgttctagtgtgtgacagattaaaaacagataataattggtgaaggctaagtagctaactacgaaatgtagctcagacaagtgttactgtttctcttgctgtcaggcgctagcaccattcacgcacctttatgaaccggtttccagttgcaacttgcaagtttgtaggttatgaatgtaagagcaacagcctaactataaatcctagctaattttagtgttttggagagggctctttaaaatacagaacttcctcaagggtgggttaccaagagactctctagatttagactcctggtagctaatccctttaacgaacccaacttcctgaacgttgccgactgct

SEQ ID NO: 142101 - DNA, 778 bp, Zea Mays
agactcgagtactagactagagtctcaactcttgagcagggaaaacgagagatccttggagtcagcaatggagtctaccgcgctaatgaccgcgagactaccactgctgacctctggctcccgttccaaacccctcccctttgcttccttcaccagggcggcttgccgtctcgcctccgcccccttctccggcagcggcagcgtcgtcctgctgtcgcgccggagccgcgactatgctggcgttggttccttggtctccgccgcggcggatcctggggatacggcggacgccggatccgagtccatcctgctcagcgtccaggggatgatgtgcgacgggtgcgccgcgagcgtgaagcggatcctggagagccaacccgaggttacttctgctaccgttgattttaaggaagcaagcgcagtcgtgtggacaacagatgaggccaaggggacacaaggttggcagaagcagtatggagagaagcttgctaagcaccttggcacttgcggatttgagtctcgcctacaaggttagaccgggcacgcaaaactatagataacactgttttacactatttgtagaatgaagtttgaaatagagaatgagataaagaatggaataggggagctactggagatagcctaatggatgcatttatttttctcaaccttcagatgatcaacgaacgatcacgtgaagttacatgctagaagccaaaggtaacgctacaagaaagtgatcattacagccgtagaaagagaaaatgtgataaagttt

SEQ ID NO: 142102 - DNA, 913 bp, Zea Mays
agactcgagtactagactagagtctcaactcttgagcagggaaaacgagagatccttggagtcagcaatggagtctaccgcgctaatgaccgcgagactaccactgctgacctctggctcccgttccaaacccctcccctttgcttccttcaccagggcggcttgccgtctcgcctccgcccccttctccggcagcggcagcgtcgtcctgctgtcgcgccggagccgcgactatgctggcgttggttccttggtctccgccgcggcggatcctggggatacggcggacgccggatccgagtccatcctgctcagcgtccaggggatgatgtgcgacgggtgcgccgcgagcgtgaagcggatcctggagagccaacccgaggttacttctgctaccgttgattttaaggaagcaagcgcagtcgtgtggacaacagatgaggccaaggggacacaaggttggcagaagcagtatggagagaagcttgctaagcaccttggcacttgcggatttgagtctcgcctacaagatgatcaacgaacgatcacgtgaagttacatgctagaagccaaagagtaaggtgaagccgaaccgatattgaagttcagatcagatgtcaccttaatggtcaatttataccaggatatatgttaaatattttgtctctatggattgcagttgtaggattagtctcggtgcttgtctggtggcataatactacatacctacctttcacatgatctttagctagattgtttcgaataggatgatgtcctaaaattgtaggtgtaggccactgttgcgaggaaggagtttgcggctgggctattgttaaatccggtcttcccgttgcttcgaagatataaagtgatactacctctataactcaaaataaatcgattttttaaactc

SEQ ID NO: 142103 - DNA, 1403 bp, Zea Mays
agaaagcgagcctgttggatacgattttaacatgcttttctattttttaccgattcttattagtttagcgaggttgttggagttgttctaaacaagacagagacataccatgttgcatgtatttgttttgcttagtatgcacgatacagttgaagatgatacaaaacttttgtggtgctcatataggagaactttttatttatctattcatggattgtttcctatatttgcatccacatcggtctgtactgatctgattaaataagtcaaggttttttttcatttcttttagtgttacttttaatttgctttcacttataaatggacgcttttgcagcccgaggttacttctgctaccgttgattttaaggaagcaagcgcagtcgtgtggacaacagatgaggccaaggggacacaaggttggcagaagcagtatggagagaagcttgctaagcaccttggcacttgcggatttgagtctcgcctacaagatgatcaacgaacgatcacgtgaagttacatgctagaagccaaaggtaacgctacaagaaagtgatcattacagccgtagaaagagaaaatgtgataaagttttttttctctcgaacgtacaagaaaactactgactcattatattaagataggaaaatgtgacaaagttcatgtgctcttcaatctttcagctatgtgcaaacgatgatacagttattaaagttgactataaagtggaaactgccatgagaaaacgtctagctccggatccagatgttttttttttcacgagaagagataaagatgtgtgtgtttttttgctggatttggtttagtgtacaagatggatctaaatggaatcagcatttggtcataaaatgatgagtaccgcttacttaaatcaacaatgcaaattgctcttgaaaatacgcaaaactgatttttattctgtatatgatgttgaggatgtctgaggcatagttgtaaacaacgaatagttgaggcaggttttgtccggatattgactgtaccacttcctcagtattttgaaatcatagttcaactcttgagcctgccgtgagccagtgagctaactatacctgtttctctttcagagtaaggtgaagccgaaccgatattgaagttcagatcagatgtcaccttaatggtcaatttataccaggatatatgttaaatattttgtctctatggattgcagttgtaggattagtctcggtgcttgtctggtggcataatactacatacctacctttcacatgatctttagctagattgtttcgaataggatgatgtcctaaaattgtaggtgtaggccactgttgcgaggaaggagtttgcggctgggctattgttaaatccggtcttcccgttgcttcgaagatataaagtga

SEQ ID NO: 142104 - DNA, 2105 bp, Zea Mays
cctagaagactcggcagcttttgcggccccgttctcttccccatcccctcttccctctctagccttccacccttcatccaccagccgctcctcgagcacccccgtcccgcgccgcctccggctccggcgagatgtcacgcttcggtcgatccggcccgccgccgccgatccgcgacacgtactcactcctcgtcctcaacatcaccttccgcacaactgctgatgacctcttccctctcttcgacaagtacggcgagattgtcgacatctacatcccaagggaccgccggactggtgactcgcgcggattcgcgttcgtgaggtacaagtacgaggacgaggcacagaaggcagttgaaaggctcgatgggagattggtagacgggagggagatcatggtgcagtttgccaagtacggcccaaatgctgaacggattaataaagggagaatagtggagccagttccaagaccaggggggcgttccaggagtcacagtccaagacggaggtaccgtgatgattatcgagatgaccatgatagagattatagaaggcgaagtcgtagccggagtagagatagatacacccgtgacaggtacagggatagggattaccgccatcgtagcccgagtcgcagctacagtcctgatgattacaagaagcgtgggagagacagtttgtcacctgagcgaagaagccctcgtcgtagccgcagtcctgatgattacaagaggcgtggcagagacagcaagtaagagccctagtcgctccccacctcgcaagatgtcaccttctcctgagagatctcccgtcaggcgcaacaatgaccgatctccacgctctcggagcccatcgacataagcgcaattcacttgcaaagcatcttgagtagctcaggatgaatggacttgctctgatcctatgtgtacgcatttgctcgatggtggcctcttctcagctaaagttgtgtagtgccgtctttcagttgctgcttcaaccttggaatactacttctgtttggcacctgaactgcttatcaaaaactttatgtacaccagttccattccacttttaaccttcgttttagcattatcctattatcagttatcaccatcttatcagtatttagtacttactattcatggtgacttgcacctttctagttacatgatgcagtgaagatgtgctggctgatatgcggtcaacatgcacgtagcttactgttgaagttgatattatctgtgctgtttgcgttgttgatgatggctgatgagatgattgatgatgatggcactgcagctgcctgcaccatttgctgtctgcacctattatgctgacaagtaagattccaatgatttatgcatcgccccatgcatctacatgctataggtgttaacccccattatagtatttggatttagatgtgtctgcactgatctatcatagtcctgttttgggtttttggatcataaggtctgcatgtgcacaattaatcgttgcatgcactggatgtgctgtcaattcatttctgcggtttgccaaacatgtcttatcgagaatgcataagcgcatgtcttaagcaggtgagtattaaagctgtatacacacttgtgacgcaattcaagtttattgacatgcttatggtcataaaagggtatccttatctggctaccccaactgttctttgaacatacccacgtaggcttgcaagttaatggttcatgttttgcatgaaatactgcactaatgcatctagagtaggaaaggtatgattgcatgccgcatgcgagtatttgtattttttggtgctcgttacccttcttcagcaatagaaggcgtgggagaggttctagcaacagaatcgctgactggtcgattgacctggatctgaatgctgatgatttgccgcaaagacttcgtaccgtgtcatttgtggagtccgtcgaccgatcaagctgtgtaactaccgatggttttgtaagactagcttttgatctgtttgtgtgaattacttcagcatttggtagtgctgtgttcttctctttaaagtactggtaaacattgactgttggattattaatcgggtcaaatgttactttgtgctc

SEQ ID NO: 142105 - DNA, 2285 bp, Zea Mays
cctagaagactcggcagcttttgcggccccgttctcttccccatcccctcttccctctctagccttccacccttcatccaccagccgctcctcgagcacccccgtcccgcgccgcctccggctccggcgagatgtcacgcttcggtcgatccggcccgccgccgccgatccgcgacacgtactcactcctcgtcctcaacatcaccttccgcacaactgctgatgacctcttccctctcttcgacaagtacggcgagattgtcgacatctacatcccaagggaccgccggtgagcgcgagtcgaacaggctaaggatgtttctatctacgattcgagagttttgcttgcgtgcgatggctgagtacctggtgtagaatatggaattagggatcgacgctcgtgtgcgtgtgtgcgataacaccgatttgcgagtgctcatctagggttatggttgtaggactggtgactcgcgcggattcgcgttcgtgaggtacaagtacgaggacgaggcacagaaggcagttgaaaggctcgatgggagattggtagacgggagggagatcatggtgcagtttgccaagtacggcccaaatgctgaacggattaataaagggagaatagtggagccagttccaagaccaggggggcgttccaggagtcacagtccaagacggaggtaccgtgatgattatcgagatgaccatgatagagattatagaaggcgaagtcgtagccggagtagagatagatacacccgtgacaggtacagggatagggattaccgccatcgtagcccgagtcgcagctacagtcctgatgattacaagaagcgtgggagagacagtttgtcacctgagcgaagaagccctcgtcgtagccgcagtcctgatgattacaagaggcgtggcagagacagtgcatcaccagcaagtaagagccctagtcgctccccacctcgcaagatgtcaccttctcctgagagatctcccgtcaggcgcaacaatgaccgatctccacgctctcggagcccatcgacataagcgcaattcacttgcaaagcatcttgagtagctcaggatgaatggacttgctctgatcctatgtgtacgcatttgctcgatggtggcctcttctcagctaaagttgtgtagtgccgtctttcagttgctgcttcaaccttggaatactacttctgtttggcacctgaactgcttatcaaaaactttatgtacaccagttccattccacttttaaccttcgttttagcattatcctattatcagttatcaccatcttatcagtatttagtacttactattcatggtgacttgcacctttctagttacatgatgcagtgaagatgtgctggctgatatgcggtcaacatgcacgtagcttactgttgaagttgatattatctgtgctgtttgcgttgttgatgatggctgatgagatgattgatgatgatggcactgcagctgcctgcaccatttgctgtctgcacctattatgctgacaagtaagattccaatgatttatgcatcgccccatgcatctacatgctataggtgttaacccccattatagtatttggatttagatgtgtctgcactgatctatcatagtcctgttttgggtttttggatcataaggtctgcatgtgcacaattaatcgttgcatgcactggatgtgctgtcaattcatttctgcggtttgccaaacatgtcttatcgagaatgcataagcgcatgtcttaagcaggtgagtattaaagctgtatacacacttgtgacgcaattcaagtttattgacatgcttatggtcataaaagggtatccttatctggctaccccaactgttctttgaacatacccacgtaggcttgcaagttaatggttcatgttttgcatgaaatactgcactaatgcatctagagtaggaaaggtatgattgcatgccgcatgcgagtatttgtattttttggtgctcgttacccttcttcagcaatagaaggcgtgggagaggttctagcaacagaatcgctgactggtcgattgacctggatctgaatgctgatgatttgccgcaaagacttcgtaccgtgtcatttgtggagtccgtcgaccgatcaagctgtgtaactaccgatggttttgtaagactagcttttgatctgtttgtgtgaattacttcagcatttggtagtgctgtgttcttctctttaaagtactggtaaacattgactgttggattattaatcgggtcaaatgttactttgtgctc

SEQ ID NO: 142106 - DNA, 212 bp, Zea Mays
atttatatgccaacatgtatgtactaagaaaatgtgcacccctttaaatttaggaacaattggatctataccattaaaagatccaaactttagatatataccatggacccacatgtcattgactcatgtggacccacatgtaagtgagatagtaatggtatggatccaaagtggtgatcttttaatggtgtggatccaaatttcccttaaat

SEQ ID NO: 142107 - DNA, 1434 bp, Zea Mays
caagcaaccaacgcattcaggcccctcgcgcgtgttctgtctctccgatccagccagccagccagccatccattcatccgtgtggtgtggtcgtcgcctctctcctcctttccttctccgatccgcctccagcgtgcagcgtccacgtcctgattgttcagtggtttctcgatcgagaccgcgcgcgcgcaatgacgaagcgcaccgccttcgccgcggacgacgcgatcatcgccgccgccgccgccgtcacgtcgcagcccggccggcggttcacgtcgtacccgccggcgagggcgcgcggcggatgcaggctggccccggcggtggcggcggcggcgcgccaggccacggacgaccccggcgccgctgggtcctggccagaactagtcgtgccgcggcacgccgacttcgacgactggatggagaagcacccgtcggcattggccgcgttcgagtcggtgctggccgccgccaaaggcaagaagatcgtcatgttcctcgactacgacggcaccctgtcgccgatcgtcagggaccccgacagcgccgtcatgtccgaggagatgcgggacgcggtgagaggcgtggccgagcacttcccgacggcgatcgtgagcgggaggtgtagagacaaggtgttcaacttcgtgaagctggcggagctgtactacgccgggagccacggcatggacatcaagggccccacagcacagtccaagcacaccaaggcaaaggccggagccgttctatgccaacctgcgagggcgttcctgccggtcattgaggaggtgtaccgcgcgctgacggcgagcacggcgccgatccccggcgcgacggtggagaacaacaagttctgcctctccgtccacttccgctgcgtccaggaggagaaatggcgcgctctggaggagcaggtccggtcggtgctcaaggagtacccggacctccgcctcaccaagggcaggaaggtcctcgagatccggccgtccatcaagtgggacaagggcaacgccctgcagttcttgctcgagtctctcggttttgctggcagtaacagtgtcttcccgatatatatcggagacgatagcaccgacgaggacgcgttcaaggtcctgcgcaacttggggcaagggatcgggatcctggtgagcaagattccgaaggagacccgcgcatcctactccctgcgtgaaccttctgaggtggaggagttcctgcgcaagttggtcagctggtccaaggagagcaggcaacgggactagtcatggtccagtcagcaggcgatggaaagctttgcctagaagcggtcgacagggccggctctcgtttttttaagggccatagaccaacctcgatgtttaggcctctgatttttttattgtcaataactgtaataaaatagagggaaaataataaaaataatttaatggt

SEQ ID NO: 142108 - DNA, 1473 bp, Zea Mays
caagcaaccaacgcattcaggcccctcgcgcgtgttctgtctctccgatccagccagccagccagccatccattcatccgtgtggtgtggtcgtcgcctctctcctcctttccttctccgatccgcctccagcgtgcagcgtccacgtcctgattgttcagtggtttctcgatcgagaccgcgcgcgcgcaatgacgaagcgcaccgccttcgccgcggacgacgcgatcatcgccgccgccgccgccgtcacgtcgcagcccggccggcggttcacgtcgtacccgccggcgagggcgcgcggcggatgcaggctggccccggcggtggcggcggcggcgcgccaggccacggacgaccccggcgccgctgggtcctggccagaactagtcgtgccgcggcacgccgacttcgacgactggatggagaagcacccgtcggcattggccgcgttcgagtcggtgctggccgccgccaaaggcaagaagatcgtcatgttcctcgactacgacggcaccctgtcgccgatcgtcagggaccccgacagcgccgtcatgtccgaggagatgcgggacgcggtgagaggcgtggccgagcacttcccgacggcgatcgtgagcgggaggtgtagagacaaggtgttcaacttcgtgaagctggcggagctgtactacgccgggagccacggcatggacatcaagggccccacagcacagtccaagcacaccaaggcaaaggccggagccgttctatgccaacctgcgagggcgttcctgccggtcattgaggaggtgtaccgcgcgctgacggcgagcacggcgccgatccccggcgcgacggtggagaacaacaagttctgcctctccgtccacttccgctgcgtccaggaggagaaatggcgcgctctggaggagcaggtccggtcggtgctcaaggagtacccggacctccgcctcaccaagggcaggaaggtcctcgagatccggccgtccatcaagtgggacaagggcaacgccctgcagttcttgctcgagtctctcggttttgctggcagtaacagtgtcttcccgatatatatcggagacgatagcaccgacgaggacgcgttcaaggtcctgcgcaacttggggcaagggatcgggatcctggtgagcaagattccgaaggagacccgcgcatcctactccctgcgtgaaccttctgaggtagcaacactacccactgctaccagttattactgtacagtggaggagttcctgcgcaagttggtcagctggtccaaggagagcaggcaacgggactagtcatggtccagtcagcaggcgatggaaagctttgcctagaagcggtcgacagggccggctctcgtttttttaagggccatagaccaacctcgatgtttaggcctctgatttttttattgtcaataactgtaataaaatagagggaaaataataaaaataatttaatggt

SEQ ID NO: 142109 - DNA, 1491 bp, Zea Mays
acatatcacccgcttccctctgttgaatcctccttccgcgccgccgccatctcctcctcctctgactccggcggcctcacgccctcctcacgctccgcaacgccgtacctggatgttggtttctacttcgactctccgagggatagagaagagacccagtgccacaaggttcccgtagtctgtaatcggggagctgagaatctaggccataggcttcttgaagccgttgggagacaaaggaggccggacgagcgagcgaacaaccagatggaggcggtggtgcggaaggtgcagcagcgggtgaggaaggcgcgggaggagatggatcagtgggatgacctcaacactcggctcctctcccaattctccaatgctgccgcggtcatctctcgccttcaggcccttggagaggacaagaattatggccccttgcgtgctgtacccaacatcagagtggacctcattgggaaccagatggaggttctggagctcattttcgttaaaattagggagacactggagaagttcaatgacgtcgtgaaagctttaaataaggctctgcgtgataccaagcagatggtgagaggcgggtcggcactcacggcgaaacagatgcagttacaagttggaattttgccatcgattgcagaatgcttggatggatttcaaacattatgtgaaatgcaccatgatgagtttacgctaaaatcatcagctatctccttgctgacttggaagacatgttccagtgacattgctgtactacgccaactcttagtagaccagccaaacattccaaaagatgaagtccaatccatattcgacattatatttgcagatgaaatttgttgaccaccaactcatagtatttgattgttgaagccttgccccctatgttctgatcaagctgccttctcaggtgagaccgagtcagtgtggaaactttatgttaacccaattgttgaggcattgtggacgaggcaagtcttcatctctgtcagcaatcggtgattgaagacccagaggccggacctgaccattgtgtgccggtcaccggagtgtgagtggtctgaacttgggatggtaatggctttgcctgtccatcctgcggggtgtggacagtgatagaacttgaacaggcttgacccctcctagcaagggattgtgaattgtgatcaccaatccatggttcagacttgcaccaatcatgtggcttgcgttttttagaaataggtgcaccattgcctcttccaggtggtgcccagaaggtttcgaccaaggtctgtgaaagaagcactttgcaatcagcggtgggttcagatatatcacatgaacgagcagacaaggaaacattctaacttggaaaaagtttctattgggttctattcggcaatggaaaaacggtgtatcatgtaaattaaactatactagttcactttggttttgtaagttaaacttctttaacgctgatcaagacaataccctaaaaaa

SEQ ID NO: 142110 - DNA, 111 bp, Zea Mays
gctccttttgtgataccggtgcaatgaagaatgcacgaacaaggaagagatcagggctcgtcagtgagacgattcagatcatctttgggaaagaaaagaaaagaaaaaaaa

SEQ ID NO: 142111 - DNA, 147 bp, Zea Mays
atgcagaaaattgacagcattttggcttctccaaatcacgatggctcgttgagtacttttcatgctctatcacactttgttaatagcatcgcacttattgtaggacaaacactgcaaagcaaagtgtattttgtgtccatgttttga

SEQ ID NO: 142112 - DNA, 3645 bp, Zea Mays
ctccacgctgttatctctcgcacgcaaacgaccagcacagcaaaaaccacccccacacttcgctcgcggcgcggcgacggcaatccaccgcggcgcgctgccttcgccggtgatctgacctctccgagcccgggcaatctcctcccgctgaatcggcccggagaggatggcgtcccggcggggaagcagcagttgcgcgctctgcgagggatccaacctgccttcctgttgtgccttgtgcgtcaacgcgcggttgctcgagtaccacacgaaacttcgcatgatgaggagcctccgcgactccctccacgcccgaatcgccgcacgcctcgaagccaagagcaaaacagatgagcagaggatctggagagcgagcaaagcacacgatattatggagttgagggatcggctcactgaattgaagagcaaaactgccgtagataagaccaaggtcgagcaggcatcgagtggtctcaaggcaaaaaccgcgtcattgaatttggctcttgtcacgctgaaaaagaggcaagctgatgcagtggccatgcacaccagtgccatggaaattgcgcagatgaatctcatgacaatcacctcagattgtatgaaaatgcaatcaaaatctgtaaagcaactttgcagattgtttccaatgcgacgagttattaaagagggagaaaagaaagacaactacagtggtccgtatgattcgatatgtggggctcgtcttcctcgtggtctcgatccacattctattccagcagaagaactgtcagcatctttggggtacatgctacacttcgtcaatattgcggtccgtatcctatctgcgcccgttcttcatgtatcaggctttaagggttcatgctcaaatatatggcagcggagttcctactggagtacacgacagtcccagagcaaggtttaccctctttttatacctaggaaaaatgcttgcacaggcggtgaagaaacctcattgtcagaaagtggttcgagtaacttcggagttgactctgtggattctgtcaagaaacagtcttttggttccacgagaagtaatagctttaacctctctggtgcatcttcccactccatggagaggcatcaatatttgcagagaggaatatcactattgaagacaagtgttacagcaattactacttactattataactcactgggcttggatgtgccatccaatctttctacttttgaggcgttttctaagttgctccatacgttatcgtcatcaaaggcctttcgaactgcttttgaattgaacattgcttcaaggtcagaaaagcaagcacagcagctaaacagatcgatttggaagtcaagttcagccgtatcgtcggacagcagttttatggacagcatgcacacaaccatcatgcccagcactctagacaacctcctcctgaactcaaaccagagcttcttgtacaccgctaagttggtgaagcatggtggcgtgccagatagcatattcaacggttgggacctggtagagcgtgaggtcctaccgccaccgccctcgcggttcgaagatgtcgcgcagtgggaaagagccatgtatgctggcacaaaaaagaaatgacttctattgacaagtcttccttgaagtccaaactgttagaacactgcaagagcttcagtttagatatgcctctgatcatcagtttctggttcatgtacagtagcagtacaggactaacctaaccctgtggttgtgacctgtcagtcatctacctgcaagaatgcagagaagagaattgtagtgtagggtttattttctaccacatgtacgtgggtgcagtcctgtaaatttgtaaatgtaaatactgtagcgtttagaaaggaaattagattgtctggaataaatagacattccttcctatgagtacaactgaaaagaaattcttttacattcagcaagaaagcaacatgcacttaccgtaaaagaggaggacaccctgtgacggccagaaaaggaggccttatttgagaagcgaagcggtccacgtgtacaaccggaggcgttcctccgttccaccacaaaccagcggaccttcagcttctccaccgcggctccgcctcttctttcacggctccaccacgcactaaccctaaagcttccccgcgttgccggcgatgagcagccttcgagccatctcctccctcctccatatctactccacgtccgccgccgccagacgaggagccgggcggctgggcttcgcgccgtcgcccggcgggagattccgggtaccgtcgaattccggtccgcccgcgttcgtgttggacgaggtcgcgagggcggccggcggggttcggaggagggcgtccacgcgcgcggcgagttgggactcggagaaatcgccgtacgagacgcttggtacgatcctatgcgctctgtagtttgtgcgagaactatactatgcatctgttttttcgtgtgtcaatcctggtgatcaacttgtatgatgctgatcagcttactatcgaattatttgatccgttacacaagtttgatcatttgctgttgccatgcttctatatgtttcagttccatcaccgaaaaaaaatgattcagttctaagttgagcttaatagtaccaagctgctgcaccagcaccactactttgtagtttcagatgcactgtgtgttacggacttggaattgaagatgaagctaatgtgtgttctttgtgtctcatgcgcttcaaagagctgggtagggatgcagacgaggagaccataaagactgcctacagaagattggccaagttctatcaccctgatgtttatgatggtaagggaacccttgaggaaggggaaaccgctgaagcgcgtttcattaagatccaagcagcgtatgagctgttgattgatggtgaaaggagaagagcatatgatagagagcatcatgtgaatccgatgaaggcttctcaagcatggatggagtgggtaatgaagaagcggaaagcttttgaccaacgtggtgacatggctgtggctgcttgggctgagcaacagcaacgcgaaatgacgctacgggcacggcgtctctcacgctcaaaggttgaccctgaggaagaaaggaagctatttgccaaggaaaagaaggcatctatggaattctacagcacaactctgaagagacatacccttgtgttacggaagagggatattatgcgcaagaaggcagaggaggagaaggataaggagatcagtagactcctagcggcggaagggcttgagttggatacagatgaagatgaaaacaagacttttctggggtaacgcttttgatacttaccctaatttattctcttcctccattccagcaatcgttcaagatgcagcgacaacgagtgcacaaggcgaaacagttgggctcgtcggaaacgctgtaatctggagatgtgcgccaacaaatattggatcgaaataataatctcccggggcgaagtttagcattttaccggagagcagaaaggaaaggcaaatgaaggatgtgtgatggctgtagtagggttgcaatatgattcaatcaaaaaattagtaaatttcgctgtagtagggttgtaatatgattcaacaaaaaatgagtagatttcggtggcgggcctcgatttt

SEQ ID NO: 142113 - DNA, 3350 bp, Zea Mays
ctccacgctgttatctctcgcacgcaaacgaccagcacagcaaaaaccacccccacacttcgctcgcggcgcggcgacggcaatccaccgcggcgcgctgccttcgccggtgatctgacctctccgagcccgggcaatctcctcccgctgaatcggcccggagaggatggcgtcccggcggggaagcagcagttgcgcgctctgcgagggatccaacctgccttcctgttgtgccttgtgcgtcaacgcgcggttgctcgagtaccacacgaaacttcgcatgatgaggagcctccgcgactccctccacgcccgaatcgccgcacgcctcgaagccaagagcaaaacagatgagcagaggatctggagagcgagcaaagcacacgatattatggagttgagggatcggctcactgaattgaagagcaaaactgccgtagataagaccaaggtcgagcaggcatcgagtggtctcaaggcaaaaaccgcgtcattgaatttggctcttgtcacgctgaaaaagaggcaagctgatgcagtggccatgcacaccagtgccatggaaattgcgcagatgaatctcatgacaatcacctcagattgtatgaaaatgcaatcaaaatctgtaaagcaactttgcagattgtttccaatgcgacgagttattaaagagggagaaaagaaagacaactacagtggtccgtatgattcgatatgtggggctcgtcttcctcgtggtctcgatccacattctattccagcagaagaactgtcagcatctttggggtacatgctacacttcgtcaatattgcggtccgtatcctatctgcgcccgttcttcatgtatcaggctttaagggttcatgctcaaatatatggcagcggagttcctactggagtacacgacagtcccagagcaaggtttaccctctttttatacctaggaaaaatgcttgcacaggcggtgaagaaacctcattgtcagaaagtggttcgagtaacttcggagttgactctgtggattctgtcaagaaacagtcttttggttccacgagaagtaatagctttaacctctctggtgcatcttcccactccatggagaggcatcaatatttgcagagaggaatatcactattgaagacaagtgttacagcaattactacttactattataactcactgggcttggatgtgccatccaatctttctacttttgaggcgttttctaagttgctccatacgttatcgtcatcaaaggcctttcgaactgcttttgaattgaacattgcttcaaggtcagaaaagcaagcacagcagctaaacagatcgatttggaagtcaagttcagccgtatcgtcggacagcagttttatggacagcatgcacacaaccatcatgcccagcactctagacaacctcctcctgaactcaaaccagagcttcttgtacaccgctaagttggtgaagcatggtggcgtgccagatagcatattcaacggttgggacctggtagagcgtgaggtcctaccgccaccgccctcgcggttcgaagatgtcgcgcagtgggaaagagccatgtatgctggcacaaaaaagaaatgacttctattgacaagtcttccttgaagtccaaactgttagaacactgcaagagcttcagtttagatatgcctctgatcatcagtttctggttcatgtacagtagcagtacaggactaacctaaccctgtggttgtgacctgtcagtcatctacctgcaagaatgcagagaagagaattgtagtgtagggtttattttctaccacatgtacgtgggtgcagtcctgtaaatttgtaaatgtaaatactgtagcgtttagaaaggaaattagattgtctggaataaatagacattccttcctatgagtacaactgaaaagaaattcttttacattcagcaagaaagcaacatgcacttaccgtaaaagaggaggacaccctgtgacggccagaaaaggaggccttatttgagaagcgaagcggtccacgtgtacaaccggaggcgttcctccgttccaccacaaaccagcggaccttcagcttctccaccgcggctccgcctcttctttcacggctccaccacgcactaaccctaaagcttccccgcgttgccggcgatgagcagccttcgagccatctcctccctcctccatatctactccacgtccgccgccgccagacgaggagccgggcggctgggcttcgcgccgtcgcccggcgggagattccgggtaccgtcgaattccggtccgcccgcgttcgtgttggacgaggtcgcgagggcggccggcggggttcggaggagggcgtccacgcgcgcggcgagttgggactcggagaaatcgccgtacgagacgcttgagctgggtagggatgcagacgaggagaccataaagactgcctacagaagattggccaagttctatcaccctgatgtttatgatggtaagggaacccttgaggaaggggaaaccgctgaagcgcgtttcattaagatccaagcagcgtatgagctgttgattgatggtgaaaggagaagagcatatgatagagagcatcatgtgaatccgatgaaggcttctcaagcatggatggagtgggtaatgaagaagcggaaagcttttgaccaacgtggtgacatggctgtggctgcttgggctgagcaacagcaacgcgaaatgacgctacgggcacggcgtctctcacgctcaaaggttgaccctgaggaagaaaggaagctatttgccaaggaaaagaaggcatctatggaattctacagcacaactctgaagagacatacccttgtgttacggaagagggatattatgcgcaagaaggcagaggaggagaaggataaggagatcagtagactcctagcggcggaagggcttgagttggatacagatgaagatgaaaacaagacttttctggggtaacgcttttgatacttaccctaatttattctcttcctccattccagcaatcgttcaagatgcagcgacaacgagtgcacaaggcgaaacagttgggctcgtcggaaacgctgtaatctggagatgtgcgccaacaaatattggatcgaaataataatctcccggggcgaagtttagcattttaccggagagcagaaaggaaaggcaaatgaaggatgtgtgatggctgtagtagggttgcaatatgattcaatcaaaaaattagtaaatttcgctgtagtagggttgtaatatgattcaacaaaaaatgagtagatttcggtggcgggcctcgattttatcctgagtctcattaagctatggcacttgaaaattgc

SEQ ID NO: 142114 - DNA, 1256 bp, Zea Mays
cccactcgcctctcgccattctcagtctcaccttcgcttccgtcgccatcgctcgtccgaatacgtcctcgcttgcacgagcaaagcaagcaacttgttcgatcgttctcaaaactccgatccatccgctgaccgcgcgccgccatggggcagggcaaggaggtgaagacgcgaccggaccccgaggtggagatccaggagaagggcgagatcttcttcttctaccgacccaaggtgggcaaggacgaggcgcacggtcccgacgacgtgcagcgcatgtacatcgtcctgcgccctgagtccgccggcggcggcggccgcaccgtcgaggagaagcaggcgccggactccggcaaggaaggccgcaagcgccgccggcagggagacggcgcccaggaagaaagcgaggagaaaggcgcggatggcggccacggcaaggaggaggtgaacatcgaggaccagccgttgctccggctggtcgtgatggggaggaagagcctgccggacccagcgaagcacagccgcccgtactggggttacgtcgagctcgtcaccaccaaggtcgacgacatcaaggacgcgctcaaggaagaggagtacagcacggcgacgcggggtaagcggcacagggcggcggcgcgggcgctgggcgagggcgtgtaccgcatcgtgaagcacgagtccgagtccggctccggcgggcggcggcggagcccgcgcccgcacacccacctcgtgtacaagctggagctcccatccacccgcggcgccatggagccgcaggaggcgatgaacgtggagccggaggcgtcgttcctcgtgcaggtcaagaaccccgacccgccctccggcggccgcgacggcgggttccgcgggctgcagagcaagcgccgggccgcgttccccgcgcacctgcaggacgcgttcgggggtcggcggtacgcgccggccgacccgccggacctgctcaactacgaggggtgcgagctgctgctgatcgcggcgtcggacgatgtggaggacgagctcgggctgcagctggagggggaagtggaggacggcgaaggtgagggtgtggagactccgcagggcgcgctggggtgctccgacctggtgaagatgttcggcgaggtggccgacgtgaagccgctgctgagcgggagctgggactagaacgactgatccgcgcaccagatgccattgtacagcgttcaggtcgtagttgggtgtttcagttcgctgctaggaggcttgta

SEQ ID NO: 142115 - DNA, 112 bp, Zea Mays
tttttcttttttatgcgtaaaccgcactggcgcctgtctttctcatatccaagccccattgtatttgcaaattccacgctttatctttctaagcccacctcgagttctcttc

SEQ ID NO: 142116 - DNA, 4654 bp, Zea Mays
cgccgccgacgccgactatcgccggaaacaggtcaacaggagagcccgttcaagtccgggacccctcaattgtccttttctctctctccccgcccaacttcccctgctctgccgccgcctccccagtccggcgtgcatcagcagcgacatcagagtcggcgatgggaggcgtcaccgacgttctcgtccccttatgttgatgaagtggcgtgccgtggagattcctttttgaccgatttcttgccggttttaccttctcttcgtcgtgcaagatcaatccttcattttctccgtcgtgcaagggggtcagttgaatcagatgctccacgttacgtccacccttgagctcgatggcagaaggaagcagtagccataggaggagtgcattctcccctgggctggctgtgttattatctggcgatgaagctaagattagctcccagaagtcgcacctggtgtcctatcatgacgaaattgggcaccaggctgttgagaggacgatagagcacatctttgatctccctcacaagtcagtggtccggcctcctggaccagttgacacaggcttcgtgcactcagtggtgaggaatcaagctagaaaatttgatcttgactgggaaaactgcattcggggataccatcgcagcgtcttcattgtggacaaaggtgctgggcagaggaaggtggttcttgatgattcgagcatttgtggtagcttcaggaatgtccggggaccttcacttgttgagagttccgcccctttcagcagtgccagggctaatgcttgtgtgtggaaaggcaaatggatgtatgaggtgacccttgagacgtctggagttcagcagcttggatgggctactctctcttgtcctttcactgatcagaaaggtgttggtgatgctgatgattcatattcctttgatggccggagggtgactaagtggaacaatgacccaaagccatatggccagccatgggcagtaggtgatgtcatcggttgctgcatcaacttggatgcaggagaaatttccttttacaggaacgggacttctcttggtgttgcatttgatggaattcgcagcgtggaacctaagaagggatattatgctgcagtatccctctcggaaggagagcgttgtcatcttaatttcggctcacatccattcaggtatcctgttgatgggtttgatccattagaggcgccaccacgctcttggtcgtttgtcacataccttcttagatgcctgttccggttgctagaagttcacaacctggagaaatctgaatcagcatacttcgagaaactgaggagggtgaaaaaatttgcaccactacaagaactctttggacccatttcagaagggatctgtgcagaaattttcagtgctattgaagcaagccaggggtgccttgagtatattgcctggggctcgttgatcactctactcttagatgttttcagaactcgtgagccgcatgatttctcatgccttgatcaggttcttgaccttttcctccggttcccaggttgcacttcattatttcaggagctcattgtggccctttcttgcatgtgcaaagttgcaccacttgtgttgacagaatgcccatattctgggtcatatccatttttagcgctggtttgccaccttcttaggcataaggatgtaatgtgtttatggtggaaagcagaagatttcgttttctcgtttgaaggcttccttacaaggaagattccaaataagcaggatctacagtgccttgtgccatctgtttggtggcctggttcttctgaggatgaagttagcatgacactgacgatgacaacactctcagatgcaataaaaaagattgaggagatgcatcgtgaactttgcagcttggtaatatgctttattccaccaatgtctacgcctcagcctccaggctctgtatttaggtcctttgtacaaagtttggtgctcaaagctagaggtggagatcataggatggttgtcaatgggactttcaacaacactgtgcttgtttcattgtacacagtaatcctgcatttgttgtctgaaggattttctatggattctgctggatctgcatcatcctctaaagcgaactttgggaatggtgttggatttcttcacaaaggtggaaaacgcaagtttccgacacaattatttttcaggaatgatgcctatcacagtgtaattcctagaatcggtggaccaccaagtattttgatgcatcaccaatttgatgctgtggaaaatgaagtgcagtgggatgaaggctgcatgaatgatgaagagacacgtgttacacacactacagcacagaagccttgttgctgctcagtgacagatgttgctgttggcctaagatacaaagaaactgctaagtatgtgccatcaacttcaaaaggctcatgtaagcctatgcctgaaagatctcctcatgttgctgctgagtgcaatggtagaggtctgagtgatgagatcgaagacaaacctagcacaagtgctcaatcagaaattgaatatggataccaatcactgcatagtcttgaaaacatgccaatggcaactcaatcttcgtcggaaacacttaaagaagaagagctgcttgatgttatgttgttgttatatcatctcggcatctcaccaaattttaggcaggcattttatttcatgtctcagcagtcgcagtccatttctttactagaagaaactgacaggcagatacgagaaaaatcatgctcagagcaagtaaggcgtttgaaagaagcccggaatagctatcacgaggatttggtagattgtgtacggcattgtgtttggtaccgggccacccttttctcccagtggaagcaaaggggaatgtacgcaacttgcatgtgggtcgtggagcttcttttggtccttagtaactcaaatagcatgttccactatgttcctgagttctatgtggaatcactggtggattgtttccatgcactgcgaaggagcgatcctccttttgtttcccctgcattatttctcatgcaagggttggcctcgtttgtcactttggttgtcaagcacttcgatgatacaaggatatataaagaattcatgcttgttttcgagaacaatcgggaggctataaataaaatgcctagatcactgttatcagcttttgacaacagatcatggattcctgttacaaacatactttcccggttctgcaaaggctcaggatttgcttcctataagaatggtgaatccgcatcatctgcaacttttcaggttctactgagggagacatgtattcatgaacaagagctgttcttttcctttcttaatcgacttttcaatacactcagctggacaatgaccgagttctctatgtccatccgggagatgcaagataaaaaccaggttgctgatttgcagcagaggaagtgcagtgtaatttttgatatctcatgtagccttgcgagaatcttggaattctgtacccgagagattccttgtgcttttctcatgggaccagatatgaatttgcggaggttgactgaattggttgtctttattctcaaccacatcatatcagtagctgatgcagagttctttgacatgacactaagacggccagggcagcatcaagagaaaacaaatcgtactatgatcttggctcctcttgtgggcattatcctcagtcttatggaatgtagcagcacatcagaacgaagggagctaaatgatgtgattgcagtgttcgccagcatggattgccctgccacaatccattttgggctgcagtacctactgagctacaactggagcaatgttcttcgaggggattcatcccttgcaaagctagcgcagcttaaagagttctcccattacttccgacgcattacagcgtccgtggatggtgaagaagaagaccatagcctaaacgcgggcgatgaagacgacgaccacacttgttgcatttgctacaactgtgattccgatgcaacattccagccatgccatcaccggtcctgctttggctgcataagcaggcatctcctgaacaaccagaggtgtttcttctgcaatgcagtggtaacatcggttactagatagccgattcgcgagcgatgcgctgctctactcattgcctctttcggtatcgtgatccgaaggaagatggtgccactgatttgtcttatctattttgcttgacctgagggctggggcgctggcgtcccagagatctttccattgcttttccaggaagaacgcgttacctttgtgcacgagggtcagaagcggttcttcgttttccttgctgtatatgtaaaggccaggtaatagtagaaaggattcaataacattgccgcagaaggaggtttctgtacacggtgggaagccagtaccaccgaaaggaatttcatggaatcgcaatttttgtagggtgtagggggagattccacgactgtaaatatgatgagatatgaaacagaaaagggggtggcagatcaacatcgaccttctgtaattagccagaataaaagaactagatgctttatattgagcagagctctcgtctttttgatcctccccacggtgtagtatcaagaatgaataaatcttctgtttcttgtctggttgtagcatgccagcatctgtaa

SEQ ID NO: 142117 - DNA, 1797 bp, Zea Mays
atgattaatttcttgataggtttcagcatactcttcagtgctttaaagttatctaagggttctgttttattactaataggtcactttggttgtcaagcacttcgatgatacaaggatagtgaaccctgacttgaaagatcttcttcttcaatcaatatcagttctcgtacagtataaagaattcatgcttgttttcgagaacaatcgggaggctataaataaaatgcctagatcactgttatcagcttttgacaacagatcatggattcctgttacaaacatactttcccggttctgcaaaggctcaggatttgcttcctataagaatggtgaatccgcatcatctgcaacttttcaggttctactgagggagacatgtattcatgaacaagagctgttcttttcctttcttaatcgacttttcaatacactcagctggacaatgaccgagttctctatgtccatccgggagatgcaagataaaaaccaggttgctgatttgcagcagaggaagtgcagtgtaatttttgatatctcatgtagccttgcgagaatcttggaattctgtacccgagagattccttgtgcttttctcatgggaccagatatgaatttgcggaggttgactgaattggttgtctttattctcaaccacatcatatcagtagctgatgcagagttctttgacatgacactaagacggccagggcagcatcaagagaaaacaaatcgtactatgatcttggctcctcttgtgggcattatcctcagtcttatggaatgtagcagcacatcagaacgaagggagctaaatgatgtgattgcagtgttcgccagcatggattgccctgccacaatccattttgggctgcagtacctactgagctacaactggagcaatgttcttcgaggggattcatcccttgcaaagctagcgcagcttaaagagttctcccattacttccgacgcattacagcgtccgtggatggtgaagaagaagaccatagcctaaacgcgggcgatgaagacgacgaccacacttgttgcatttgctacaactgtgattccgatgcaacattccagccatgccatcaccggtcctgctttggctgcataagcaggcatctcctgaacaaccagaggtgtttcttctgcaatgcagtggtaacatcggttactagatagccgattcgcgagcgatgcgctgctctactcattgcctctttcggtatcgtgatccgaaggaagatggtgccactgatttgtcttatctattttgcttgacctgagggctggggcgctggcgtcccagagatctttccattgcttttccaggaagaacgcgttacctttgtgcacgagggtcagaagcggttcttcgttttccttgctgtatatgtaaaggccaggtaatagtagaaaggattcaataacattgccgcagaaggaggtttctgtacacggtgggaagccagtaccaccgaaaggaatttcatggaatcgcaatttttgtagggtgtagggggagattccacgactgtaaatatgatgagatatgaaacagaaaagggggtggcagatcaacatcgaccttctgtaattagccagaataaaagaactagatgctttatattgagcagagctctcgtctttttgatcctccccacggtgtagtatcaagaatgaataaatcttctgtttcttgtctggttgtagcatgccagcatctgtaagttgtaacaattcagtgaatttatttaccttcagcaaaaagggtaaaaaggttgcctcttcaa

SEQ ID NO: 142118 - DNA, 2535 bp, Zea Mays
ctaaattctaaaccatatagatttcttaatcattcttcccatgtaatcccacggtattctctttataatcagattgtctgaactctgaaaaacttgtcagaaaaaatgaaacaaacaaaccttatgtatcatgggcgctcaagccagccgggaccctacaagcgcacggtaccgtccacgtgctagcgggtaccacttttcgtgatccaacaccagggctcacgggacccgtccacagttccgctcagcgcggtcgcttgacatgcaggcctcacgtgtcattccccaccgctcatatctccctctccgcctcggccgcttcccctccccgctccactcttccccgcgcgcctgtcccgttggccgcgaatggttctcgcgcgagtcctcccgctgcccgccccgtcgtccgcgccccaccgccgcttactcctgccgactcaggcggcgccggccccggcgcgtgtgctcaccgtgcgggccgtcgcctgccgcgcagcgaacgccatggcggccgttgctctggacccgcccgcggtcgctccgagccccgcagaggtcgcagccgtgggcgtcggggaggagctgccggaagggtacgatcagatgatgccgaccgtggagccgtcgcggaggcggcgcgccgggctgctgctgcatcctacttcgttgcggggcccgcacggcatcggcgacctcggggacgaggcgcttgctttcctgcattggctccgcgacgccggctgcacgctctggcaggttctaccacttgttcctccaggtaggacggctggggaggatgggtctccttattctggacaggatgccaactgtggcaatacccttttgctatcccttgaggagcttgtaaaagatggtctactgatgtcagatgaacttcctgatcctgtggatacagagtatgttgaatttgacactgttgcaaatctgaaagaaccacttattgcaaaggcagcagagaggctcctactaagccatggagagctcagaacacaatatgactgcttcaaaaaaaatccaaatatatcaggttggcttgaagatgcagctctttttgctgctattgacaaaagcatcaatgcattctcttggtacgagtggcctgaacctctgaaaaatcgccatcttggagccttggaagatatatatgaaaaacagaaggattttatagagacatttatggctcagcagttcttatttcaaaggcaatggcagcggattcgtaaatatgcacaaaagctgggtatcagcatcatgggtgacatgcctatatatgttggctaccatagcgcagatgtttgggcgaacaggaaatcatttttgctggacaaaaacggtttccccactttcgttagtggcgttccacctgatgcatttagtgaaacgggtcaactatggaacagtccattgtacgactggaaagctatggaagcagattgtttttcatggtggataaagaggattaaacgtgcccttgatttgtatgatgaattccgtattgaccatttccgggggcttgcgggtttttgggcagtcccttctgatgcaaaagtagcactggttggaagctggagggctggaccaaggaatagcttttttgacacgctcttcaaagctgttggtagaatagatataatagcagaagatctgggggtaattactgaagatgtcgttcagctaaggaaatccattggggcccctgggatggcagttctccagtttgctttcggaggtggttctgacaaccctcatttgccacacaaccatgaaatggatcaagttgtgtacactggaacacatgataacgatacagttcttggctggtggcaaaatttaccagaggaagaaaagaaaattgtgatcaagtatctaccagaagccgagaatattgacataacatggacactgattacggctgccctctcttccgtcgcgaggacttccgtggtaaccatgcaggacattcttggccttgacagttctgctagaatgaatactccagctacccagaaaggaaactggaggtggaggataccgagctctgttggcttcgacagcctcagccctgaagcagcaaagctgaaggagctgcttgcgctgtacaatcgacagtgaagtccgctattgccatcgaagttccttcaataaaataggcaacaaaatgtgagcggtttggttgccaagttctatggtacgcggccccgcacagaggttgtgttctggttggctggaaacttgcgtgcactgcaagttaagacttgaacatgaagcactattgtatgtgtgtgtattctcatttttttattaaccatttttttggtcgggtctatacaagtgttttccccccattgctttgcagcaaagcattaccaatttggatccgtttctttcaggtgacttagatttactagtgtagtgtaatgtaactcgaattcctttaggccgcgttcgttttggccggtttggcctattccgggcttggttccagactgaaagaaatgacccggtttggaa

SEQ ID NO: 142119 - DNA, 2186 bp, Zea Mays
cgccctcgcccgccccccaaaccaaagggaaaccctcaccacgcttcccgaaacttctcctttctccatcctcaaccctactccccccttcatccgcacgaacgaagcagcgcgagcgaggagcagacgatccttcccgacctcgaagcgtacccccccttccagccgcagccatggcgaccgtcatgcagaagatcaaggacatcgaggacgagatggcaaggacacagaagaataaagccactgctcaccatcttggtcttcttaaggctaaacttgcaaaattgcggcgggagttgctcactccaacatccaaaggtggtggtggtgcaggtgaaggatttgatgtgacgaagagtggagatgcacgtgttggtttagttggctttccttcggttgggaaatcaacattgttgaacaagctaacagggacattttcagaggttgcttcctacgagtttacaactttaacatgtattcctggagttatcatgtataagggtgctaaaatccagcttctagatctcccagggatcatcgaaggtgctaaagatggaaagggcagaggaagacaggttatcagcacagctaggacatgcaatgttattttgattgttcttgatgccataaaaccaataactcacaagcgtcttattgagaaggagcttgaaggatttggcattaggttgaacaaaacaccacccaatttgactttcagaagaaaggacaagggtggaatcaacttcacatcaacagtgacgaacacacatttggaccttgatacagtaaaagcaatctgtagcgagtacaggatacataatgctgatgtctccctgagatatgatgctacagcagatgatctcatagatgttattgaaggaagccggatttacactccttgcgtatatgttgtcaacaagattgatcagataacactcgaggagctggaaatcttggacaaacttccccattactgcccggttagtgctcatcttgaatggaatcttgatggacttctggagaaggtatgggaatacttggatttggttaggatatacacaaaacctaaagggctgaacccagattatgaggatcctgttatcgtatcatctaagaagaaaaccgtggaagatttctgcgacagaatccacaaggacatggtcaaacaatttaaatacgctctggtatggggttccagtgtgaaacataagcctcagagagttggcaaggagcatgagcttgacgatgaggacgtcgttcagatcatcaagaaaatataggcgtatcatgtggtggaacgaaacctgtttttttctgcaaaactgggagcgttgaggattttgttgagtagtagcctcgcgagaagagcttgaactcggcctttgcttgttggtgaggctcatatgtaatgttccctgttctcagaaaatttgctttgatccaaagacaatgtgagtcggcatttacttatatacaacgagtcatgtagctgtgatgtaacttcctctaacttggtgccatgtggactggagtcaccgatgtgtgctgccaagtgtctggcccaaccgttgaacacgtggagagatgctctccatatctttagaggaggatataaggtgatttgatgatttatttattaagtgtttgtaccttatctggtgttcgtacgttttctagtgatgattatgataattcataatcatctttggtggtgtgctatgtgctgtttccccaacgactcgaatccggaatccccattctccccgagtggcctctggcttgacaaaacaagaacaggaccggttcctgttccctagatctgcgtagaggcgacgggacacctgaatccgcaaaaaagggttcgcggtttgattgagaggaacgcaggaacccagcgtcaaaacccaatcttgacgctcgtgcagccgtgcgccatcgtcttcttcgtgtgatatagtgggtacgtcagcgacgagacgatgggcaccttcgctcccatccttcaccggcggccgcttgagcggtacaggctccacacgcgggccgaagaggaggcgaagaaccgcgtcagcctctccaccgtcgtccgcggcgtacttcggcagcagctcgtgtaggccgtcatcgagatgatcttgttcatggtaaggggacaggtagctctggtcggcataccgtgaaacaca

SEQ ID NO: 142120 - DNA, 884 bp, Zea Mays
tggccaatggggccgggctggaggaggaggggctcccaacccaaccttcgctcgcttccgtccaccggttccaggttccagccgcgcgacgcgacgcgacgcctctcgatcgccaccagcttgcagcagcccgcggcaatgagcggcaacaggaacggcaggggcaagggtggcgccgcgcggcccgtggcgacatgcatggccgccatcatcgtctgcgtcgtcgtgctgctcgtcgcggcgtcggctctgctgttcctgctgtcgtcgtcgccgccgccggcgacgggggtaccggggaacgggccgcctcgagagccggtggagctggcgatcggcctcgccgggcacgagcgctggctggacgcgctccgcgcgtgggccaagctcgcgtgcttcaacctccgccggccgccggccgagccgcggtaccatctgccgcggagcccggcggcgtcggtgacgaaggcggccaagagcaccctggagatgggcaaggagatggtggagaagttggcggagtcggcggccagggccaccgaggaggcgctcgagaggaccaccgagaaggtcaggaggaaggtctcgccgtcggcgcggcgccctgatggagacctctgagcggaacttttccgggctttttttgtttgttccttcttcgttttctaaagcttcagtgctgtgtactctgtagcgtctatatcctgtagcgtgtaaaattgtcaagaacgtactgtaccaccagccagaccacagcgtttggtaagttcgcgatgtaaacgtgttctgtatgaggtgtggacgtatcgcgaatctgcgacgcagatcgatgcttgcaaattatattcagtgagccagtactgtaccatacaataaccacagcg

SEQ ID NO: 142121 - DNA, 285 bp, Zea Mays
atgccattcttgaagacgatggtctggaggcggcgctggagaaagttctcaacagtgagggcaaagcacataatcaagcttgttctgtccctcaccaaggagaccatgtcggttcatgcggcggaggagtgcctcgccctcaaagatacggcgtgggttcttctcatccagggtgagcagctccctggctgcattcctgatacggctcagggcatactgcacgcgccacagctcacgcttgcagcggaggccatactcaccaaccagcttcaactcagcatctag

SEQ ID NO: 142122 - DNA, 1659 bp, Zea Mays
atgctaccgcggaagccgctgacggcgctgctcaagtcggcgacgcggccagggcacttgctccagctccacgccctgatgctgaaatgctcccacttcccgcaccacgcgttccccaccgctaggctcatcgcctccccgctcgcgccgctcccctacgcgctctccctcttcgccgccgtgccgcggcccacgctcttccaccacaccgccatcctccgcgcgctctcgtcgtgcccctccgcgacctccctcgccgcatccctctcggtcctcgcctccgcgcgggcgcgcctccccgagctcaacgagttcgcgttccagccgctgctcgcgctctgcgcgaaaatccccaatgacgccgaggcagcttcgattggcaagcaggtgcacgcgctcgtgctgcagtacgggttcctggacattgtgagcctacggaatgtgctgtgccacttctactgcagcagcgggagcatggcggacgcgcggaggatgttcgcggaaatgcctgagaaggacgctgtgtcgtggaacacgatgatcggaggctacgtcaatgtaggggatgtgggcacagcggttcagatgttcacggcaatgaggtggtctggagtggatgtcaacgtgaccgtggtgatcaccttgattgggtgtggctggcaaggggagtcagtgcatggcttctgcgctaaggcagggttatgcgacgatgtgaaggttgcggcagcaatggtgaggatgtatgtgagggagggcagcattgagtgtgcaagcaaggtgtttcatgagacagctagaagagacttggtgctgtgtaattgtatggcggatggctatgcaaaggctgggcagatccaggaggcgatggacttgattggtggaatgagacagcttgggatgagacctagttctgggacgcttgtgggcgttctctctgcgtgtggagcgtctggggcattggcagccggtcgctctgtccatgagcttgctgaagaggcacggctcgagcttgacagcacgctcgggacagcgatcatggacatgtacttcaagtgcgggtgccccagtgaggcagctgcagtcttcgatgcaatacgagatagggacgtgaaggcatggacagcgatggtcatgggatttggagttaatgggcagccaggctccgccgtctccttgttctacaggatgatggaagacggtgtggctcctaacggggtcaccttcctagccctgctaactgcttgtagccatggcgggttggtgcaggaagggaaggaattcctcgagacaatggtgcagcgatacggcatatctcccagccctgagcactacagctgcgtcatcgatctcctgggacgagcagggcgtctacatgaagcctatgaactcatacagagagtgtcatcccatggtgatgctacggcgtggagagcgttgcttgccgcctgcagagtgtatggcaatgcgaagctggggaggatggtgcaggcacagttggacgccattggccactaccatccttcagatgccattctgctgtcgaacacatacgcatcagaaggccggtgggatgagatagctcaagtgagggattcagaaacacagaaaatctctgtgaagaaggaagcaggctgcagctccgttattgttgcttgctga

SEQ ID NO: 142123 - DNA, 180 bp, Zea Mays
atgcatgcctttccattgttctgtctatcaggttctagcatgtttcccagctcaccaaagagatcattctgcttgtcccgcttacgtttctctctctcagatttatgcaccttctttggagccttcttttcgcacttgttgttctggataggcctatcgaatgttcggtatcagcgataa

SEQ ID NO: 142124 - DNA, 1060 bp, Zea Mays
atttcgtcatgttcttgcattgtttacgttatatatatacggagtagcgcgcggcagtatataagcattagctggtgggatcgatcgctgcagagttgttgattgcagggaaaccgccaattggcaaggatgatgaagcttgcgatcgccttcgtcgtgctgctctcttctttcctcgccgactcgtccaccgcggaggagttcgatttcttctaccttgtccaacagtggccgggctcgttctgcgacacgcggcagggttgctgcttcccggacggcgcgggcaagccggcggcggcgttcggcatccacgggctgtggcccaactacgccaagtgccgcggccgccaccaccgcgagggcggcggcctcgcccgcgcggtgctcggcgccggcgacgccttcctcgccgccgtggggcggcggggcaagtgctggccggagtactgcggcggcggcggcggcggccaccagctgagcccctgggacatccgggacctggtggcgtcgctgggccggagctggccgacgctgtcgtgcaagaaccggcgcagcttcgagttctggagctacgagtggaagaagcacggcacctgctccaacctggacccgcacgactacttcgcgcgcgcgctgcagctcagggcgcggcacgacctcgcggcggtcctcgcggacgccgggatcgtgccgtccgacaccgacacgtacccggtggaccgcgtcagggacgccatcgcgcaggggaccggcttcgcggccaacctcgagtgcaaccgcgacgcggacggcgaggcgcagctgttccaggtgtaccagtgcgtggaccgcgaggccaaggacctcatcgactgcccgctccccatgcccaccaagtgcaccgatcgggtcaagttgcccgtcttctgattccgagcttctggctgtcgtttgcaattgtaaaaacgggccgggtgcagatcgatcgatacgacgatacatgcatgtttgcgtatgtgatttcgaaagcggatttgaataaatgtgtgtttaccttttatttgcgtatggagatctgttt

SEQ ID NO: 142125 - DNA, 1203 bp, Zea Mays
atgggccttttgcgggacgtcggccgctacatgatccatgtatttttggtgggccgccagctgcagcagccccagcagtcagtttcagttcaacgctgcctcctggtgctgctgcacgtacgcgacgcccttgtcgatgctggccttgagcgtgggcttgagggcctccagcgcgcgcgcctcgtagtcggtgagcgccctgagctcggagcccatcacctcctccacgccgtccctcccgagcctcaccctgcacgcgaagaacgggagctccggcaccacctgcgactgcacgtacgcgcactcgtacacgtcgccgtggccgtcgaggccgcgcagggacgcctcgaggaaccgcgcggcggcgtacgccatcgacagcgtggcggacccgccggcgccggcgtcgcggaccctggccgtgagctcctccacctcatcgtccgtgaacgccgccttgggccgcgccttggacagcagcggcaggatggtggccgccgcgtggccgcccaccaccggcacgtccacgtccgccagcggcaggcccttccgcgccgccacgaacgcgttggcgcggaccacgtccagcgccgtcacgcccaacagcctccgcgggtcgtacgcgcccttgtgcttcagcacctcggcggcgaccggcaccgtcgagtccaccgggtcgctgatcacgtgcaccagcgcgcccggcggcgcgtggtccgccaccgccgccacgagctcccgcaccacgcccgcgttggcgccgaaccggtcgtcctcccgcgtcatgccgggcttccgcggcacgccggcggcgaccaccacgacgtccgcgcccgacaggcaccccgcgagctcgtcttcgcccgtgaagccggagacccgcgccggggtgttgcagtggctcaggtcggcggccacgccctccacgtcggcggcgatgtcgtacaggtgcagcgccgagacgagcggggacatcttggccagcagggacagcggctgcccgacccctcccgccgcgccaaggatggccaccttgtagccgccgccggcctgcgcgacgatgacccggcacgcggctcggggtcttggcactcttggtctcagcgtgaaagagtggcagtgggagctggagttactgaactgccgtgcgttgaagttgaaggtactggcacagtgccggggccgcttttcgcgaggaactga

SEQ ID NO: 142126 - DNA, 99 bp, Zea Mays
gtggacccacatgtaagtgagatagtaatggtatggatccaaagtggtgatcttttaatggtatggatccaaatttccctattctaaaaggaagttaaa

SEQ ID NO: 142127 - DNA, 1937 bp, Zea Mays
ttaagaaaagcaccagtggcatcgagcgcatcgcgcactcgtgctcgggctcggctccgtccgcgactccgccccacccctttccgtcagcggccgcaaccaccacaccaccacccaatggaggccggggaaatcggcggggcccttgtcttcatcctcgccgccgccgccgccgtcgcggccgccgtgtccgtcggcgcggtcgacttcagccgcccgctcaccgcgggggcgccgttcgacttccaggcggcggtgtcctggctcatcggcatcctcgacggcacgtcctcggcagcggcggacgtggacggggcgtgggtggcggtgcgggccggggtgatcgcgccggtgctgcaggtggcggtgtgggcgtgcatggtgatgtcggtgatgctggtggtggaggccgtgtacaacagcgtcatcagcctcggcgtcaaggccattgggtggaggcctgagtggaggttcaagtggaagcccctcgacagcgccgacgaggagaaggggaccgcccacttccctatggtcctggttcagatacccatgtacaacgagctggaggtgtacaagctgtcaatagcggcagcatgtgagctgcagtggccaaaggacaggatagtaattcaagtgttggacgattctactgacccctttatcaagaatttggtggagcttgaatgtgagcactgggtgaacaaaggtgtcaatattaagtatgccacaagaaccagccgcaagggattcaaggcaggagctctgaagaaaggaatggaatgtgactatgcatggcaaagcgaatacattgctatatttgatgctgatttccaacctgaaccagattttctgctccaaactgtcccattccttctgcacaatccagaagttgcacttgttcaagctcggtggtccttcgtgaatgacacgacaagcctgctgacaagggtacaaaagatgttttacgactaccacttcaaagttgaacaagaagcaggatcagcgacctttgccttcttcagtttcaacggaactgctggagtgtggcgtacaggagccataagagatgcaggaggttggaaggaccgaactacagttgaagacatggacttggcggttcgagcaacactaaagggctggaaattcgtatatgttggagacgttagagtcaagagtgaactgccgtccacttacaaggcctactgtcggcagcaattccggtggtctagtggtggtgcaaacttattccgtaagatggcaaaggatgttttgtttgccaaggatatatcactcgtcaagaagttctatatgctctatagcttcttctttgtgaggagagttgtagcgccgacggctgcctgtattctctacaatgtcatcatccccatctcagtcacaatcccggagctttacctaccagtgtggggtgttgcctatattcccatggtgcttaccgtggtcacagctataagacatccaaaaaatctacacatactgccattttggattttgtttgagagtgtgatgacattgcatcggatgagggctgcgatgactggactgctggagctagaaggattcaaccagtggattgtgacaaagaaggtggggaatgatctcgaggacactgaagttcctttgcttcagaaaacccggaaaaggctgagagacagagtcaatctccccgagattggattttcggtgtttctcttcctctgtgcatcatacaacctggtgttccatgggaaaacaagctactacttatatatgtaccttcaggggttagcatttctgttactagggtttaacttcactggcaattgttcttgctaccaatgatagcatgtcaaagctgtacgaattgctgattgatattcattttctggtcatgcgttcgtaatgtttcaaatggtttagatcttagatgcatagaaaga

SEQ ID NO: 142128 - DNA, 1995 bp, Zea Mays
ttaagaaaagcaccagtggcatcgagcgcatcgcgcactcgtgctcgggctcggctccgtccgcgactccgccccacccctttccgtcagcggccgcaaccaccacaccaccacccaatggaggccggggaaatcggcggggcccttgtcttcatcctcgccgccgccgccgccgtcgcggccgccgtgtccgtcggcgcggtcgacttcagccgcccgctcaccgcgggggcgccgttcgacttccaggcggcggtgtcctggctcatcggcatcctcgacggcacgtcctcggcagcggcggacgtggacggggcgtgggtggcggtgcgggccggggtgatcgcgccggtgctgcaggtggcggtgtgggcgtgcatggtgatgtcggtgatgctggtggtggaggccgtgtacaacagcgtcatcagcctcggcgtcaaggccattgggtggaggcctgagtggaggttcaagtggaagcccctcgacagcgccgacgaggagaaggggaccgcccacttccctatggtcctggttcagatacccatgtacaacgagctggaggtgtacaagctgtcaatagcggcagcatgtgagctgcagtggccaaaggacaggatagtaattcaagtgttggacgattctactgacccctttatcaagaatttggtggagcttgaatgtgagcactgggtgaacaaaggtgtcaatattaagtatgccacaagaaccagccgcaagggattcaaggcaggagctctgaagaaaggaatggaatgtgactatgcatggcaaagcgaatacattgctatatttgatgctgatttccaacctgaaccagattttctgctccaaactgtcccattccttctgcacaatccagaagttgcacttgttcaagctcggtggtccttcgaattttgcagtgaatgacacgacaagcctgctgacaagggtacaaaagatgttttacgactaccacttcaaagttgaacaagaagcaggatcagcgacctttgccttcttcagtttcaacggaactgctggagtgtggcgtacaggagccataagagatgcaggaggttggaaggaccgaactacagttgaagacatggacttggcggttcgagcaacactaaagggctggaaattcgtatatgttggagacgttagagtcaagagtgaactgccgtccacttacaaggcctactgtcggcagcaattccggtggtctagtggtggtgcaaacttattccgtaagatggcaaaggatgttttgtttgccaaggatatatcactcgtcaagaagttctatatgctctatagcttcttctttgtgaggagagttgtagcgccgacggctgcctgtattctctacaatgtcatcatccccatctcagtcacaatcccggagctttacctaccagtgtggggtgttgcctatattcccatggtgcttaccgtggtcacagctataagacatccaaaaaatctacacatactgccattttggattttgtttgagagtgtgatgacattgcatcggatgagggctgcgatgactggactgctggagctagaaggattcaaccagtggattgtgacaaagaaggtggggaatgatctcgaggacactgaagttcctttgcttcagaaaacccggaaaaggctgagagacagagtcaatctccccgagattggattttcggtgtttctcttcctctgtgcatcatacaacctggtgttccatgggaaaacaagctactacttatatatgtaccttcaggggttagcatttctgttactagggtttaacttcactggcaattgttcttgctaccaatgatagcatgtcaaagctgtacgaattgctgattgatattcattttctggtcatgcgttcgtaatgtttcaaatggtttagatcttagatgcatagaaagatggcattcattattctgcacgcttgcagcgattcagatcttgtaatac

SEQ ID NO: 142129 - DNA, 1119 bp, Zea Mays
ccaatattccttgccctcgccgtcgggtctcgtatatataaagctcgcttccacccccaccaccatctatccaaccacaacccagcgcatcatcgcagcggcggcaactcgtcggagcaagcaaagcaaagcaaagctagcaccttccttctcacgacaagctaataccaagcccgatcgattgacatggccgagaggacgaacgcgatggcggcgccgcggccgctcctgcgccggatgctctcgttccgggagccgctcctggtcatcccgtacctgctcagcttcctgggcgccgcggcctcggcgctggcgcgcagccactcgtcgctgctgcactcgctcgccagggcgctgttcccggccggcggcggccgggacgcccggatgagcctgttccagttcgtcaggttcctcgagaacggcctgtgctgaagccacagagggggcagagaagctgtcccttcattttttttcttcttcttcgttcttcttcgtttgcctcggctgctcgtggcaggagatgagacagtgcaccattcggagaggtgttcactggctggcgcgcgtgtgtttttccctcctgccatgagctttgggggtggactcaactgtgcagcaattaacgcactaattcccaaactaagaactactatgatttaatggaactaatttgccggttgcaaacatctcgatttgatgatcttctactatctgtaccaatgctaaatcctggatgacttgtcttttttttttctctttttatttttttgccaactcgaacgcttttatctgaagagacgataaatgtaatttctagcatgatcagacgcatgatacatccgcttcattccacgtgaaggtcaatccatgtgggggcgaatttgaaactcactattcgtagtccaccacgcgcgcctggagtttctgcaaacttcggtcaaaaatccaagcgcaatggtttcaaccttcaaagcatcccaccgaattcgccgaatctggcccgatccgtttcgtcagggtcgcagctttcatgtgttcctgttgttagttggcgtcgatgccggcctgacccagatgctgctgtggcggcgcccttcccttccacgaagtttcgca

SEQ ID NO: 142130 - DNA, 1411 bp, Zea Mays
atctatccaaccacaacccagcgcatcatcgcagcggcggcaactcgtcggagcaagcaaagcaaagcaaagctagcaccttccttctcacgacaagctaataccaagcccgatcgattgacatggccgagaggacgaacgcgatggcggcgccgcggccgctcctgcgccggatgctctcgttccgggagccgctcctggtcatcccgtacctgctcagcttcctgggcgccgcggcctcggcgctggcgcgcagccactcgtcgctgctgcactcgctcgccagggcgctgttcccggccgcgcctgccgccgccaacgccaagcacgcgccgccgcctgccgctgccgctgccgctgccgccgcggcgcccctggacggcgaggacgccgcgctgagcaaggcggaggtggaggccatcatggctacgatcggcctcgcggcggccgggaaaggcgagggcctcgcggccgccatgggccgcgacgaggtgtccgcgctcttcgacgccgacgagcccagcttcgccgaggtgcggggcgccttcgccgtcttcgacgccgaccgcgacggcttcatcggcgccgaggacctgcagtgcgccctggcgcggctcggcgtcaggcaggacgccgccgcgtgccgcgccatggtcgtcgcggccggcggcggccgggacgcccggatgagcctgttccagttcgtcaggttcctcgagaacggcctgtgctgaagccacagagggggcagagaagctgtcccttcattttttttcttcttcttcgttcttcttcgtttgcctcggctgctcgtggcaggagatgagacagtgcaccattcggagaggtgttcactggctggcgcgcgtgtgtttttccctcctgccatgagctttgggggtggactcaactgtgcagcaattaacgcactaattcccaaactaagaactactatgatttaatggaactaatttgccggttgcaaacatctcgatttgatgatcttctactatctgtaccaatgctaaatcctggatgacttgtcttttttttttctctttttatttttttgccaactcgaacgcttttatctgaagagacgataaatgtaatttctagcatgatcagacgcatgatacatccgcttcattccacgtgaaggtcaatccatgtgggggcgaatttgaaactcactattcgtagtccaccacgcgcgcctggagtttctgcaaacttcggtcaaaaatccaagcgcaatggtttcaaccttcaaagcatcccaccgaattcgccgaatctggcccgatccgtttcgtcagggtcgcagctttcatgtgttcctgttgttagttggcgtcgatgccggcctgacccagatgctgctgtggcggcgcccttcccttccacgaag

SEQ ID NO: 142131 - DNA, 1237 bp, Zea Mays
atctatcaaaaaccctagcaaagccacctcaactctcctgctggtccggcgcaggctccgctccgttcccccgctgtagttcgagtgttcgacccggcggccggcggcgacgcgctcgtggtttccagcgatgtcggcgcaggcgggtccagggacgtactccccggcggcggccgcaggagacaggcggcgggagaggaaggaggagctgcggcgccacctcgccgaagacgccgactggccgcgggccgacggccgctccttccacgactgccggccagcgtttatgcagacaggaccaactactgctgcatcagggtctgcttatgcagaatttgggaagacaaaggtcattgtatcggtttttggaccaagggaaagtaagaaagcaatgatgtacagtgacgttggtaggctcaattgcaatgtgagctatacaacctttgccactccagtgcgtggacagggagcagacaacaaagagtattcatcgatgcttcataaagctctggaaggcgcagtaatgctgcacacttttccaaagaccactgttgatgtttttgccttggttcttgagtctggtggcagtgatcttcccatcattatatcatgcgctagtcttgcattggcagatgctggaatcatgatgtatgaccttgttacatctgtatccgtgtcctgtttcagaaagaacatcatcatcgatccaacctcagacgaggaagcatggcaagacggaagccttgtggtggctttcatgccagcccgcaaggagatcacgcagctcacgctcactggagagtggagcgatggcagaataaccaatgcagtagagctctgtatggatgcttgcagcaagctgggtgacatattgcgtgaccgcttgaaagataccgctaccttgacgtgtgaatgacgtgttagagagagcactggcaacaacagatgttcttagctgtacaaattctgtaggcaggggaggctgatcggcctgatgtttgagtgagcatgatgcatggttatgatgatggtctccttcacggcaaaagctgtcaaaccgggaagaaattgcagggcagtgtgtatttggcatgtaacgtacttctgactgacctttgccttcatgtagcatctgtatctttctttttccgcgtactgtaacacttcttactctaccaggagctggaatttttttggttcgggtgaaaaaacattttgctgctctcagcttttcacc

SEQ ID NO: 142132 - DNA, 1307 bp, Zea Mays
ttctggcaaatatccgaacagccagcccgaccgcgcgagccgttggatatttaagcccctcctcactccccccagtcctcccgtgctatccccccattcgtcaccagccaggtcctggaaccttatcaccaaatcctcacatcatggcggccgcgctcttctccacctcgctctcgccccgcttcctcgccctatcctctccgaagccggccgcgcccgcggcctcggccttcctccccttcacgctgccgctgcgcgctgtgtcggcgccggcgccagcgaggcgggtcttcgagcccgtagccgtcgcggtgtcgtcggagtacgggaccgagggcgcggagcagcaggacggggagttctccgaggacctcaagctgttcgtcggtaacctgccgttcagcgtcgacagtgcgcagctggccgggctcttcgagcaggctggctccgtcgagatggtcgaggttgtatacgatagaatgactgggcggagtcgtggatttggattcgtgacaatgtcttcagctgaagaagccggggctgctgtcgagcaattcaacggttatacatttcaaggaagacctctgagggtgaactgcgggccaccgccacctagagatggatccgcaccaagagcaccaaggggtggtggtggtggtggcggcggcggcagctttgtcgattcagggaacaaggtatacgtggggaaccttgcatggggcgttgacaactcgactctggagaacctattcagtgagcaaggacaggtgctggatgctaaggtcatctacgacagggatagcggcaggtcaagggggtttggtttcgtcacctatggctctgccgaggaggtcaacaatgccatatcaaaccttgatggcatcgacttggatggtagacagatccgagtcacggttgcagaatcaaagcccaggcgtgaattttgagattttgttaaggtggtttagaggtcaatagcgtgtgttcacaagttctagtttgtagcgtctattctttcttccgtatgagtaacaagatgctgaattgctgataatgagagactagaagtgaaactgctgtccacaggaagatatttttcccaacccttctatactcgtcgcgcctttaaacagaagtagaaatcttaacaaagttgtgccacatgcgtacataacaaacattcaagagcgctttttcctgaatgttcgtgatgacacgtgtcgtgtatgaatccccgtctctgatgaggtagggtgaaaaatttcagctctagaaaagaaaacttgtattcagctcagctcaaaatg

SEQ ID NO: 142133 - DNA, 1439 bp, Zea Mays
cgcggtcccacacacccgccccccgagcctacctcccaatgtcacctccctcgcatgtcgacccgacacatgaagtttggttgataacatcactaaacaatgacctatacatacacaagtgtcaccctgtcgattgattacctcactaaacaaagacctatgtctgcattagtataacccgttgcaacgcacgggcatatacctataaaatttaaagttcagatcgaattagaatgagacctttttctattcacttttaactatttttttaggattataccattttatgaataaccattaccacctatcacggttccgcacgacggcacgagtcatcgtcgccttcccctccctcgacacgccaaacgcgaactcccgtgccgtgacctcccgatctcaggcgatggccgcgcggcgcctcggatcccccgcctctaggtggctgcgcccgtccgcgctgctcctcctggtcgcttccgctctcctctcggccccgtcgccggcccgcgcgctgcggttcgacctcgagtccggccacaccaagtgcatctccgacgagatcaaggttaacgccatggccgtcggcaagtaccacatcgtcagccccgaccccaacttccccgatgcccagctccccgaatcgcaccgcatctccctcagggtgacgtcgccgtacgggaacagcatgcactacgcggagaacgtgcagtcgggccacttcgccttcacggcggcggaggccggcgactacctggcctgcttctgggcgcccgaccataagccaccggtcaccatcgggttcgagttcgactggaggagcggcgtctccgccaaggactatcccagcgtcgccaagaagggcaaggtcgatatgatggaattggagctgaagaagctagaggaaactataaaaaatatacatgaagagatgttttatctgcgtgaaagggaagaggaaatgcaggacctgaacaggcgaacaaactcaaggatggcttggttagggttcctctcccttggcgtctgcttatcggtggcaggtttgcagctgtggcacctgaagaccttctttgagaggaagaagttgctgtagttgccccacggtatatttttgggtgaactgtcagatgtgttacagagcttggaatcccatgtagcaaacgctatgccagatactagagaaatatgcttcacaatgcttggaatcccatgtagcaaacgctatgccagatactagagaaatatacttcactatgcttggaatcccatgtagcaaacgctatgccagatactagagaaatatgcttcactatgctttagcctgtccagtgaacctctaaggaacttcaaagagaaactaaattgtcttcattttagctcgtgttgtaatttggacatctggattctggagcagtgttgactcttctttatcatgtgat

SEQ ID NO: 142134 - DNA, 1771 bp, Zea Mays
aaacatataaaaacttcaatttcacatataacaaatcatatgattacataacttggtatctagataaatgacaactagagaagggttttattctagctaagttagactctattagatgtttatagtgctattgatgcaggtatattttacccacgggtagacgggtatgggtagtaccaacccatacccgtacctgtttacccaacgggtagaggtttttacccattaacatacccgcgggtaaagaaatcatcccgtacccaccttcatatcgggtaaaacccgtcgggtattcgggttacggatatccattgccatctctatgcacgtctgcgccagcacacaaggtctcaacgaggtggaggggagccgtctgctggcctggcaggctgacactgcagcactgaccggcaatccacttccgggtctcgcactctcgcttgcttcgccggcccgacacattgattgattgatgagaggcatgtgaggccagcatttctcggcgcgccgttgtccgcttgtcgctagtcgctacccttcgccttttctgtgctgctgcgtgactgcgtctcgtgtcaggctgtcagctagctttggggttgggggcggggcagtggggccctacggccggccatggccgccgcggcgaacacacctcagtgtcaccggccgtggcagctggtggtcccagcgagagcgagcgcgagcgcgagccgccgcactagccggccagccgcagcagcaggagtgggggctggcggtgcgccgaacgcatggacggggatgccaccgccacctgcagctcggcggaccgtgagggccaaggccggtgcggccgaggcgcggccgtcgtcgccgccggacgccgtgacctacagcgcgagcatctccacggacacgcccctccacgaaccccccggggtctccttcgacgagtacatccaggaccgcgcgcgcgtgttccgcgccatgttccccgacgagagcaggagccagcgggtcggcgacggggaatggcgggtccacatgctgccgctgcagttcctcctcctcaccgtgcgccccgtcgtcgtcatgcagctgcggcaccgcgccggcgggctcgacctccgagtcacggagtgggagctgagggggctggacgccagctacgcgccatccagcttcgacctcggcgtgagcgggtcgctgtacgccgaccggagcaggagccgcgggtgccggatgaggggccacctggagatcgccatcacctgcgtcctgccgccgcccctgcgcctcgtgccagagaccgtcctgcgcggcgtcgccgaatcgtaacgcagtgcaggtcctgtcgacgctggcggagaagatgaagcgggacgtggacgtcggcctcgtcgccgacttcaggaggtttcgccgggagaaggcagcagcgtccagggccacgccgacgctgggcgcgacggcatcggacagagacgaagcctctgagtctgaatcctagcgtggtgtgtgtgtggtcagtggactgcagcttcccttggtctgtgcacagagagtagtgaacatgatacatttacatctggtttctgccacgaacagatctgagaccagaacacacggaaacacggtggagtccggtccactttctacgtatgaatagatctctgtagcatcttatgtaatctcccatcccagcgcatccaacacgactctgacatgtacatcaacaccgccacacgagagcgatctacccaggaacaagaacaaaaaaacataataa

SEQ ID NO: 142135 - DNA, 1766 bp, Zea Mays
aaacatataaaaacttcaatttcacatataacaaatcatatgattacataacttggtatctagataaatgacaactagagaagggttttattctagctaagttagactctattagatgtttatagtgctattgatgcaggtatattttacccacgggtagacgggtatgggtagtaccaacccatacccgtacctgtttacccaacgggtagaggtttttacccattaacatacccgcgggtaaagaaatcatcccgtacccaccttcatatcgggtaaaacccgtcgggtattcgggttacggatatccattgccatctctatgcacgtctgcgccagcacacaaggtctcaacgaggtggaggggagccgtctgctggcctggcaggctgacactgcagcactgaccggcaatccacttccgggtctcgcactctcgcttgcttcgccggcccgacacattgattgattgatgagaggcatgtgaggccagcatttctcggcgcgccgttgtccgcttgtcgctagtcgctacccttcgccttttctgtgctgctgcgtgactgcgtctcgtgtcaggctgtcagctagctttggggttgggggcggggcagtggggccctacggccggccatggccgccgcggcgaacacacctcagtgtcaccggccgtggcagctggtggtcccagcgagagcgagcgcgagcgcgagccgccgcactagccggccagccgcagcagcaggagtgggggctggcggtgcgccgaacgcatggacggggatgccaccgccacctgcagctcggcggaccgtgagggccaaggccggtgcggccgaggcgcggccgtcgtcgccgccggacgccgtgacctacagcgcgagcatctccacggacacgcccctccacgaaccccccggggtctccttcgacgagtacatccaggaccgcgcgcgcgtgttccgcgccatgttccccgacgagagcaggagccagcgggtcggcgacggggaatggcgggtccacatgctgccgctgcagttcctcctcctcaccgtgcgccccgtcgtcgtcatgcagctgcggcaccgcgccggcgggctcgacctccgagtcacggagtgggagctgagggggctggacgccagctacgcgccatccagcttcgacctcggcgtgagcgggtcgctgtacgccgaccggagcaggagccgcgggtgccggatgaggggccacctggagatcgccatcacctgcgtcctgccgccgcccctgcgcctcgtgccagagaccgtcctgcgcggcgtcgccgaatcggtcctgtcgacgctggcggagaagatgaagcgggacgtggacgtcggcctcgtcgccgacttcaggaggtttcgccgggagaaggcagcagcgtccagggccacgccgacgctgggcgcgacggcatcggacagagacgaagcctctgagtctgaatcctagcgtggtgtgtgtgtggtcagtggactgcagcttcccttggtctgtgcacagagagtagtgaacatgatacatttacatctggtttctgccacgaacagatctgagaccagaacacacggaaacacggtggagtccggtccactttctacgtatgaatagatctctgtagcatcttatgtaatctcccatcccagcgcatccaacacgactctgacatgtacatcaacaccgccacacgagagcgatctacccaggaacaagaacaaaaaaacataataagcgctcta

SEQ ID NO: 142136 - DNA, 1422 bp, Zea Mays
ggctgacactgcagcactgaccggcaatccacttccgggtctcgcactctcgcttgcttcgccggcccgacacattgattgattgatgagaggcatgtgaggccagcatttctcggcgcgccgttgtccgcttgtcgctagtcgctacccttcgccttttctgtgctgctgcgtgactgcgtctcgtgtcaggctgtcagctagctttggggttgggggcggggcagtggggccctacggccggccatggccgccgcggcgaacacacctcagtgtcaccggccgtggcagctggtggtcccagcgagagcgagcgcgagcgcgagccgccgcactagccggccagccgcagcagcaggagtgggggctggcggtgcgccgaacgcatggacggggatgccaccgccacctgcagctcggcggaccgtgagggccaaggccggtgcggccgaggcgcggccgtcgtcgccgccggacgccgtgacctacagcgcgagcatctccacggacacgcccctccacgaaccccccggggtctccttcgacgagtacatccaggaccgcgcgcgcgtgttccgcgccatgttccccgacgagagcaggagccagcgggtcggcgacggggaatggcgggtccacatgctgccgctgcagttcctcctcctcaccgtgcgccccgtcgtcgtcatgcagctgcggcaccgcgccggcgggctcgacctccgagtcgtgcgtatagcttgaccggccacgtcttcccttccttcccatcgtgtaccggcacctgcaactacgagcgttgatcgatgcgacttgtacttgtacagacggagtgggagctgagggggctggacgccagctacgcgccatccagcttcgacctcggcgtgagcgggtcgctgtacgccgaccggagcaggagccgcgggtgccggatgaggggccacctggagatcgccatcacctgcgtcctgccgccgcccctgcgcctcgtgccagagaccgtcctgcgcggcgtcgccgaatcggtacctagctctcgccaggcatccaaaatacgtagtcctcgtccggttccttgaaaactggagcccagtaacgcagtgcaggtcctgtcgacgctggcggagaagatgaagcgggacgtggacgtcggcctcgtcgccgacttcaggaggtttcgccgggagaaggcagcagcgtccagggccacgccgacgctgggcgcgacggcatcggacagagacgaagcctctgagtctgaatcctagcgtggtgtgtgtgtggtcagtggactgcagcttcccttggtctgtgcacagagagtagtgaacatgatacatttacatctggtttctgccacgaacagatctgagaccagaacacacggaaacacggtggagtccggtccactttctacgt

SEQ ID NO: 142137 - DNA, 1229 bp, Zea Mays
gtccgcttgtcgctagtcgctacccttcgccttttctgtgctgctgcgtgactgcgtctcgtgtcaggctgtcagctagctttggggttgggggcggggcagtggggccctacggccggccatggccgccgcggcgaacacacctcagtgtcaccggccgtggcagctggtggtcccagcgagagcgagcgcgagcgcgagccgccgcactagccggccagccgcagcagcaggagtgggggctggcggtgcgccgaacgcatggacggggatgccaccgccacctgcagctcggcggaccgtgagggccaaggccggtgcggccgaggcgcggccgtcgtcgccgccggacgccgtgacctacagcgcgagcatctccacggacacgcccctccacgaaccccccggggtctccttcgacgagtacatccaggaccgcgcgcgcgtgttccgcgccatgttccccgacgagagcaggagccagcgggtcggcgacggggaatggcgggtccacatgctgccgctgcagttcctcctcctcaccgtgcgccccgtcgtcgtcatgcagctgcggcaccgcgccggcgggctcgacctccgagtcacggagtgggagctgagggggctggacgccagctacgcgccatccagcttcgacctcggcgtgagcgggtcgctgtacgccgaccggagcaggagccgcgggtgccggatgaggggccacctggagatcgccatcacctgcgtcctgccgccgcccctgcgcctcgtgccagagaccgtcctgcgcggcgtcgccgaatcggtacctagctctcgccaggcatccaaaatacgtagtcctcgtccggttccttgaaaactggagcccagtaacgcagtgcaggtcctgtcgacgctggcggagaagatgaagcgggacgtggacgtcggcctcgtcgccgacttcaggaggtttcgccgggagaaggcagcagcgtccagggccacgccgacgctgggcgcgacggcatcggacagagacgaagcctctgagtctgaatcctagcgtggtgtgtgtgtggtcagtggactgcagcttcccttggtctgtgcacagagagtagtgaacatgatacatttacatctggtttctgccacgaacagatctgagaccagaacacacggaaacacggtggagtccggtccactttctacgtatgaatagatctctgtagcatcttatgtaa

SEQ ID NO: 142138 - DNA, 220 bp, Zea Mays
ggagcggcactacactcctccacgcctccacctccagcctcccactgatctggcctctctcgagatcaatatgagaaggggctacagttacagtccttcaccaccaaggggctacaggagaagggcgcgcagtccaagtcctcatgatcattatggtggtcgtggtagggatctcccaaccagtcttctggtcaggaatctccgtcgggactgcaggtaa

SEQ ID NO: 142139 - DNA, 914 bp, Zea Mays
gacgcaacacaagcctaaaagattattgttgaagagaaggaagaaatagagaaattcaattaagtgatctgcaacttaaaagagtactcagtactgttcaagagatgggaagaaatagagttacaagtttaagagatactcacatcatgaagagtttcaagtctgaatttaaactctcatgagtgcaagggatccccgagggtttgggtttgtccagtattatgatcctgctgatgctgctgatgcgaagtactatatggatgggcaggtagttcttggtaggcaaataacagttgtttttgcagaagagaacagaaagaagcctcaagagatgagagctagggacagagtcaggggtcattcttatgatgacaggaggtattctcgctctaggtcgcctcgttattataggggccgctctccttcacgcagccaaagctactcgaggtctccacctcagaatccaagacacagacttagagagaggtcctactccggctcacctgtggacagcagatcaagaagtgggagcccttatgaggatggatatcgcaaatcatcacggagagagaggtctctttctgtcagcggatgaagcagttttacggtctagagctattgctgtgaatctgcgcatggtggcctacttgctatgtctttctgaaccatatatgttctgtctagattatcattcccagtaccagagaagtatcgtgagactgtttgctgtactttctagtcttgaggatacagaagggggtcaccgattctctcagtagatggactattgaccactagctacgccagttccactgctttgtgtatttacaggcagctttgcggtttgaataaaattgtttgcatcgtgaaagctaattggtaaaaagactgaatcatgaaacgaacgttttgca

SEQ ID NO: 142140 - DNA, 474 bp, Zea Mays
atggctaccaattatagttccacgaaacgacctctgatgttgaccaaacgccactcgacccttccagaagggtctcgaaacgatgaaggcccaacagagcatgagagcactgagctcgagggtgcctcgccattacgcaagcccaacaccagcgctagcagctacttggtcgaggtatgcgctaggacgtccacaccgagagtggcctctgacgcgcgtcgcagcgacgtctccatggaggttgcttccagttcatgtgcgtcacatggtgaggcgctacagcgacttgcagaccctatcctatgctccttctatcgagtcacacgccaccacgagcgtcatccccctcccccttcaaacgacgctgtgctgcaggttcaatccgccgctaggcgctccatccccaaactgctgtcgaggtgccggctcgggcggccgcctggaggtccatcctccctccctcccttctcttaa

SEQ ID NO: 142141 - DNA, 1986 bp, Zea Mays
atgggcgtgctcttctcatgccccgtggaggaggaggaggacgtgccggcaggagctgcagctgcccttccggcgccgtgcaatgccgccgtggagccgccggccctcaagccgtcgctgcagggctccgggaagctccggttcgagcgctcgctcggcagcctgatccggcgggagcagcagagccccagcgcgcgcctgcacgtggacgtcgacgtcgacgtcgacgccgccgccaagcaggtccccgccacgtccaccgtagcgcccgtgccgccggtcatgcccagggagctcgcgcggaccaggttcgccgacgccgcgcccgcgcccgcgccggagagccccaagcacgaggcggcggccgtcacggtgcagaaggtgtacaagagcttccgcacgcgccgccgcctcgccgactgcgccgtcgtcgtcgagcagagctggtgggagctgctggacttcgcgctgctcaggcggagctccgtctccttcttcgacatcgagaggcaggagtcggcggtgtccaagtgggcgagggcaagaaccagagctgccaagttccagttcttcccacaggagattactgacggcattcgcaacaaatcgcatcgagatcaggttggcaaagggctgtccaaggatgacaaggcccagaagcttgcgctgcagcactggctcgaagctattgacccgcgccaccggtacggacataacctccactactactacgactgctggctgcggtgcgagagcaaggagcccttcttctactggctggacgttggagaaggcaaggaaatcaatctcgagcggtgtccgcggttgaagcttctaagccagtgcatcaagtaccttggtccgaaagaaagagaagagtatgaggttgtgatcgaggatggcaagttcatgttcaagaaaagcaggcaaatcctagacacgtccgatggaccaagagattccaagtggatctttgttctaagtacatccaagaatctgtacgttggacagaagaaaaagggcacatttcagcattcgagcttcctcgctggaggagctacatctgctgctggtcgactagttgtggaagatgggatcctcaaggctatttggccacacagcgggcactaccgcccaacggaagagaacttccaggaattccagagcttcctcaaagacaacaatgtcgacctcactgatgtcaagatgagcccagatgaagacgacgaggagttttggagcaggctcagaagcatctcttccgactgctgcgccgtcgctgacaaacccgaagaagatcaacaggccgcagctcaagaaaccagcaacagttgccaggcacctcaagtcactgaatcgaccacacctgacgaagtctctccctccccgtcccagcaggaagaaaccagcaagagtctcagtcccactgcaactgtcacgaggcaagattcatcagaggacgccgagacctcaacgacaagccaccgtgccctgttcgaagatggtcaggaggaggaccacgctgccgcggccaccgccgccgacgacaatacagccgtgccgagggagaagatcctgcagaggatcagctccaagaaggagaccaagtcgtaccagctggggaagcaggtgtcgttcaagtggaccacgggcgcggggccccggatcgtgtgcgtccgtgactacccgtcggagctccagctccgggcactggagcaggtgcacctgtctccgcggagcggcggcgccgccgcagccgcaggggccggtagggcggcctcgtcccggttcgcctcgccgcagcggtgcggcagcccggttgcggcgagagggcgccgcgagcctctggcgtcggcggggtgcggcagggcggcctcgtcacggttcgcgtcgccgcagcggtccagcagcccgatggcgagagcgcgctgcgagcagctgacgccgagggaggcgttccggacgcacctgatggccagaggttaa

SEQ ID NO: 142142 - DNA, 96 bp, Zea Mays
ctctgtcctcaacttgaatggatgctggctggtgaccttgagctttttgttccagctgctccttagtgactcagatgactgctagagagcaagcat

SEQ ID NO: 142143 - DNA, 499 bp, Zea Mays
agatcaggaaagccaaccagcacaaggggatgtatggcgtgattttgccttggaaaatctctgattctttatgctctacattctacaagtgcctctagagatggagattctatgctaagggtttaggagctgcatggtggatggtacattgtgctttctgcgccgtgcttcctgaaagtctatctgaagttagtttaaaatatggtttatgcaagtgttccagatatttcccaaggtggattcgaggcttgtgctgaacttgtgctagcctagcctgttataagatctatggtaacgatgactgcaatttatctatgcaagtgatccagactgttggcacatgctggcacgccttgtgataacctactgctgaatgtctcccataaccttttgattctcgtgctcgatcgcaagtgtttctcgacctagcgtgaagagaatgtttcggtacttgaattctagcctgtggctgctaaacttgttctacttggatgggtcc

SEQ ID NO: 142144 - DNA, 471 bp, Zea Mays
atgggccttctcgaggtgctcacggcgagggaccgcctgctgccgcgctccgcgtgccggtaccagcggctgcgcggcggcgagctcggcggctcgtcgccgtcgacgggagcaagcgtcagggcgaggcggccgctgcggctgcggctgcggcggagggcgtgcaaggcgggagggagatggggggccaccaccacgactgccaacggcggcggcaagcggctgcggctgcgcctggttcggctgctgctcctgcttcccgcgcgccgggttgccgcgctggtcgcggaggtcgtgcggcgtctgctcgcggcggcggtggccgctgcggactgccccgccatcgtcttctcctcccagtgggggctccccgtgctgtcgccgcactgcggcagcagcagcaggagctccaggccgcggggcttctaccttgacaggagcctctccggcgccggctctggcgtactatga

SEQ ID NO: 142145 - DNA, 1683 bp, Zea Mays
aaagggacggcgtgcgtcgcgaactggtgctccggcgggcagaccacgcggtacgtgagttccaccacagagcacaggggcggaacacacgggcactagcggcggacgcgtgtggccggggatctagatctcccatctcctccaccacaccaccaccaacgcgcgcgcctcgcctcgtctccctccagtccaaaccgccgtcgaccgccttgcccccgactgtcgcggcgcccgcactcccacccgctgctgccggatcccctgcccctaccgtacggtctgcccgctttcaccgcccgcccgcccgccgccgccagcctagctggggtcgggtggagatccaccaggaaaagagggtgctctcttctcctcgtgcgggtgttgtaattttgtcaagccggaagggcagcagtacttgtagagttgttccaccatggccaatgatggagacgatggacaaagccaggattatctcttcaaaattgtcctgatcggggattcctctgttggtaaatcgaacttgctagcaagatttgcaaggaacgagttctacccaaactccaagtccactataggagtggagttccagacacaaaagttggtaatcgatgggaaggagattaaggctcagatatgggacactgctggacaagagcgctttcgagcagtgacatctgcttactaccgaggcgctgtgggagctcttctcgtctatgatattagcaggcgtcagactttcgacagtgttggtcgatggctcaatgaactacacaatcattctgatatgaatgtcgtcacgattctggtgggtaacaaaaccgatctgaagcatgcgcgtgaggtgagcaccgcggaaggacaagcactggccgaggctcagggcctcttcttcatggaaacctcagctttggattcgtcgaatgttgcagcagcttttcaaactgtggttaaggagatctacagcatactaagcaggaaggtgtttcagtcactagagcagaagaaaagcgagctgcagtcgctaagcagcgggaaagccgtggtgctgcagggtgaagccaaccaaacaagcagtggtgggaggtggtgctgttcctcgtgacctgacacgaggactgcagctatggagggcgatcggattgtgagacattcgggtgtgtaaccctgtagtccgatttgtgaaaagttgcttttcccccatgttcttgttctaaaggtaagctggcgtggctgcttgtacgaaagctggtgttttccgtcggaggaaatcaatgtatagttcgattgatccttgggaggtgtcgatgatacacatgattgtgtaaagagaaaaagcgcgaccaacttgactgttgcgtcattctacatcattctagtcctagaaaccgttctttcattttgaattactccgaacgtagacatctataagtaccagacaccgtgctttcgccagtcttaggatctgtctggcacggtaaagggattgtgttgggttttcattaagagaaaaatatacattaaattttgtcaacttcaacattggtggtctctatcctatgatgatcaacttcgaacgtagtgtttggttgaggagccaagtagaacggagtcgttccatctttgattctaggaatggagccgctctgttctgtgtttggtaatttggaacggagcggttatgtt

SEQ ID NO: 142146 - DNA, 1044 bp, Zea Mays
atggccggcctcctgccccagcatccagctactgtagacatgagtgacagcgtgctcatcagttcctgtttcacacataaattcaagatcaactatgtggagacggagaaggtcgccgtcgagcactcagtcaggtcggagcaaatcctcgccggtgggcacctctggaggatcatctgcttcccgcgtaggatcggaggtatgaaagagagcaacgttgagtacctatctatatacctctgtcatgagagcgaatccaaagacgtcaaagctgtcttcgaggcctttgtaatgtacaaagaaggcactccatctttggcccataagaaaaagctggtgcacgttttctcacccaaggccggcggcaggcacatccatggttggccttgcttcgtggagcgaagcgtcctacagtcgttctacgtgacgaattctggctcgttcgtcatcgtgggagccgtcaaagttttgcaggaggaccctctcgacgtgccgccctccaacctcgggatccatctcggcggcctcctgctgggctccacggacggttccgacgtttcgttcgttgtcggcggcgagaggttcgctgctcaccgggccgtgcttgccgcccgctcgccggtcttcaaggcgcagttcttcggctccatggcggaagccaccatgtcgtccatcaccttgcatggcatcacggcagcgacgttcaaggccatgctccgcttcgtgtacaccgatgcgtgtcctgaagaagcccccagcgaggcgtttcaggacctgctcgctgctgctgaccggttccagttggatcgcttgaagatcctgtgcgcgagcaagctgtggaataatgtctcggtggatacagtttctgctacgttgatctgtgccgaaatatataactgcccacagctgaaaaggaagtgcattgggttcttcggggaggggaagggcttcaagacgaaggctgtgttaacggatggttttgctcagctgtcgcagcagttcccgtccattcttgatgagctgaggaagaaggttggagcatag

SEQ ID NO: 142147 - DNA, 107 bp, Zea Mays
gaatctgcactatcacaatctggttatccaaacacgtagattttcacgaacagcttttctgcacagctggcgaaccaaacacctaaattctaaccaccagcttttcc

SEQ ID NO: 142148 - DNA, 1082 bp, Zea Mays
cgcccactcccgtgaaccccaaaacccttcctccccaaacaaccggcggcggcgcgaccgcgcgagggcttcgctttgcatccatggctctcgtcgccggctcctacgagcgcttcatctggggcttctctctcaaaaccctgacgtccccctccgccaccggcgcctcgccctccgagaccctcaccctcgcgccgctcttctcgtacccggcccacacgggcccggtgcgctgcgtggccgcggcgccgcgggcggggctggtggcctccggcggcgcggacgattccgtccgcctctacgacctcccttccgccgcggacctcggcccgctcctggacccctcggccgccgtctccgcgctcgccttctactcccggggccccgtgccgcggaacctcctggccgcctgcgacgacggctcgctccacatctacgacgccgacggcttcgcgctgctctccacgctccgcgccttcccgcgccacgaagccgccgaggcgctcgccgtgcacccgtcgggccgggtcgcgctcgccgtcggccgcgcgggggcgcttgccatgctcaacctcgtccgcggccgacgcagcttcgcatgccgcctcgagcaccctgcgtccgcgatcgcctacgccgaggacagggacggcggggaccgattcgtgatggctgccgagaacaaggtcagcgtgcacgactccgtggatgccagggttattcatgatatggactgtggcaagaaggtgctcgccatggcgcccgcaaagagtggggtcctttacactggaggcgaggaccgatgtattactgcttgggatctgtccagcggcaaggtctcctcacgcattgagggtgcccatgcaactcgtgtaaaaggggttgttgtttttggtaatagcaatgatggatcacagctctccaatctaatttcttctgcttcgtccgatggtgtcataaggatatgggacattcgaacaatcgggaacggaaagcctactccattagcagaggctaatacaaaagcaaggctaacttgtcttgctggaacgtcactgaaatgtaagtcactgaagcttcat

SEQ ID NO: 142149 - DNA, 774 bp, Zea Mays
gcattggccggcaccaccggagaagcaccagcagcaccgcttccaagaaagaacgacggcagtccggtggcatcagctggagaagcggcgaacctctgcagcaggcacgcatgctgagacgtcggccacagcggcgcagcaacggcggcattggactgaagtgtgccccggtcgaaggcgattgcgtggtgaggctgctcctgaaggaaggagaagtggggcagcatcgtctcgaaggatatggccgacgcggagtgcgcgttcgggggctgggtggcgtagtaagcgagcgtcggctgctgctgcactggcttgctgctgttgttggcggagcagtgcaggatcaggtcggcgaacgcgccaccaccggcggcggcgttgttgttgtaggcgtgactgtcttgctgagagtgagcggcggtgttgtcaaccggggcgttggcaagcgagagaacggagctcttgctggtctcggaggtgctgagctcggcgtcgtcggcagcgccgcccggcggagatgcggcggcgtgggggaagacgaaggagcagtcgagcgacgggaggccgtcgatggcggcggcggcggcgcggatgagccactcgatggccttgctgggctggtcgacgccgaggcggtcctggatgtcgtagaactggatggccgtgggcaccgagaggcggacgcggcggtcccggagcccccgcgccgtcaccaccttactgtggcggtccttgccgccggccgcggcgcgcgccacccggcacgccggccac

SEQ ID NO: 142150 - DNA, 333 bp, Zea Mays
gtttgctaggcgtctgattctgcattgttagctgaattagaaaacctggacatgaaagaagaaattgaaggtgaaagatctggcacgcgagcattatctgtgtgcgtttggaacgtatccatccattatgtacaccgacatagttttggcttagtgtctgagctgcataacttatttatatttgattgcgcgacaagttttgcaatgagaaccgttttcagtactaactgtgcaattgcatcacgtacgggactgagttctctgtcaagagagtcattgacgccacaagttattgcagtggcaatcatttccagtttgcatcatttggcatga

SEQ ID NO: 142151 - DNA, 525 bp, Zea Mays
gtttgctaggcgtctgattctgcattgttagctgaattagaaaacctggacatgaaagaagaaattgaaggtgaaagatctggcacgcgagcattatctgtgacgagagcacagcgggagcgaggacaagttctcagtgatcttgtcaagcgacgacagcgctgctgctgcaggctttgctgtggcctgtgggcattggcatccgcgagcttctccacgagcgtcggcgtctccagagcagctcgcctctcgtccgcgcggcatccatcactcaccctacggcggcaatgttgatcgaccccagtcagctttgcttttccagtggcagtacgtatatggtcattatgaagctagctactggtcatcacagtgtggttagcggctgctattactgctattactgctattgctctgtctctgttctctaataacgatggtcctttttggtcccactcgcacatgggcatgtgagcctgtattgacccccacagacctgactgacacctgctaccggctcgtatttgt

SEQ ID NO: 142152 - DNA, 1044 bp, Zea Mays
gaatttcttgattggtacaaacaaaggaatgaagaggtgagaagagattttgatgagttgtgtcccaaaaatgctaagatgacttcagggacgattcaaaaagaacttgcaaactgttgtgcagaagtagtcacacgtgcaattaaagaagaaatgtgggattgtttattctctattcttgttgatgaatcccgtgatatatcggttaaagaacaaaaggctattgttgtgagatttgtcaataaaaaggatgaagtaatagaaagatttttgaggatcaagcatgtgaaggacacaacattagaatcattgaagaaagcattagttgagatgttaagtgatcatggattagttgttgcaaaacttcgagggcagggatatgatggtgcttctaatatgagaggcgaatttaattgtcttcaaaaattaattcgagatgagaactcatttgctttctatgttcattgctttgctcatcaattgcaattgatagttgttgctatctcaaaatgttgttcatcacttgaggatttgtttgagtatgtaacatccattgtgaatatcacttgtgcttcttgcaaaagaaaggatatattacaacaaaaacatcgtttgaatctcttatcaaagttggagagtggagaaatttcatcagggagaggcaaacaacaagaaacatcattgtcaagaactggagatacatgaaggggatctcattacaagactttgctccgtattgagtcaatgtgggaatcagtaatagaagttttagaaattgtgcatcaagatgagcgtaatccatctggtgcagatggctttgttggaaaaatggagtgtttcagcttcgtgtttatgatgaagacgatgttacagatcctccgtatcacaaatacactttcccttctcttgcaaagaaaggatcaaaacgttgtccaagccatgtatttggttgttgatgtgagaacacgtttgattaatttgagaaataaaggttgggagccattgttggaagaagccacaacattctgccttgcaaatgaactc

SEQ ID NO: 142153 - DNA, 1812 bp, Zea Mays
tttcattccgggagatactttacttcacgcacctgtaacgccgcaccattgcaccaacaccaggcaacggcacgccgcgttatgcgttacacgtcgcagctagcactagcactgtacactacagaaacctccattgccagccagctgcgcagtgcgcttgcctctgctgcgttgagcggggacgccgtggaggggcgagggggagccagattgagccatggcctcctcctgggttcttgccctggttcttgcgctgtcggcaggcgcaagcctggcgcgtggctcagagccgtggtggaacgagacacaggtgtacgccaccaccgccaactccggtggcggcaacggcgtcttcgtcggcctcacgctcatccagtcggcggcggccaagggagcggtgtgcttggatggaagcttaccaggttaccacctccacagagggtttggatcaggagcaaacagttggctcgtcaatctcgagggtggaggctggtgcaatgatcgcagcagctgtgtgttccgcaagggcagtcgtcgtggatcatcaaatcacatggagaggcaactccagtttacagggatattgagtaacaaacctgaagagaatcccgatttctacaactggaatagagtgaaggtccggtactgtgatggtggatctttcactggtgatggctctgatgcggctgcaggcctttatttccgaggtcagcgcatttggcaggccgctatggatgacctaatggcccaaggaatgcgttatgctaatcaggcccttctttctggatgctctgccggtggtgtttctaccatacttcactgtgatgaattccatggattgtttccctcgaataccagagtcaaatgcctagctgatgctggaatgtttcttgacactgttgatgtttctggccgtcgggaaatgagatcctttttcaatggcattgtgagattgcagggttctggaagaagcttgcctaggtcttgcacctcacacatggacaaaacctcgtgctttttcccccagaatgtgttgccaaccatccgaaccccaacttttgttttgaacactgcctatgacgtgtggcagcttcaacaaagtgtggcccctagaacagctgatccccaaggtctttggtcaaagtgtaggacgaaccatgccttctgtaatagcaaccagctccagtttttgcaagggttcaggaaccagatgcttgatgccgtgaggggtttctctgcatcaaggcaaaatggtctgttcatcaactcatgttttgctcattgccagagcgagagacaggatacttggtacgcgaacaactcgccacgtcttggtaacaagaaaatcgctgacgctgttggggactggttcttcgagagggggaacgccaagtacacagactgcccatacccttgcgatggcacttgccatcaccttgtgttcaggggagaccactaagatcattcttcagcaccaacaaattcatcagatggtacaaggatcaaaccccaatgggtacagaatggaaaacaggatatagatacagataaggtgcaagtggtcggcttgcccatgtttgttcatcagtgagtcatatgattgatagtgcgaggacctcacccgcgaacgcgcggaggaggcctctgcattagattcacataccgtcatgatatcgattattttcattggaaaagcgtccatgattacgtaccagaacaattgagttacatactcatttcgtgtactgtattaataacactagaacgttacatattcatttgtcctgaagatcgtactacttggcatgagta

SEQ ID NO: 142154 - DNA, 1891 bp, Zea Mays
gccgcaccattgcaccaacaccaggcaacggcacgccgcgttatgcgttacacgtcgcagctagcactagcactgtacactacagaaacctccattgccagccagctgcgcagtgcgcttgcctctgctgcgtataaagtttcttccttccttggccgcttctgcgctcgcctcccttctcctcccccatcctctcccttgtggttctagatccactcctccccgtgctcactgctcatccgcgaacaggttgagcggggacgccgtggaggggcgagggggagccagattgagccatggcctcctcctgggttcttgccctggttcttgcgctgtcggcaggcgcaagcctggcgcgtggctcagagccgtggtggaacgagacacaggtgtacgccaccaccgccaactccggtggcggcaacggcgtcttcgtcggcctcacgctcatccagtcggcggcggccaagggagcggtgtgcttggatggaagcttaccaggttaccacctccacagagggtttggatcaggagcaaacagttggctcgtcaatctcgagggtggaggctggtgcaatgatcgcagcagctgtgtgttccgcaagggcagtcgtcgtggatcatcaaatcacatggagaggcaactccagtttacagggatattgagtaacaaacctgaagagaatcccgatttctacaactggaatagagtgaaggtccggtactgtgatggtggatctttcactggtgatggctctgatgcggctgcaggcctttatttccgaggtcagcgcatttggcaggccgctatggatgacctaatggcccaaggaatgcgttatgctaatcaggcccttctttctggatgctctgccggtggtgtttctaccatacttcactgtgatgaattccatggattgtttccctcgaataccagagtcaaatgcctagctgatgctggaatgtttcttgacactgttgatgtttctggccgtcgggaaatgagatcctttttcaatggcattgtgagattgcagggttctggaagaagcttgcctaggtcttgcacctcacacatggacaaaacctcgtgctttttcccccagaatgtgttgccaaccatccgaaccccaacttttgttttgaacactgcctatgacgtgtggcagcttcaacaaagtgtggcccctagaacagctgatccccaaggtctttggtcaaagtgtaggacgaaccatgccttctgtaatagcaaccagctccagtttttgcaagggttcaggaaccagatgcttgatgccgtgaggggtttctctgcatcaaggcaaaatggtctgttcatcaactcatgttttgctcattgccagagcgagagacaggatacttggtacgcgaacaactcgccacgtcttggtaacaagaaaatcgctgacgctgttggggactggttcttcgagagggggaacgccaagtacacagactgcccatacccttgcgatggcacttgccatcaccttgtgttcaggggagaccactaagatcattcttcagcaccaacaaattcatcagatggtacaaggatcaaaccccaatgggtacagaatggaaaacaggatatagatacagataaggtgcaagtggtcggcttgcccatgtttgttcatcagtgagtcatatgattgatagtgcgaggacctcacccgcgaacgcgcggaggaggcctctgcattagattcacataccgtcatgatatcgattattttcattggaaaagcgtccatgattacgtaccagaacaattgagttacatactcatttcgtgtactgtattaataacactagaacgttacatattcatttgtcctgaagatcgtactacttggcatgagta

SEQ ID NO: 142155 - DNA, 1222 bp, Zea Mays
cgtgccatgggatgcaactccaaaaatctatccttgctttgttttgtttactgaaccacaacaattcactgtctgatttccttctttttctttaggctgcaggcctttatttccgaggtcagcgcatttggcaggccgctatggatgacctaatggcccaaggaatgcgttatgctaatcaggcccttctttctggatgctctgccggtggtgtttctaccatacttcactgtgatgaattccatggattgtttccctcgaataccagagtcaaatgcctagctgatgctggaatgtttcttgacactgttgatgtttctggccgtcgggaaatgagatcctttttcaatggcattgtgagattgcagggttctggaagaagcttgcctaggtcttgcacctcacacatggacaaaacctcgtgctttttcccccagaatgtgttgccaaccatccgaaccccaacttttgttttgaacactgcctatgacgtgtggcagcttcaacaaagtgtggcccctagaacagctgatccccaaggtctttggtcaaagtgtaggacgaaccatgccttctgtaatagcaaccagctccagtttttgcaagggttcaggaaccagatgcttgatgccgtgaggggtttctctgcatcaaggcaaaatggtctgttcatcaactcatgttttgctcattgccagagcgagagacaggatacttggtacgcgaacaactcgccacgtcttggtaacaagaaaatcgctgacgctgttggggactggttcttcgagagggggaacgccaagtacacagactgcccatacccttgcgatggcacttgccatcaccttgtgttcaggggagaccactaagatcattcttcagcaccaacaaattcatcagatggtacaaggatcaaaccccaatgggtacagaatggaaaacaggatatagatacagataaggtgcaagtggtcggcttgcccatgtttgttcatcagtgagtcatatgattgatagtgcgaggacctcacccgcgaacgcgcggaggaggcctctgcattagattcacataccgtcatgatatcgattattttcattggaaaagcgtccatgattacgtaccagaacaattgagttacatactcatttcgtgtactgtattaataacactagaacgttacatattcatttgtcctgaagatcgtactacttggcatgagta

SEQ ID NO: 142156 - DNA, 1645 bp, Zea Mays
ccctctcctcgctgtcgtcttccttcccagggccagcgagagcttcgttgttccggcgggcagttgcaagcaaacaactgccgcgcgcataacgcgccattgaggtaactggctagtgctagtctcccaccctttgcacggcagcttgctagctagcaagctacatacctcgggcgcgcgcggcatggcgaggcggacgagcggccccaagaagaagctgaggaggggcctctggtcgccggaggaggacgataagctcgtcaaccacattgccaagtatggccacggctgctggagttccgtccccaagctagcaggtctagagaggtgtgggaagagctgcaggctgaggtggatcaactacctcaggccggacctcaagaggggagcgttctcgcaggaagaggaggacctcatcatccatctccattccatgatgggcaacaagtggtctcagattgcttcgcagctgccggggcggacggacaacgaggtgaagaacttctggaactcgtacgtcaagaagaagctccggcagcgcgggatcgacccggccacgcacaagccgctcccgctggccgccgagggcatcagcagccgcacggcggtgttcagcgacgccgagctcatcctgtcgtcgtcggcggcggcggcggcggcggggcggcacatgccgccaccgccagtggcggcatcggcggcggagagctacgtgtacagctacagccacagcagtggcggcgcgagcgacggctctctgcagtcgctgtcggggtacaacagcaacagcaagcaaacagctgcggatcacttgggtgccgcagccgcagcggggtacctgcagcaggagcaggacccagcagcagcagcagcagcagccgacgcgctgcactgcggaccctccggtgccccggcggtcgttctcccgtcggtgtccagctccagcacgctgaactcgatggctggcctaagccccgcggccaccaccaccgacgaacagtgcaccaacaactgtagcagctgcagcttccacagcgggttggagccgtggctggagctgggcagcacgagcggctactacggcgcggcgctggacgagctcaagtggtccgactacgtgttcgacggcggctacggtggccagccgggacagggcatctacggcgacagcaaggacgccgtgcagttcgtggacgccaacgcgctcagcagcagcagttggtgcttgaattgatccccgtcggtcgatcccaacgcgctcggcggcgagcaattaactaatcggccggccgccaattccaactccatctccagcacagcagagacacacactgatacacgtgtgcatgtgttcctacgtgcctacctacgaggctacgactacgattgattggttgattggtgatacataaagtagctcatacatgtttgcattggtgagcttcttgtttgtaaattcaattttcgtcttctttcggattggattacagggtttgttaattttccggcgcggtcggtcgacatgtagagagtgcatatggtgacggtgattggggagtgacgagacatacatgtaatggaacatatatatagagagagagattacatatataataataatacatatttattatatttatacaaa

SEQ ID NO: 142157 - DNA, 1842 bp, Zea Mays
ccgctcactcaccattccacacgaaacagacacgagcagtctccatcgatcgagctgaccccatcagccggccggcagggcagacagggagatcgagcgccatgggtccggcctggatggtggcgtcggccgtcgcggccgtgctggcgtcgtgggcgttcaacgcgctggtgcgcctcgtctggcgcccatacgccgtcgcccggcggctgcgcgcgcagggcgtgcgcggcccggcctacaggttcctcgccgggaacctcgccgagatgaagcggctccgcgccgagggcgcccgcgccacgctggacgtcggcgaccacgacttcgtccccatggtgcagccgcaccaccgcaagtggatctcgctctacggccggacgttcctgtactggaacggggcgacgccgaacctgtgcctggcggacgtgaacctggtcaggcaggtgctcttcgaccgcaccggcctctaccccaagaaccacatcaaccaatacgtcacccgcctgctcggcaggggcctcctcctcaccgacggcgacgagtggaagcgccaccgcaaggtcgtgcacccggccttcaacatggacaagctcaagacgatgacggcgaccatgtccgactgcgccctgtccatgatttccgagtgggaggcgaagctggccaaaggcggcgacgcggaggtcgtcgagctcagcagccagttcgaggagctcaccgccgacgtgatctcgcgcacggcgttcgggagcagctacagggaggggaggcaggtgttcctggcgcagagggagctccagttcctggccttctccaccgctttcgacgtccagatcccagcgctcaggtacctccccacccggaataacctacggacgcgggagctggacaggcgggtgaggggcatgctcatggacatcatcaaggcacgcctcgccgtcgccggcaaggacaccgccggcggcggctacggccacgacctgctcgggctcatgctggaggcggcggagcacggcggcgaggcgccgacgctgagcatggacgagatcgtcgacgagtgcaagaccttcttcttcgccggctacgacaccacgtcgcacctgctcacctgggcctgcttcctgctgagcacgcacccggagtggcagggccggctccgggaggaggtccggcaggagtgcggcgcggacgaggtccccactggcgacgcgctcaataggctgaggctggtcaacatgttcctcctggagacgctgcggctgtacggcccagtgtccctgatccagaggaaggcggggacggacctcgacctcggcggcgtccgggtgcccgagggcgccatcctgaccatcccgatcgcgacgatccaccgggacacggaggtctggggcgatgacgctggcgagtttaggccggagaggttccagaacggggtgaccagggcggccaagcaccccaacgcgctgctggccttctccagcggacctaggtcgtgcatcggtcagaacttcgccatgatcgaggctaaggccgtggtcgccatcatcctgcagaggttcgcgctcgagctgtcccccacgtacgtgcacgcgcccatggacgtgatcaccctgcggccaaggcacgggctccccatgctcctcagaagcctgtagcctgtaggtgcattgtgcaatgagagtatatgctagactgctagagtcgcatgcatgctgtacatcttttatttttaagatccgaaagctcattgttccagcatttattaataagaggagaattcacggacctgcaaaaccatacaaccatttatttattacaacatacaacattctcgtatcccga

SEQ ID NO: 142158 - DNA, 2136 bp, Zea Mays
atggagcaaagcaggccgaccctacagggcaggagaggggcaatgggccatcacagggtgccgccgccggatgcgtactattgctccgcggtgaagaggaggctcagacggtgccttcctcttggctccccagcgactgctcctcgccgcggatgcagcagctacggcccgcgcgaggccgtcgcgctcctcctccggctgcagtccgcccccgccctcacggaggtacggagactccacgctgcgctgctggtgcgaggctaccatagaagcaccgtcctcgccgcgcagctggtacgcgcgtacgccaggatgcgggatggtgggctcgggcacgcggtgcgtgtgttcgatggaatgcctacgaggaactccttcgcgtggaacgctgtgatcaagggccttgtcgacgctggcaggttctcggaggcgctgcggtggtactgggacatggtccgtgacggctcggtcgttgctgatcgtttcacgtacccgcctgttctgaaagcgtgtgcggcgcttggcgaggttgagcaggggagaaaggttcaagagaacgtggagacggacattgcccggggcattgcaaagggcaacgtgtttgtgcagtgcgcgcttgtggacatgtttgccaagtgtgggtgcttaggtgaggcgaggaatatgtttgagagcatgggagtgagggacttggcttcgtggactgcgatgattggaggagccgtccgcggaggagactggcttgaggtgatgacgttgcttaagcgcatgaagtcagaagggtttcggcctgattcaatgatttttgctactgttattccagcatgtggtaaggtgaaagagctgaggactggaatggcattgcatggatatgcagtaaaatgcggagtaggtgatgatatctgtgttcctaatgctttggttgatatgtattgcaaatgtgctaggctggatatggctgcttctctgttttggtctatcgatcacaaggatgtgttctcttggagtaccataattgcagggcattcacagaatagaatatataatgtgagtgtcagtttgtttactgaaatggttgcttcaggcataaaaccaaattctactaccatagcaagcatacttcctagcatttcagagctgaggttactgaggtatggaaaagaaattcattgcttctccttaagaaatagattggagcacagtgagtttctagctagtgcactcatcgacttctactgtagacaaggatacattagggacgcacaaattgtttttgaattcaagccgaagaatgatttggtcgttttgaattcaatgatcagaggatatgtcgtgaataaggattcagagtctgcattacgtctattaagggcactgctgaaagagggactcagacctgatcatgtgactgttgtttcagttcttcctctatgcaatcaaccctcgaggctcctccagggtaaggagctacatgcttatgccatcagacataacataagttcgtgtttctcagttactaacgcacttacagatatgtactgcaagtgtggttgcctagaaatagccaacaagatttttctgctgatgacagagcgaaatactgttacatataacactctgatttcttctctgggaaagcatggccatgcagatcaagcattcattctttttgacctaatgaagagggatggagtttctccagataaagtgacttttgtagctctgttatcatgttgtagccatggaggccttattgacaagggcttatgcttctatgattccatgttgcgggactataatattcctcctgacaaggagcactattcatgtattgttgacctctacagtagatctgggaagcttgatgatgcttggagttttattgctaatttacaagaagtgccagaaatagatgttcttgggtgcctattgtcagcatgcagagatcaccatagaatggacattgctgagcttgttgcagaaagaatatttgagcaaaaccccaatgatcctggttatcacattctgttatctaacgtctatgccagtgctggaatgtggtctgaggtgactaggataagaactatgatagaagagaggagcttgaagaagagaacaggaaatagcttgatttaa

SEQ ID NO: 142159 - DNA, 952 bp, Zea Mays
ggggcgtcagatggggatgcatgcacacagctcagcgcacccgatgccctctgcccacgcatcttggcatgttggcaccccggacccccgcccgctccccgcctttataagcgccagcagccacggcaggtggagctcatcgcatccatccaccacgcaccccaccaacccatacccataccagaggctctctgattttacttctccgcggtagatcggctgagcgagcgagcgaggcacacggagctagctaaacagagcacacgggtagaaaagcaagatgtcggacggcacggcgacctgcatcgacatcatcctcgccatcatcctgccgccgctcggggtcttcttcaagttcggctgcggggtgcgtgattttttaatatctactactagttcggcggcagctttctgccttctttgctgcagtgcagtgccgatcgatagatgactgttattgcttgcttgcttgctgcaggttgagttctggatctgccttatcctcaccttcctcggctacctccccggcatcatctacgccgtctgggccatcaccaagtagccggccggagcagatgaaccacggtcccctgccagtgccaggcagctagctgtgactccgtcgcgtgcgttagcatgcaatgcaagcgcagggtggtctcgtggggggacgtggtgtgcgcgtgtcttgagatgtgattccttccttctttgtttagttgctgctgctcctgctggtgtagtactggtgtatccagtccttttaatttcttgattagtttgctcggctgaagaaatcaggacgcgtgcctggtgtcgctcctcagctccatgtacttgtacaaccgttcctccctgcagctgctgccccttctctcttttttgtttaccttgggttgatgggttgttaaattcgttgtttgtctcttttttaaccttcgcgattgtagta

SEQ ID NO: 142160 - DNA, 1019 bp, Zea Mays
ggggcgtcagatggggatgcatgcacacagctcagcgcacccgatgccctctgcccacgcatcttggcatgttggcaccccggacccccgcccgctccccgcctttataagcgccagcagccacggcaggtggagctcatcgcatccatccaccacgcaccccaccaacccatacccataccagaggctctctgattttacttctccgcggtagatcggctgagcgagcgagcgaggcacacggagctagctaaacagagcacacgggtagaaaagcaagatgtcggacggcacggcgacctgcatcgacatcatcctcgccatcatcctgccgccgctcggggtcttcttcaagttcggctgcggggttgagttctggatctgccttatcctcaccttcctcggctacctccccggcatcatctacgccgtctgggccatcaccaagtagccggccggagcagatgaaccacggtcccctgccagtgccaggcagctagctgtgactccgtcgcgtgcgttagcatgcaatgcaagcgcagggtggtctcgtggggggacgtggtgtgcgcgtgtcttgagatgtgattccttccttctttgtttagttgctgctgctcctgctggtgtagtactggtgtatccagtccttttaatttcttgattagtttgctcggctgaagaaatcaggacgcgtgcctggtgtcgctcctcagctccatgtacttgtacaaccgttcctccctgcagctgctgccccttctctcttttttgtttaccttgggttgatgggttgttaaattcgttgtttgtctcttttttaaccttcgcgattgtagtactgggttggttgcttgcttggttggtttcggttgggagatcgatgggaataagtctatgatatatatcagtacaacaaaagagagaaagaaattgccgccgtcataactagcttaccgtgcgtgaattcactactcgggcactgccagtggcttccgccatcttgggggaattactgc

SEQ ID NO: 142161 - DNA, 1725 bp, Zea Mays
ggcgcttccttccttgctcttctttttcttcttcttttcgctgcccgtctcgtcagctgcatcatcagccttctccacctccttcgcttcagcggcatcagctgattctgattctaccttttctttcttcttcttcttcttctcgctcttgtccccttccccttccactacctcggcatcttcctcgaccttgatcttcttcgccggaacggaagcatcatcgccattgttctcatcctgctgcctcttcttcttcttctccttgaccttttcaccggcaactgcatcctgttccaccttcaccttctctggctcaggagcagctgcgatgctagcgatcgatacatcgccgccagtgggaagcaccacattgcggagccactcagctggggtcttctcgtttggcttcccatgcttatcaaggaggccctcggcgaccatcttcttcttcttgagtgccactggaccaagcccccacttcctcgggtacgtatccctgtccatcacgaccctcttgatctttgcgaccgcgccatggtcgcaggttgccataacagcagtggtcatctcagcaataccaatggcaatcgcctcccccttcgttgtcatcaggacaacctcctccccggtctcgatatcattctcaaaccggagcaagccagggatcataagcttagcgccatagcagatagcattcacggcagaatccttcacgacaagcctcttgtagcttgtaagcagcacctccagcggcatgacgacgcgcctcaagtaggactcgtccttgtggttgtcgagcgaccacatggcgtccatcacgtcgtgcatggtcaccatattgtcctgctccccgaggatccccgaccggacacggcgcagctcctgcatatgcgcgccgacgccaaggagcagcccaaggtgcacacacagagtccggacataagtgcctgcctcgcaggagatccagaacaccgcgaggtggcgctcagggtcgtgctccaggagcttgctctcgtagatggtccgcaccctgagctggcgcttcaccgcggagatgagcggcgggcgctggaacacggcgcccgtcagcgcctctagcgcgcgggccacgcgcgcggtgtccggcacggcggcgtggaagcgggcgacgcacacgtactccttgccggcgccttgctgcgacttgacgaggcgcgtggctcggtcgacgcagacgatgaggttgccggtgaccttggggtcgagcgtgccgctgtggcctgtcttctcggcgcggaggatacgcttgatccaggcgaccacctcgtgggaggacgggttcgacggcttgtcgaggttgatgacgccgtagcggagatgctcggcgagggggcgcttcagcggcgagtggccggaggggagcggggtgtagtgtccagtccggacgttgaggcggtcgtagttcttgaggaggagcggccaggtcgaggtgtccagggacggcaccagggactggggcttgattaggtagccatcagtcttctcctcagcctcggcgagcgatggcgggtcagtggcggggagatccttggacttgtgcttcttcttcttggattttgtttgctcggaggcgggggacgcgacggccggcggcgtggacgacatggcggcaccgcggcaggattgggggttggggtggggaaggcgggtagcttcttgtttagggtttagggcaaaagggtttag

SEQ ID NO: 142162 - DNA, 1601 bp, Zea Mays
tctggtgagagttttgcgacgaccccgatttggaaaaatcagagctaatccaaagttccaaacacgggtcccatccaaacactcgtcgatcattctgaactccctcaaatcccgcaaccagacccctattcccgtccaaatcccatcaccaatccaatgcctcccaccggcgacgacccgccggcttccgccggcatctccttccccgacgcggacggcggcggcgattctgaagacggcgacttcgccggcgcccacctcctcgaccccaccgatccgggcctccccaaccccaccacctcctccgccaccggcctgccccacgcgatccctgcggccgggagcggcggcggcccggtcacctctggcaacggcggggagcggcggcccctgttccagcgcctctggaccgaggaggacgagatcgtgatcctccgcggcttcgcggagttcaccgccgcgcgcggcacggcgttcgcgtcgcaccagtacgacaccgaccccttctacgaggacatgcgccgccgcctccagctcgacttcaccaagagccagctcgtcgagaagctccgccgcctcaagcgcaagtaccgcaactgcgtctctcgcctccgcgaatccggcgccaccttcaccttccgctccccgcacgagcaggccatctttgagattgcgcgcaacatctggcgccccacaaacaaacacggccgggatccctcggctgactctgacgacgaagacgccgccgccgcgacacagatacctgccaacaccagccccaacggagaagccaagtccccgtcctctacacggcagcgtcgtcgcaggcgagtgatggaattcagccctgccactggcgccgcccctgccacaaacatgctgcagccccctcagccagtgcaattgtctgtatcggtgcctgtcaagatggatgactctctcccagcacagccccagactccaatgccagtgatggtggccatggatggctcagagcctctcaggttgccagtggtgtcgcctcaatcaggagtttctgatgctgagaagacttgcctgactcctctgtttaaggagatgctacgggcagcgataaatgtcggagcaaacccatttggtgcaaagcttcctgagccgccgcttgggttggccatggaaggggagaagtggcggaaacagcggattttggagctggaggtgtacttgaagaggatcgagctgctgcaggatcaggcgaaggcaacgcttgaggagctcaagtcatcaacccctgggtcttaattcatgataagatgagatcgctttggttttaggattcttgctctgattcttagtgtagatgtttaggcatttttgcatatgttacgtccataaaagaatattgttgacctgattggggcttggaactagtttatttgttgttctgtatgttcatgtgatattagcttcaatttatgatcttttttctttataacataggttcatgttcctttgtttactgtggtagcggtatgcttccagtgaacagaaaggtaccctgtagaaagatgaattgttgcaattaatttactaagattacatatatattgttatttctgtgt

SEQ ID NO: 142163 - DNA, 1226 bp, Zea Mays
cccccgcgctgtcctccgctcgggcgacacaggagtccccccatccctagccgccactctctcctcctctatcccccctcgtcgtcgccggaggagactgtcgaaggccggcgcgacctccaatgatggcggcggtggggcgtttctccggcatttctcctctgtttggtctcccggtgctcagatctgagcaggttctgtgccgggcggttcaagttccagccgcaggggttgctggggcgggcgtcgtcccccgcaccgtcgtcttccttgtccccggcgtcatcggggggctgtgctcgacggttcaacatctggtcctgcaggtgcagccaggtgatggattggcgacatctgttggtggtggcgggtctgcgccgtttcggctgcggacgcacgtcgtggtgggtctggagctgggcggcgggcgtgctcctcgtggtgttgggttttgtggcatgtgggctggatatgccctcaacagttggcgctggcggccggtggcggttgtgtcgatggcggtttggggctcgtgtagacgccgtggcgcgacactctcttctttgccacccctccccttacgacattgtctactgctgtgggcggggcgtcagccgtgcgacggtgatgagcggaggatctggcttctcagtggtggtgtgtggcgtcgtcatgtgggcagcagtggccccgacggtggtgcgcgtgccagcggatctggcgcgttgcagcggctgctgccagggttggccgacgagaggtgcggtggtgcgacgcgtggtgctgccgctgctcggccgagaccgtgggcccaccaggaggtggtgccgatccgcgctgctttgcgactgttgtggcaatggcacgtcattggccctctggatgggtctgtgtgggttggttgggcggtgacagttgtggaggtgtgctttgtcctggggtcctggccggacgctgtgctggggagggtttcttgggcgaaagccttagcgaagatgacgcccctgggcgccgcttcccctattgagggtgtcgtgttccctagctttgtcttacgtgggcgaaagcccggtccacctcggaccggcgacgatggcgtcctcgacgtcactcccttcccgaaggcgtcactactgaagttcgtctcgaccacgtcgtcgccttcggtggttgcttttgtctttcgggccccggtttgcgtgtggaggtggaggcttgcatcgtga

SEQ ID NO: 142164 - DNA, 2524 bp, Zea Mays
gactcgacaccgcagcatcaaccatcagagcaactccctgctcaggcctcaaaaagactcgcctggatcaaagcgcgcggcaaaggtagctcgaccgtgcgccagagcagcagagctagtccgctcggcgccgtggccggacctcgccagcgcggcaaaggtagctcgaccgcgcgccggagctagtacgctcggcgccgtggccggacctcgccctcgcggcagcggtgcgcgcagctgcctgcgcggcggcagcggcggagctctcccacgcagccacgtttggtgtgcttcttcctcccctacgcccgcctcctctttttcatcgagcgtgcgttggggcgaccccgtccgtgaaaaatggcgggcctcagcggcggcggcggaggctggggcggctacgacgacgacgactggggcctcagcgcggagcagctggaccagatggagcgggacgccatccgccagctcgctgagcgcaaggcctccgcctccgcggcctccaccgcccccatccccgcctcccctctcggagccacctcgccgctcccctcccgcgctaccgtgccggcggcggccgtctcgtcgccgctcgggggcaaccaccccgctaccagggcctctctggaggcccgcttcggcaaggtagaagcactatctccctcgagaaatgcagtgaataatagccagggcagctcgcctaagatatctgttcatcttttcctccattctagcggtatgatcgctgcaagattcccatacagccagttacttgtcgatgcatttcggaagataccaaaagccagttggaatgctaaagaaagggtatggatgtttcccccctcgtctttagcaatagtagaggaggttcctcgctcagtacctggattaactgtggaggttcacaaattggatccgctagttcagcgtgctttagctgctgctttacgatccaaagatcttcgaggtttgtatgacaggattccccctcatctcgagtcaaagcttatgccatttcagcgtgaaggcatcaggtttgttttacagcatggtggcagagccctgattgcagatgaaatgggtcttggaaagacactacaggcaattgctgttgcttcttgccttcgtgatgcctggccagtccttgtaatctctccatcttctttgcgattacattgggcatctgcgattcagagttggcttaacatccctgtggaagatatcttggtggtattgccacatactggaggatcacataaagcaggattcagagtggcttactcaaactcgaaaggagattttcacttggatggggtgttcaatgtgatatcttatgatgtagttcccaagatacaaagcacacttctggatttggatttcaagattgttatagctgatgaatcacattttatgaagaatggccaagcaaagagaacagttgcttcacttcctgttttgcagaaagctcaatatgttgttttgcttagtggaactcctgctttgtctcgcccgattgagctctttactcagatccaggccttgtatcctacagtgtacaagagtgttagtgagtatggcaatatatattgcaagggtggttttttcgggttgtatcaaggtgctagcaatcatgaggagctgcataatttgatgaaagcaactgtcatgattcgtaggttgaagaaagatgtcctttcacagttgcctgttaaacgtagacaacaggtctttctagatttaagtgagaaagatgtgaaaaatgtccgcgctctgtttattgagttggagactttgaaggtcaaaattgagtcctctgactccaaagagatgatcgactctctcagatttgcttaccagaatattgtcaataagatctatactgattcagctgtagccaaaattccagctgtgttggatttcctgggtactatgattgaggaaggttgcaagttcttaatatttgctcatcaccaacccatgattgatgccattgagaaacatctcttgaagaagaaagtaaagtgtatcaaaattgacggcaagacacctttaactacaagacaaaccttagtcacagatttccaaaacaatgatgacgtcaaggcagcagtgttatccatcaaagccggaggctacgggataactttgacagcagcgagcacggtaatctttgccgagttatcatggactcctggggacatcattcaagctgaagatcgcgcgcacaggatcggtcaggtctcgtccgtgaacgtgtattatcttctctcgaacggtactatagatgatcttatgtgggacgttgttcagggcaaacttgagaacctggggcagatgctggacgggcaggagaagacgctggaggtttcccagagggactgcaggccaagcccctcgaagaagcagaagacactggtcggcttcctcaagcggcccagcgcgtccacgtccgcggaggagggtatgcccagcacttaatgaagcagcctcggatctgaggcgcggtcgtggcttgtgagcgaac

SEQ ID NO: 142165 - DNA, 2706 bp, Zea Mays
gactcgacaccgcagcatcaaccatcagagcaactccctgctcaggcctcaaaaagactcgcctggatcaaagcgcgcggcaaaggtagctcgaccgtgcgccagagcagcagagctagtccgctcggcgccgtggccggacctcgccagcgcggcaaaggtagctcgaccgcgcgccggagctagtacgctcggcgccgtggccggacctcgccctcgcggcagcggtgcgcgcagctgcctgcgcggcggcagcggcggagctctcccacgcagccacgtttggtgtgcttcttcctcccctacgcccgcctcctctttttcatcgagcgtgcgttggggcgaccccgtccgtgaaaaatggcgggcctcagcggcggcggcggaggctggggcggctacgacgacgacgactggggcctcagcgcggagcagctggaccagatggagcgggacgccatccgccagctcgctgagcgcaaggcctccgcctccgcggcctccaccgcccccatccccgcctcccctctcggagccacctcgccgctcccctcccgcgctaccgtgccggcggcggccgtctcgtcgccgctcgggggcaaccaccccgctaccagggcctctctggaggcccgcttcggcaaggtagaagcactatctccctcgagaaatgcagtgaataatagccagggcagctcgcctaagatatctgttcatcttttcctccattctagcggtatgatcgctgcaagattcccatacagccagttacttgtcgatgcatttcggaagataccaaaagccagttggaatgctaaagaaagggtatggatgtttcccccctcgtctttagcaatagtagaggaggttcctcgctcagtacctggattaactgtggaggttcacaaattggatccgctagttcagcgtgctttagctgctgctttacgatccaaagatcttcgaggtttgtatgacaggattccccctcatctcgagtcaaagcttatgccatttcagcgtgaaggcatcaggtttgttttacagcatggtggcagagccctgattgcagatgaaatgggtcttggaaagacactacaggcaattgctgttgcttcttgccttcgtgatgcctggccagtccttgcgattcagagttggcttaacatccctgtggaagatatcttggtggtattgccacatactggaggatcacataaagcaggattcagagtggcttactcaaactcgaaaggagattttcacttggatggggtgttcaatgtgatatcttatgatgtagttcccaagatacaaagcacacttctggatttggatttcaagattgttatagctgatgaatcacattttatgaagaatggccaagcaaagagaacagttgcttcacttcctgttttgcagaaagctcaatatgttgttttgcttagtggaactcctgctttgtctcgcccgattgagctctttactcagatccaggccttgtatcctacagtgtacaagagtgttagtgagtatggcaatatatattgcaagggtggttttttcgggttgtatcaaggtgctagcaatcatgaggagctgcataatttgatgaaagcaactgtcatgattcgtaggttgaagaaagatgtcctttcacagttgcctgttaaacgtagacaacaggtctttctagatttaagtgagaaagatgtgaaaaatgtccgcgctctgtttattgagttggagactttgaaggtcaaaattgagtcctctgactccaaagagatgatcgactctctcagatttgcttaccagaatattgtcaataagatctatactgattcagctgtagccaaaattccagctgtgttggatttcctgggtactatgattgaggaaggttgcaagttcttaatatttgctcatcaccaacccatgattgatgccattgagaaacatctcttgaagaagaaagtaaagtgtatcaaaattgacggcaagacacctttaactacaagacaaaccttagtcacagatttccaaaacaatgatgacgtcaaggcagcagtgttatccatcaaagccggaggctacgggataactttgacagcagcgagcacggtaatctttgccgagttatcatggactcctggggacatcattcaagctgaagatcgcgcgcacaggatcggtcaggtctcgtccgtgaacgtgtattatcttctctcgaacggtactatagatgatcttatgtgggacgttgttcagggcaaacttgagaacctggggcagatgctggacgggcaggagaagacgctggaggtttcccagagggactgcaggccaagcccctcgaagaagcagaagacactggtcggcttcctcaagcggcccagcgcgtccacgtccgcggaggagggtatgcccagcacttaatgaagcagcctcggatctgaggcgcggtcgtggcttgtgagcgaaccagatcaggtcataggcagccagcagccacaatggtgttcggctctatcacgttgtaacacttctccctccgtatttgctcgctctttcgtttcctgagagatgacagatgtatgcgtttggctgacgaagggaagaaaaatgagcaaaacttgaagtatttgttagggaaggatcctaaacactgaattatatgataaatttaacataattgcgtttgct

SEQ ID NO: 142166 - DNA, 1306 bp, Zea Mays
gaacagcctactccagcctccagcgcctgctacgccgtcgcccacctccctcctctcctccagcgtcgcccgctcccgatcgtccaccgccacgcacctccctcctctgtcctctcctccaccccctcctccatctctagggcccgcctccctcttccagcgcccgagcaccccctcccctctcccacgtccagagtcggtctgacgttggcccatcgcccgataggtcctctagcagccaacgttgcctgcagctgcattccagagttccagagtttcagctacaaccacgaagttccaacgtctcctgcagctgctctatttgatcctgggcgtgcctgccaatgagcaagaagaggaagcatctggatccagcgaactcgttgaaagacagcgaacaagtagtcgcctcagatttcataagaggagacgatcttgatgacctattatcgaagcttatcaggagtgtggagattgccaaggcttcaaggggacgcttaccagaaaagatatggatgaagcaacaatttgctatcggcgtcaatgatgtcacaagggttcttgagcgaatgccgcattctgtcactgctcatcctgctcaaatgtctagtgaagcaccaactgtctcaggccaacgtcaagctcctttggtaccattgcaggctgtccttgtagctgccgactgcaatcccaaatggttaacaaaacacataccaacactagcgtttacaaggcaggtaccggtattgtgcatgaaggacaacaagggaggctcagtaaggttaggccatgtggtgaatgtcagaacagcgcttgccattggtgtaaaggccaaagatagcgttgtcaacaagactattgatgagttcctgaaagacagtaaactggttgccaatgaaccataaagtaacccaagtctagtgacacgtttgtactaaaaagcctgtacttctgggcatgcaacatcccaggatcatctcataaatgggtttaagtttgagaaggggatcaagtatcttgagcagattgtggcaatatcaatttggtgggacttcttcagagaacggtcatgggaaataggacagactatttgtttggtccgtgcaatattgtttgactggtgaactagttatccattgtgatctagaacttgtatcaaactccaatgtaacgagatgttagaatccttgtttattgggtacagttttttctttttctcgaggctcgacaccggtacattaatttttcttgttttctatattctatagtatatataataatgcgaaaaggcttacattgtgatgtt

SEQ ID NO: 142167 - DNA, 1312 bp, Zea Mays
tacgccgtcgcccacctccctcctctcctccagcgtcgcccgctcccgatcgtccaccgccacgcacctccctcctctgtcctctcctccaccccctcctccatctctagggcccgcctccctcttccagcgcccgagcaccccctcccctctcccacgtccagagtcggtctgacgttggcccatcgcccgataggtcctctagcagccaacgttgcctgcagctgcattccagagttccagagtttcagctacaaccacgaagttccaacgtctcctgcagctgctctatttgtcctttgtattttgaatttgaatacctattttcaagatcctgggcgtgcctgccaatgagcaagaagaggaagcatctggatccagcgaactcgttgaaagacagcgaacaagtagtcgcctcagatttcataagaggagacgatcttgatgacctattatcgaagcttatcaggagtgtggagattgccaaggcttcaaggggacgcttaccagaaaagatatggatgaagcaacaatttgctatcggcgtcaatgatgtcacaagggttcttgagcgaatgccgcattctgtcactgctcatcctgctcaaatgtctagtgaagcaccaactgtctcaggccaacgtcaagctcctttggtaccattgcaggctgtccttgtagctgccgactgcaatcccaaatggttaacaaaacacataccaacactagcgtttacaaggcaggtaccggtattgtgcatgaaggacaacaagggaggctcagtaaggttaggccatgtggtgaatgtcagaacagcgcttgccattggtgtaaaggccaaagatagcgttgtcaacaagactattgatgagttcctgaaagacagtaaactggttgccaatgaaccataaagtaacccaagtctagtgacacgtttgtactaaaaagcctgtacttctgggcatgcaacatcccaggatcatctcataaatgggtttaagtttgagaaggggatcaagtatcttgagcagattgtggcaatatcaatttggtgggacttcttcagagaacggtcatgggaaataggacagactatttgtttggtccgtgcaatattgtttgactggtgaactagttatccattgtgatctagaacttgtatcaaactccaatgtaacgagatgttagaatccttgtttattgggtacagttttttctttttctcgaggctcgacaccggtacattaatttttcttgttttctatattctatagtatatataataatgcgaaaaggcttacattgtgatgtt

SEQ ID NO: 142168 - DNA, 786 bp, Zea Mays
gcagtcctgtggtcgcacggtccttcactcctgcgtcctgtgcctcggtgcctcccagacccaggcggccaggatcccagcctcccaggtccccggtggcggcagcagcctcccagtcccagatggccaccagttctaaaccctagccgccaaaccaacacgagcagctgtcgccctccaggccggccgagcggggcgccgggcaccgtcgcgccgagctgagcggagagtggagcacctgcaccgagcggccagcggtgcgccgacgcgccgtgcgccgagcacctgagtggccagcggggcgcccagcactcgtctagtcgtcttctctgattgtgatgtcaactcccaacgaaaattattatttgatgttgttggaatgttaaattgtgataaatttctgttagaatgctgctgaaatgttgttgtaattttagtgggcgggcggataacagatatctgttggataacggatatccggcgggtacaggtacggatatagatccgtatccacaagcgtaaatgggtatgggtatgtgtatgtgtatggattgggtttacctcgcgggtatggatacgcgaaacatatatccgcgttctacccgcccgattgccatccctaacaatacaggagaagagaatgggcttgcgctaggctgattaagccttgtgaaaactctgtgacataagctaggcagcgacaggggcggatttgggccgcaacgccatggaccggggcgtggtccatatacagagatatagtttggggttatggttcagaaatct

SEQ ID NO: 142169 - DNA, 1315 bp, Zea Mays
gcagtcctgtggtcgcacggtccttcactcctgcgtcctgtgcctcggtgcctcccagacccaggcggccaggatcccagcctcccaggtccccggtggcggcagcagcctcccagtcccagatggccaccagttctaaaccctagccgccaaaccaacacgagcagctgtcgccctccaggccggccgagcggggcgccgggcaccgtcgcgccgagctgagcggagagtggagcacctgcaccgagcggccagcggtgcgccgacgcgccgtgcgccgagcacctgagtggccagcggggcgcccagcactcgtctagtcgtcttctctgatcctgggcgtgcctgccaatgagcaagaagaggaagcatctggatccagcgaactcgttgaaagacagcgaacaagtagtcgcctcagatttcataagaggagacgatcttgatgacctattatcgaagcttatcaggagtgtggagattgccaaggcttcaaggggaggcttaccagaaaagatatggatgaagcaacaatttgctatcggcgtcaatgatgtcacaagggttcttgagcgaatgccgcattctgtcactgctcatcctgctcaaatgtctaatgaagcaccaactgtctcaggccgacgtcaagctcctttggtgccattgcaggctgtccttgtagctgccgactgcaatcccaaatggttaacaaaacacataccaacactagcgtctacaaggcaggtaccggtattgtgcgtgaaggacaacaagggaggctcagtaaggttaggccatgtggtgaatgtcagaacagcccttgccattggagtaaaggccaaagatagcgttctcaacaagaccattgatgagttcctgaaagacagtaaactggttgccaatgaaccataaagtaaccccaagtctagtgacacgtttgtactaaaaagcctgtacttccgggcatgcaacatcccaggatcatctcataaatgggtttaagtttgagaagggggtcaagtatcttgagcagattgtggcaatatcaatttggagggacttcttgagagaacagtcatgggaaataggacagactatttgtttggtccgtgcaatattgtttgactggtgaacctagttatccattgtgatctagaacttgtatcaaactccaatgtaacgagatgttaggatccttgtttattgggtacagttttttcttcttctcgaggctcgacaccggtacattaatttttcttgttttttatattctatagtatatataataatgtgaaaaggcttatattgtgatggt

SEQ ID NO: 142170 - DNA, 1242 bp, Zea Mays
acccagagctctctcggtctcggtctcggtctctcactctcttgtgtcttgtcctcgcagttctaaaccctagccgccaaaccaacacgagcagctgtcgccctccaggccggccgagcggggcgccgggcaccgtcgcgccgagctgagcggagagtggagcacctgcaccgagcggccagcggtgcgccgacgcgccgtgcgccgagcacctgagtggccagcggggcgcccagcactcgtctagtcgtcttctctgatcctgggcgtgcctgccaatgagcaagaagaggaagcatctggatccagcgaactcgttgaaagacagcgaacaagtagtcgcctcagatttcataagaggagacgatcttgatgacctattatcgaagcttatcaggagtgtggagattgccaaggcttcaaggggaggcttaccagaaaagatatggatgaagcaacaatttgctatcggcgtcaatgatgtcacaagggttcttgagcgaatgccgcattctgtcactgctcatcctgctcaaatgtctaatgaagcaccaactgtctcaggccgacgtcaagctcctttggtgccattgcaggctgtccttgtagctgccgactgcaatcccaaatggttaacaaaacacataccaacactagcgtctacaaggcaggtaccggtattgtgcgtgaaggacaacaagggaggctcagtaaggttaggccatgtggtgaatgtcagaacagcccttgccattggagtaaaggccaaagatagcgttctcaacaagaccattgatgagttcctgaaagacagtaaactggttgccaatgaaccataaagtaaccccaagtctagtgacacgtttgtactaaaaagcctgtacttccgggcatgcaacatcccaggatcatctcataaatgggtttaagtttgagaagggggtcaagtatcttgagcagattgtggcaatatcaatttggagggacttcttgagagaacagtcatgggaaataggacagactatttgtttggtccgtgcaatattgtttgactggtgaacctagttatccattgtgatctagaacttgtatcaaactccaatgtaacgagatgttaggatccttgtttattgggtacagttttttcttcttctcgaggctcgacaccggtacattaatttttcttgttttttatattctatagtatatataataatgtgaaaaggcttatattgtgatggt

SEQ ID NO: 142171 - DNA, 1065 bp, Zea Mays
aagctttttaaaccaggaaaacaaataccttgcttggactcgctgccgtcgccgtcgccaactataaaccaccccaacccaaccctaccgtttcgccggcgaaaccggggctggcggcgtcggggaccatgggggagtacgcggcggtgaagacctcggtgtggtgggacatcgagaactgccatgtcccccgctcgtgcgaggcccacctcatcgcccagaacatgagctcggccctcgccgccgccggctacaccggccccatcaccatctccgcctacggagacaccaactgcgttcccaaccacgtccagcacgctctctcgagcaccggcatcgcgctcaaccacgtccccgcaggtatcaaagatgcaagcgataagaagatcttagttgacatgttaatctgggctattgacaaccctccaccggcaaattatttgctaatatctggtgatcgggacttctcgaatgcccttcataagctagtgatgagacggtacaatattctactagcacaacctccaaatgtgtctcaagtgcttactgctgcagcaaaacatgtttggctatggaaagaccttgtggctggggaaccaccattggcagagtccccatacataagtagtatagcaaatggcagtgtggatcattcgaatacatcgaacaacatgggttcagattcttcagacgcaccccataacagtactcaagggcagaatagcattccgggtgatcagcaaaaaggtggtaacagcaaggcagataaacaatataaagttaagcaacctcggaaaaaccagtcagacaatgtatctaagccaacaaggaccgatgaagcttcagttgatggagtatctgatagttctaaaggaagcactgctaccgagccaaatcaatcccagtcttcatcatcctcattaccaagttctgatttgcatgatgggggtggagcactggtggatgagctgaatacccaaaaaaaccagctatctttccagtccaaaagccgaaaaattactcttttcccatcaaaagagtggcttcctcactactttttaccat

SEQ ID NO: 142172 - DNA, 1232 bp, Zea Mays
tcaaactcacatagaagcaactcatgtccagcaccagctgggcataatggtattcctactgcaccgtgcaatttctggccaagcgggccaccttatcatggaccaccaatcaattatcctgatatgagtcggttgaatatttctgaatatcctaggggtattcataataaccaaggtttgcatgccaactaccatccaaaccatcctggttacaatgattatagctacagacctccaactcaacctaacatgcctagcaacatgcaaaatattggacactggggagccaacccgggatgttcacagccatcttcggaccctcaaggtcttgtaagatatatcttaggtgctttggaagttttgaagactgagaagattcctccaacagagcaatatatagcagattgtatatggtatggacatggtgatgctaatatgccaaattttgatgttaagaaggcacttcaagttgccatgcagcatcaagctgttgtcaagaaaaagttagggaaaatgtcattctttctgggaaaagatgaaaatctctggaaatgtgttaatataatggatgataacgcaaaatacccaaaagaaactctagatgctgttcatgctttcatgtcttctgctccaggctattctgagataaagagttctcaatctaggtatcaagctgctactatgttgaagaaaacatgcctgaagcatctttcccttgctgaagtccttcaggttctgaatatcataattaacacaaaaaagtggtttgtgcctcattcttcaggttggcagccgttgtcgtttaacataatagtggctgatgctactactgccactggtggaaaggcttagcatcggtacattatctgcttgtaccaattgaacatgttgaggttctggtcgttggtgcaagctgcgtccgcaaaagctaagttctgttgaggtttcctagcacaatgctctgcattttgccaagtttggggttaagttgttttacacacagtatatgttagctggagtgaaacagtaagtagccttagactgctaaattttagtgggagtcaatctgtcaactattgggcatgttgaaagaactctgggcagccctggctgtggctactcctatgggtgataattgtggtggtaagatgcttatgcaatcaagcataaagcggttcagagggactatcgtcttttgttcaggcagtataccgatgcttgatgctggtggt

SEQ ID NO: 142173 - DNA, 92 bp, Zea Mays
gtagtattagactattggtatagctgcatagctgttgctattaagctactcgttgaagccttgatctacccacattatattcccagttccta

SEQ ID NO: 142174 - DNA, 169 bp, Zea Mays
atgctggcaaactattatgctgcttcttgtaaatcttactggttgctgattctaccaagtgctccggttgacatgttgcctgagagtaaatggttgatgactctattaaatgcttcgatatgctgttgtctgtttctgttgtcttttgaaatgatcgtttggaggaaaa

SEQ ID NO: 142175 - DNA, 1403 bp, Zea Mays
agcaacgtctcgccctcccagctcctcccaccaaacaaactgaaccactgtccgctgcgtgctttccttcctctcaacgccagccttgccgagagcccgagaccaatcgccgccatctcccggaatgacggggtgacgaaaccgcgccgcaccagacaagacagaggagccgccgccgcgacccacaggccaccgggtcgccgaggaggggatccagcgagccatgtcgaccgacgtgcccatgagccccgagctcgagcaggtggacggcgagatccaggacatcttccgcgcgctccagaatgggttccagaagatggacaagatcaaggactccagcaggcagtccaagcagctggaggatctcacggccaagatgagagagtgcaagcgcttgatcaaagagtttgaccgtatactcaaggatgaggagaaaaagaacacccctgatgtcaacaagcagctcaatgacaagaagcagttcatgatcaaagaactcaactcctatgtgaccttaaggaaaacgtaccagagcagccttggtaataagaggatcgaactattcgatacgggtaatgaccaggtggctgagggaactccagttcaaatggcatcagaaatgtcaaatcaagaactcattagcaccggaaggaaacaaatggaccaaactgatcaagctattgagcgctcaaaaatggttgtagcacaaactgttgaagttggagctcagactgctgcaactctgacacagcaaacggaacaaatgaagaggataggcaatgagctagattctgtccacttttcactgaagaaggctagtcaaatggtgaaagagattggccgtcaggttgctactgacaaatgcattatggcgttcctgtttctgattgtctgtggtgtcattgcaataattgttgttaagattgtcaacccgcataacaagaacatcagagacattccgggcctagcacctcccgccatgaacaggaagctgctgtccatcgacgctgcaggactctgagcgttgtgaatggctgcctcccgcagcacagcgcaacgcagcgcgtcagagttctcttatgagccacgatacatggcttcgcgattcttttgtgcttgtagtttacgtccgcccattctttccctattgcattggtgagtagtagcctcaggtttgtagcgggactcttgttgtttattgcttgcgagcccatagctttctggttgtttgtgtatatgcggtagtgatgtgaatgtgagagtcgagtggagattcttcatggttcgttcttatgagttgtgactggtttgtgagcttgtggtgaaaggttcgcagcttgcttggcatgcgtctcctctgttcctgccgtgctgctctgcagtcgatacaagaaaagataaaa

SEQ ID NO: 142176 - DNA, 1364 bp, Zea Mays
tttgcttctctcctaacatggtagatagctagagtttcccccagccgccagccaccggctgctgcgccaccgccgtcggccaccacccgaccgtgcacaacacacctgcccgccctcgtgcgaagtagcacggcccctagctagggttggagcctagaccgtcggcgcccccacccatcgccggagtccggccaaccgccggcaccacggaatgaagccagttgtcggcgtccctactcctgatgcctacctgccccgcccgctcgttggcctcctagtagcagcgcgcccagttcacgctcccaccgctgctcgccagtcgccggccgtcgccgccaacgtgcctgcactcaccgccctccagtttcggctgtcgcgccttgcgctctcgatctctggacgtcgagttcatcgtcggcgcaccctcagcttctccacgccccgtcggcgttccctcggcgcctgcgttcactgcgccaccgcatcggtgttctttcacctcagtcgcaccacctcttcgcgttgccgtcttccctggcctacactatcgtctccctcgccttgcgtcatcagcttcctcgccttgcccgtcctcgccacacccgtgccgaccgtcctagcgcctgcccgtgagcgccaccatctctgactgctgccaccagctgtcacctgcagcgccgttgcgcgcttctgcgttgctcgccggtccaacctgctttcctgctccgctcagcacgatccatcacaacccactcaacatggttgctccttgttccacctctcttatgccatttccctccgtacctttgatgggaccaactttcgtgagtggtcagtgacgaaccctcctgtccaagggggcgctgctactgtcttctgcagctactgcaaggcgacgaccgacaacacataccatcgagaagtgcagacaatgtcctcctcgtcgccaacctctaatatgtgttttgacgtttaaacatagttcaaacgtcgtttaaatgtagttttaataacactgccagtcctccactaacgctgccgtagcttttgccgcccccacttcatttagctttgctcagtggcaccatcgtctcggtcacatggcaccatcgtctcggtcacatgtgtgggtctcgtttgtcatcacttgttcctagtggtgttcttgggacggtttctggtgatacctccctggttttaagcttggcaagcaactacagtagccctatcctagtagtcagactgcagactcaaccttttgatcttgttcactctaatgtatggggcattgctcccttcgtttcgaaagagggacatcgctattatgtgatttcattgatgatttttctcgtttcgcataagtt

SEQ ID NO: 142177 - DNA, 769 bp, Zea Mays
accttgtccctgctatctattcctccttcatcaccatcacctccacctccctctcctccaccaccaccccctcctctacctccctctcctctaccatcatcgcctcctctacctccgctaactccacctcctctatcattgaccgtcgtctcttcagctctatgcttattctgatgtgatttggggtaccgatccttcggatttcaaatccatctctgtctattgtgtctttcttgggtcctccttggtttttatggaagaccaagaagcagactgttgttgctcattccagtgttgatgttgagttgtgtactttggccagtatgacggctgaggtaacatggctttggtggttgttggctgactttgagatttctctcactacctccacgtctatgcactgtgatcataccggtgccattattattgctttggatccaatgaagcatcgactcactaaacgcattagcatcgactgtttctatgttcgatatgcagtttaggatcatgtgatttcccttcagtatgtgccttcagagttgcagcttgctgatttgcttgcaaggctcatactagagctcaacatagttttattctctccaaactcagtgttgttgacccgacatgagtttgagacgggtgttagtgtgtatatatagttccgttcttgtattgtattttctctagaatttagggttctctatgtaaacttacccaatgtacatttaccctttgggtcctatggaatagacaaattgtcatttgcttc

SEQ ID NO: 142178 - DNA, 2295 bp, Zea Mays
tccaacagtcccacacgccgttcaattctcccctcacgtggacccaccgccaacctacaaatacgggcaggcacgcctcctcgcttcacacacactacacgctcacagtcacacagtccagaggcgtcagtccaccgcgccaaccccaacaagcaccaccagccactcgaggcaccgaatcgcgatggagcccgcgggcacgatcgtgttcgcctccgtcggcgtcaccaacttcggcttcgacgtgttctctgccaccgtccctgcgccgacgtccgcggaggccggcgtctccgcggaggacctcgacgagcggcgccacacggacggaatctccgtcaacttcaacgcccaattcgcggacgacgccggcgacgcggtcgcgttcgtgtccgagcgcaccggggcagcgagcctgttcctgtcccggccagggtccgaacccgacccgctcccggccgccgagggcagcctgttccacgaccgccccacggtgcgcggcggccgggtgtacttcgtctccgcgcacgagaagccggaccggccgttccggagctgggcggccgtgtacgcggcagagctaggcgcaggccgcgagcggaatccggagccgcagccgcagcggctcaccccgcgcggcgtcgtggacatgagccccgccgtgtccgcctcgggcgacctcctcgccgtcgcgtcgtacggcgaccggccctgggcgttcgacttccgggcgctcgagacggaggtggccgtgttccgcgcgtccgacccgtcccgccgcgccgtcgtcgccgcgcggggcgggtggcccgcctggcacggcgacgccgcgcttttcttccaccgcgccgcggacgacggctggtggagcgtcttccgcgtgggcgtgtccccggacacgctccagcccacggggcccgagcgccgcgtcaccccgccggggctgcactgcttcacccccgccgcgcccgcccgcggcggcggccgctggatcgccgtcgccacgcggcggaagggccgggcgcagcgccacgtggagctgttcgacctcgagacccagcgcttctccccgctcacggagctcctcagcccgggcctccaccactacaaccctttcttcacgccgtcgggcggccgcgtcggctaccaccggttccgcggcgcgggggctcccggtgactcgctggttccgcacctgcagccggtgcggagccccgtgcggtccatccggatgctccgcgtgcacggcacgttcccgtccttctcgcccgacggggcgcacatcgccgtcaacggcgacttcttctcgacgccgggcgtcagcgtgctccgctccgacggttccaggcggtggacggtgagcaaggagcccgacctgttctacaccacctggagccccacggagcggggggtggtgttcacgtccaagggccccatcttcgagaccccgaaggcgacggtccggatcgcgcgcgtggagttcgacccggccgacctcacggacgacggccgcggggagggtgaggtgcgcgccacggtgaggccgctgacccggccggaggccggcaacgacgcgttcccggcggtgtcgccgtgcgggcggtggctggtgttccggtcgggccggacggggcacaagaacctgtacgtcgtggacacggcgcgcggcgaggaaggcggagtccggcggctgacggagggcgagtggatcgacacgatgccgagctggtccccggacgggagtctgatcgcgttctcgtcgaaccgtcacgacccggcgaacccggccgtgttcagcatctacctggtgcggcccgacggctccgggctgcgccgcgtgtacgtggccggggcggagggcagcgcggaggcggacaaggagcggatcaaccacgtgtgcttcagcccggactcgcagtggctgctgttcacggccaacctgggcagcgtcgtggcggagcccatctcggggcccaaccagttccagccgtacggggacctgtacgtgtgccgcctcgacggatcggacctgcgccgcctcacctgcaacgcctacgagaacggcacgccggtgtgggggccagcaagcgccgggctcgggctggagtcgctgtccatgggcccgccctccggggaggacgccttgggccagttcgacgagccgctgtggcttacctgcgacgtctgatggtcctttttgtgattaataatgtaagaataatgacgctgcattgctgttgaggacgcccttttgtttgtttcgttgctgaataaaaaaaggacgtgctgtacgtt

SEQ ID NO: 142179 - DNA, 1292 bp, Zea Mays
cgtatatatacgtggtccatgtcagttcgttcgtctcagcagtccgatagccaggaagcccgtgcacgtcgaccgacgtacgccaccatgccggggctcaccataggcgacaccgtccccaacctggagctggactccacccacggcaagatccgcatccacgactacgttggcgacggctacgctatcatcttctctcacccaggtacgtctgctgccggtcgtcgctcggccatatgcatgccttgctcgcgtgcacctgctgatgggagataagatgatatggcagccgacttcacgcccgtgtgcacgacggagatggcggcgatggcggggtacgccaaggagttcgagaagcgtggcgtgaagctgctgggcatctcgtgcgacgacgtggagtcgcacaggcagtggaccaaggacgtggaggcgtacggcgggaagcagcagcagcagcagcatacgacgacgaaggtgacgttcccgatcctggcggacccggcgcgggacgccatccggcagctgaacatggtggaccccgacgagaaggacgcggcggggcggagcatgccgtcccgcgcgctccacgtcgtcgggcccgacaaggccgtgaagctgagcttcctgtacccggccaccacggggcggaacatggacgaggtgctgcgcgccgtcgactcgctgctcacggccgccaagcacggcgggaaggtggccacgcccgctaactggaagcccggggagtgcgccgtcatcgcgcccggcgtctccgacgaggaggccaggaagatgttcccgcaggggttcgagaccgccgacctgccctccaagaagggctacctccgtttcaccaaggtttagctagccgacgtacggcacggacatctagctcgtctgtcagtccgcgtcgaccggggtgcgcggatcttttgtgcctgctggtggtttctctgactagtactagtatatatataggctctatgtatgtgcgtactatgccgtgccgtgttgtctcgtgtagtggtggcaaccggttcgtggcactaccgcgctagtattgtccacccatatcaatgtcctcttctgaacttagcggcgcacatgtttgtgcgtgtgtgtagcatctgctagtgcaattgcatgatgcatggccgtgcgaaaaggccctcggcgctacgacagcagccagcacggcacgtttcaaagtatgcctgatactgtacgatgtcttatagcatcttcgaaagactatttaaatagctcgccaagccaaattttggctacttaacacc

SEQ ID NO: 142180 - DNA, 1258 bp, Zea Mays
cgtatatatacgtggtccatgtcagttcgttcgtctcagcagtccgatagccaggaagcccgtgcacgtcgaccgacgtacgccaccatgccggggctcaccataggcgacaccgtccccaacctggagctggactccacccacggcaagatccgcatccacgactacgttggcgacggctacgctatcatcttctctcacccagccgacttcacgcccgtgtgcacgacggagatggcggcgatggcggggtacgccaaggagttcgagaagcgtggcgtgaagctgctgggcatctcgtgcgacgacgtggagtcgcacaggcagtggaccaaggacgtggaggcgtacggcgggaagcagcagcagcagcagcatacgacgacgaaggtgacgttcccgatcctggcggacccggcgcgggacgccatccggcagctgaacatggtggaccccgacgagaaggacgcggcggggcggagcatgccgtcccgcgcgctccacgtcgtcgggcccgacaaggccgtgaagctgagcttcctgtacccggccaccacggggcggaacatggacgaggtgctgcgcgccgtcgactcgctgctcacggccgccaagcacggcgggaaggtggccacgcccgctaactggaagcccggggagtgcgccgtcatcgcgcccggcgtctccgacgaggaggccaggaagatgttcccgcaggggttcgagaccgccgacctgccctccaagaagggctacctccgtttcaccaaggtttagctagccgacgtacggcacggacatctagctcgtctgtcagtccgcgtcgaccggggtgcgcggatcttttgtgcctgctggtggtttctctgactagtactagtatatatataggctctatgtatgtgcgtactatgccgtgccgtgttgtctcgtgtagtggtggcaaccggttcgtggcactaccgcgctagtattgtccacccatatcaatgtcctcttctgaacttagcggcgcacatgtttgtgcgtgtgtgtagcatctgctagtgcaattgcatgatgcatggccgtgcgaaaaggccctcggcgctacgacagcagccagcacggcacgtttcaaagtatgcctgatactgtacgatgtcttatagcatcttcgaaagactatttaaatagctcgccaagccaaattttggctacttaacaccaaaataaatctccaatagactcatcgagttatctgactatctaaattagt

SEQ ID NO: 142181 - DNA, 1324 bp, Zea Mays
atggccaccaagctcgccgttctcggcaccttggtgctcgcgctgctcggccccgtgtcgtgccaacaacagcaagcgggctacggctatggcgccggcagtcctacacctactacatcgccgccgccgccgccacctgccgctggtgccggactgagcgtaggatactacaaggacaagtgcgccgaggcagaaaccatcgtgcaggaggccgtgcgcgctgccgacgccggcaccaaagcagggctcctccgtttgttcttccacgactgcttcgtccagggctgcgacgcctccgttctgctcaagcccgacaacgacaccaacccgcagccggagatgctcggggtccccaacctgagcctgcgcggcttcgaggtcatcgacgcggccaaggcggcggtcgaggcgagatgcccgggcgtcgtgtcctgcgccgacatcgtcgccttcgccggccgcgacgccagcgcgttcctcagcggcggcgccatcaacttcaccatgcccgcgggccgctacgacgggacggtgtcgctcgccaacgagacgctccccaacctgcccccgccgttcgccgacgtccggcgcctcaaggccatgttcgccgccaagggcctcgacaccgtcgacatggtcgcgctctccggcgcgcacagcatcggccgctcccactgctcctccttcagcagcgaccgcctcccgcccagcaacacctccgacatggacccggcgttcgccgccacgctgcaggcgagctgcgcgtcgtcggccaacggcgctgccgacaacacggtggtgcaggactacaggacccctgaccagctggacaaccagtactaccggaacgtcatcagccacaaggtgctcttcgcgtcggatgccgcactcctcaagtcaagcgacacgcttgggctggtctatgtagccgccttctctcagaagctgtggcaggacaagtttggagaagccatggtgaagatgggtggcgtccaggtgaagacggccgccaatggggagatcagacggatgtgtggctacgtcaacaaaccctaatccggttaacgaccgaccgacgatggtggtcagtttgagcttgcattgagcatatcctcccgggtgtctcttcaaacctaagctagatccacactcctgtttcttgctctattcgagttcttttatatcggttttcaacccctttatttctgttactcgatttttttgttctaattttggctgtatcaccgtattcattccagcaaaatgtattcattccagcaaaatgtattcatcagacgatattgaaatatggttttcgtcagct

SEQ ID NO: 142182 - DNA, 1952 bp, Zea Mays
tttgataaaaaaatgtttgacaaaaaatattgttttgtcatccgatattttatttttttaactaaaacgcgacaaataaaaaagaatggactaaggaggtcacaacaacctatcaaattattgttgaacatgtgccaaacagaacttaagtcaaacgagctcaatgtcaacgaatgtcgggtagagcggtgagcttcgtggagctcaccctctagtcctctactatacgaactgcatgttatgctattgttggctggcttgcacgtctcacaacgtgcgctccggccggccggcgataacacatgcatgatgaactggccgccggccagccggctataaataggcatgcaagacggcaacttttcattcagcccatcgctagctctcgcgtctcgcctgtctcctctagtagcacaagaccacgagggattaagcgatgacaacctctaagctcgctgtcctcactctgtttgccctgctcggctccgtgtcatgccagtccggtggctactacttctacccaaccccgcagcaaccatctccaacacccagccctccttctagtccgcaactcatggtcggatactacaaggacaagtgtgccgcttacgtggatgttgaagctattgtcaagaagcacgtcaaggccaccgatgctggcatgcaggccgggcttgtccgtctcttattccacgactgcttcgtccgtggatgcgacggctccgtcctcctcgacacgttcagcaacgacaccagcctgaccccggagaagttcggcgtgcccaacttccccagcctgcggggcttcgaggtgatcgacgcggccaaagccgagatcgaggcggcgtgccccggcacggtctcgtgcgcggacatcgtcgcgttcgccggccgcgatgcgtcctacttcctcagcggcggcggcatcaacttcgccatgcccgcggggcgctacgacgggaacgtctccctcgccaacgagaccctccccaacctgccctccccgttcaccggcttcgaccagctcgtcaaggtgttcgccgacaaagggctcgacgccttcgacatgatcacgctctccggcgcgcacagcatcggccgctcccactgctcctccttcaccagggaccgcctgccgcccagcaacaccaccgacatagacccagcgttcgccgccacgctgcaggctagctgcgcgtcgcccaacggcaccgacaacacggtcatgcaggacttcaagacccccgacgtcctggacaaccagtactacaagaacgtgctggcccacaaggttctcttcacgtcggacgccgcgctcaccaccaacttcacgtccaacaacctggtgcgcgcctacgcggacttcgtgccctatctgtggcagcagaagttcgcgaaagccatggtgaagatggccggcgtcgagatcaaaaccgccgccaacggagagatcaggaagacatgccgcaaggtcaacagcaggtcctgatcagatggcgtcccgccgggcttccaatttcctaagttttgcctttacatacattcccctgatctcccctaatatctgcttttatgctgtatacattctttgtttcgtgttccagctgtatgcctgcttttatgctgtataatttaaatttgattgaatattacatcttttgaaatccaagcaaatcttcatcatcaattcgatcccacatgcgtgttgtgtcgtgaaattaagagcctgtttgcagactttggctctggcttttgtctggaaaaaagccagaaccctattatacacttttaggctatctgcactcatacaactctaaatttctactctaaaaaatattctgtccttatcagcaaggttctttactctataccataaacctttgcagtcatatttacttcatatctcaactctataccaactactacgtattatatcattttttaattctctc

SEQ ID NO: 142183 - DNA, 359 bp, Zea Mays
tccacacggagaataaacctatatgtctatcttgccaaatagaaaatcacaaccacagatccaagcaagaacataagacacaagattttatcccgaggttcggccacaccacaaaggtgtcctactccccgttgaggagcccacaaatggacgggtccttttcaaccctaatcctccacaatccgaccaccaaggtcaagggaatcttttctcaaatctgctcacaagagtgggtaatacaaacttcttggggttgtccacaactttggagactcccaagcaacctcaatccgtctaggaactttagggttccaagaacaataatatcgcacaagaggtctttgcaacaatctcaagag

SEQ ID NO: 142184 - DNA, 1720 bp, Zea Mays
ccgataaaaaatttgttgagtgttctttgccgagtgttacagtgtaaaaatacctcggcaaagaatgtaagtccggtagcgatatataacaatctggctaaatttaggtgcacctttgtctatcaaatacttgaattaatatactagacatggtgctgtgtcctgatgaactccaagcatcccaagcttagctgtgtgtgattaccagattggttgaggttaagagcacttcaatgatctcatctattctagtatttaagtcttgtattgaccaaaccacagtcaattcctatctttcgcaagctaactatatgtattattatggccgggctgtgtgctctccatgactacatgtcgttcctttcctgctgagtgttgttgattcttacatcgttgcacgtcagtacgctacgacgacgtgcgctccagaaacattctgcagactctagtccccggccggcccgcacaggaggagctataaatagacatgcgacgcagcaatccccttcatccactttgatctctcgagctgactagctaggcaggccgcaggtgctgcagtccagggatggccaccaagctcgccgttctcgccaccttggtgctcgcgctgctcggccccgtgtcgtgccaacaacagcaagcgggctacggctatggcgccggcagtcctacacctacatcgtcgccgccgccgcctgctgcatatcctccgatgacgacaagcccgacgccgagctctcccaccgcctatcctcctcctcctcctcccacacctagcccgccgccacctgccgctggtgccggactgagcgtcggatactacaaggacaagtgcgccgaggcagaaaccatcgtgcaggaggccgtgcgcgctgccgacgccggcaccaaagcagggctcgtccgtttgttcttccacgactgcttcgtccagggctgcgacgcctccgttctgctcaagcccgacaacgacaccaacccgcagccggagatgctcggggtccccaacctgagcctgcgcggcttcgaggtcatcgacgcggccaaggcagcggtcgaggcgagatgcccgggcgtcgtgtcctgcgccgacatcgtcgccttcgccggccgcgacgccagcgcgttcctcagcggcggcgccatcaacttcaccatgcccgcgggccgctacgacgggacggtgtcgctcgccaacgagactctccccaacctgcccccgccgttcgccgacgtccggcgcctcaaggccatgttcgccgccaagggcctcgacaccgtcgacatggtcgcgctctccggcgcgcacagcatcggccgctcccactgctcctccttcagcagcgaccgcctcccgcccagcaacacctccgacatggacccggcgttcgccgccacgctgcaggcgagctgcgcgtcgtcggccaacggcgccgccgacaacacggtggtgcaggactacaggacccctgaccagctggacaaccagtactaccggaacgtcatcagccacaaggtgctcttcgcgtcggatgccgcactcctcaagtcaagcgacacgcttgggctggtctatgtagccgccttctctcagaagctgtggcaggacaagtttggacaagccatggtgaagatgggtggcgtccaggtgaagacggccgccaatggggagatcagacggatgtgtggctacgtcaacaaaccctaatccggttaa

SEQ ID NO: 142185 - DNA, 219 bp, Zea Mays
gtgttctgccattcccattccaccctccccgcaaagcccattcccattcccggctgccattctgtgttctgtctttctaattccccctccccgtaaaacccattcccattcccggctgtcattcccattccgccctccctgcactgtctttctcattccccctcccacaaagctcattcccattcccacgtgcatcccacgcctagctaaaattaaatt

SEQ ID NO: 142186 - DNA, 678 bp, Zea Mays
taaggaagcaaaaggatatagacataaggttgtgaagttttgggatctactcagcctagtgtacaataaagaccaagcaaatggagagggtgctaaaacagcagcagaaagttcaaaggaaatggcaaaagagaatgatatcggaggcaaggatgctccatattctgtatcttcctcgagtagtttaaaaagacaaagatcagatgattcatttaactctatatggtgtgataagttcgacatgcttacatctgcattgaaagatgacggtccaaagctaccctcttccgccaaagttctcgctgcattacaagaggttgagggacttgatgaagacacaaaacttgagctttatgacatcctcacctctaatgcacgcaagtttgagtcgatgatggcactcccaatgtaaaggaggaagaggtggcttatgatgcagctaaggaagtgaaacaacttatatgtgaacttagatctctgtgttgaactgattgtgtgaacttgtctttgtgaaacttttgtatgtgaacttgatggctatgtgaaactgttgtgtgcgaacttgatggctttatgaaactactatgtgaagatttgatgtctttgtagaacttttatgtgcgaatttgatgactttgtgaaactgttatgtgtgacttgcctttgtgaaattgttat

SEQ ID NO: 142187 - DNA, 1285 bp, Zea Mays
atggaagatgagatatccagcataatagcttgtgctcttgccatatctgatgagcgccaccatttgatagatttaaaatttgagaacggaatggattattccaagggagagtatgctaaagcaatagagaaatcttttagttttctgtctgaaagttctttcagctcatcaccatggtcatctacaaattttgaagcaagcttatcatctctgtcttcattttcatctgatgacttttctggttatgatagctcatttttgttgtccccaatgcatccagaaatgactgtgaatgggaaagtaactctcaaagacaaatattcagttactgttgtatatgataatcaattctttgcactccgaaaaaagtgttgcccatccgagcttgcatatattacttctttaagccactgcaagaagtggaatgctcaagcatgtttaccattctctggacactggaagccaaacttgtctgccaacatattaggaatctatcaggttaagcaaattaagcatggcaaaaaggtaaagatttacttgatggttatggaaaatcttctctttggccacaatatttcacgaatttatgacctcaaagatcaaaattatgttgaggacatgggcttttctccaatctatattggtggaagaacaaagcatcttttgcagcgtgcaatctggaatgacacgtctttcctcacttcggtgaatgttatggactattctctacttgtgggagtggacaaagagaagcatgaacttgtgtttggcatcattgattatctgaggcaatatacttgggacaaacaactggagacatgggtgaagacttctctggtagtacccaaaaatgttttaccaactgtaatttcccccaaggaattcaaaaaaaggtttaggaagttcatggcgaagtactttttgtcagttccagacacatggagtcttgataatccgtctaagccatgcaaatcccttggtcagagcaatcgcaagttggcggaagtccagattggtgataacctgtcagagctcccaaatgaagttgaggggtgtgcctaatcatgtgcaggatttcctggcagttttgttgaaccctatcttgttgttgtttggctatatttcactttgtaaaatggtgtacataggaggaccttgcggtttttaggcaaattgttgggcaagtgaggtccacatgacgtgtacctatacaaatgttcattgttaatttcacaattattatagtgaaattaagaattcatatgatcatttttttggacctacc

SEQ ID NO: 142188 - DNA, 551 bp, Zea Mays
ttgtatgactgatatgctttgagatttaacaggatacaacctttgagtttgagaggaagaggaacaggcccgagcgctacgaccgcaatttgacggagcagactctgaaggctatcccgcttattgcaaagattaggcatgaccgtatgggaaaacacatctcaaaacagacataaacctggtaaacgcaaggagatggaaaaggactccaaggagctggagcaggacatcggcatgctcccgaagaagcttattatcaaccatctcgcggctgagaaaacgaaggtcaaggttgaagttgttcagcagcagacagaagataacgctatggaagagtagtgcgtggcattttgtgtgcttgtgttttcatgtctgatgcagatccttttgtatttgcgtaagaagctatgtagttgatgaaagatgtttatttgatatatatattaatggatggattcgtggactgagtatcagcaagtttgttgttctggaatgtaagcttgctctgcttatgctataattgtcttgtcaggaaagtctcaatcctggaa

SEQ ID NO: 142189 - DNA, 552 bp, Zea Mays
gtcactttcagagggacaaattggacaaggttctggacactgttacagaaggaggacagacctcaaattaagtgccagatgaactgcacaaagtgccagaaactagtgaactgcacaaactggcagaaaacagtgatgtgcacaaaactggccatttgggttaacttccagggtggcggcgtcgtgcacagcatgtacgccatctcctgccttgtccttgtccacagcaagtgtggcaagctcagcggcggctatggccttcttctccgcagccctcgcttcgctacatgcttcctcagccgcagcagcagcggcgcgagcggcatcgcgcgcatcggagaccgatgctcctgggggaagacgaaagctactggacagatacgacacgggggaacgatccatggcggcggcggcggcgggctagggttctcagaaacagggggagctcgaggtgaatgggggtggatgagggtggacgggacggcgtctgctatacgaggaaacaacaagaagagtttaatagctagcggagaccaatgggttgcagcctag

SEQ ID NO: 142190 - DNA, 208 bp, Zea Mays
taatcaaaatgttagtacacaacatgccatgcctaaagcgtataggaagaatagaagcacgaaggaaaaattacatgattaccaacaccagtcacctcagagtgggacatgaaacaggagtaagagaagtaacaatgccaaaccagaatttccaacatccaattcttgatcaatgtcgttgttgcaagatcctccttgttgggagatc

SEQ ID NO: 142191 - DNA, 1929 bp, Zea Mays
gcatatgcatatataatgatgagtgagagagagagcgctctgctggatggccgtcctctggctagctgatgctagggcagtgagagagagagagagaggcctgtgggtgggtggggaagaagagaggcagcagcggtccaggtcgtccaggcacagacagtggccggctgacccacacacacgagagagaatatttgaagggaggaggtggaaggagctgagcctgactgagctcgtggggtgggggtgtggtgtgggtgcatagtgtagtacgtgtgtgtgcggtcatatgtgtgcgagtgcgagacagtgagactggagatagggctaaagagcggcagcctttaattcctctctagctcgcagtctcgcacacaacacatcacatacccggccggccctctctttctccccctgcccgcaggctgagctcccccatagttactagctagcttatattgcatatctcctccccctcctccgtcctcgctagctcgtgttcttcttcctctcatcttttgcttgtcctccattccatcgatctcctattcctgtgccgaccgcgaggccatcgtcaaagagaaacacagagcgggtcggggactctcggggagtcgggggaggctgctagtgctagctagctcgaccatatacagtttgtgggcgcggccgggcgggcaacaagctgctaaggtaccagcataccacccatctccatggctttcctggtggagcggtgcggcgagatggtggtgtcgatggagagcccgcacgcgaagccggtgccggcgccgttcctgaccaagacgtaccagctggtggacgacccctgcaccgaccacatcgtgtcgtggggcgacgacgacaccaccttcgtcgtgtggcgcccgcccgagttcgcccgcgacctcctcccaaactacttcaagcacaacaacttctccagcttcgtcaggcagctcaacacctatggcttcaggaagatagtggcggacaggtgggagttcgccaacgagttcttcaggaagggcgccaagcacctcctcgccgagatccaccggaggaagtcgtcgcagccgctgccgacgccgctgccgccgcaccagccctaccaccaccacctccaccatctccaccaccacctcagcccgttctccccgccgccgctggcacagccggtgccgtcgtaccaccaccaccactttccaagaagagcccatcgccaccgccaccgcgccgcacggcggtgctcaagccgccgccgccggcggcaacaatgaaggcagcggcgccggctcccggcggggactttctggccgcgctgtcggaggacaaccggcagctgcggcggcgcaactcgctgctgctgtcggagctggcgcacatgaagaagctctacaacgacatcatctacttcctgcagaaccacgtggccccggtgacgagcccctcgtcggcggcgcacgcgtccctgcccagcgccggcggcggcggcgccgcggcgtcctcctgcaggctaatggagctggacccggcggactccccatccccgccgcggcggccggaggcggacgacggcacggacacggtgaagctgttcggcgtggccctgcagggcaagaagaagaagcgggcgcaccaggaggatggggacgacggcaaccatgagcagggaagcagcgacgtctagccgccggccggcttgcattgctagctctctcgttcgtgtacatacagagatcagatcagagagtagtagtttgcctcgctagctaggctaggctaggctttggtaattttcttctgagtgcgtactgaaattaatgtgcaagagcgaagtgtttgtctgagtaaaactaacaagaatctacggatgcgtgcatggaagctaagctagatgcagaggcttgcaccaccttctcaattcgc

SEQ ID NO: 142192 - DNA, 1091 bp, Zea Mays
aacagtgtcgtcgtcgatctctgatctcatggaaaagaatgctagctaataacacaacttgatcactgtaagaaaggaaatgctgaattttttctctttggtttgctgttgctgttgttgttggctgatgcagggcttcaggaagatagtggcggacaggtgggagttcgccaacgagttcttcaggaagggcgccaagcacctcctcgccgagatccaccggaggaagtcgtcgcagccgctgccgacgccgctgccgccgcaccagccctaccaccaccacctccaccatctccaccaccacctcagcccgttctccccgccgccgctggcacagccggtgccgtcgtaccaccaccaccactttccaagaagagcccatcgccaccgccaccgcgccgcacggcggtgctcaagccgccgccgccggcggcaacaatgaaggcagcggcgccggctcccggcggggactttctggccgcgctgtcggaggacaaccggcagctgcggcggcgcaactcgctgctgctgtcggagctggcgcacatgaagaagctctacaacgacatcatctacttcctgcagaaccacgtggccccggtgacgagcccctcgtcggcggcgcacgcgtccctgcccagcgccggcggcggcggcgccgcggcgtcctcctgcaggctaatggagctggacccggcggactccccatccccgccgcggcggccggaggcggacgacggcacggacacggtgaagctgttcggcgtggccctgcagggcaagaagaagaagcgggcgcaccaggaggatggggacgacggcaaccatgagcagggaagcagcgacgtctagccgccggccggcttgcattgctagctctctcgttcgtgtacatacagagatcagatcagagagtagtagtttgcctcgctagctaggctaggctaggctttggtaattttcttctgagtgcgtactgaaattaatgtgcaagagcgaagtgtttgtctgagtaaaactaacaagaatctacggatgcgtgcatggaagctaagctagatgcagaggcttgcaccaccttctcaattcgc

SEQ ID NO: 142193 - DNA, 1477 bp, Zea Mays
aatgcgagaggatgcgcttttaaagggggcggaccgggctcgcctcgcctcgcctgggccggctgcatctttctcctcccaccatcacctcctccacctcctcctctttatccatctgccagggcgcacgaggagaacggcggcgtctgagatcgcgaggccgaggcttgtcccgtccccgctccgctcctcccacccacggtttctggaggacaattcttcgctgtctagccttcctcaaaagtaaaaagggtaaatgggatcagaagggccttcagttgtcactgtccatgttactggatttaagaagttccatggggttgctgagaacccaaccgagaaaattgtgaccaatcttaaatctttcttggaaaagcgagggttgccaaaaaatcttgtcctcggaagctgcacagttctcgaaacagcaggggaaggggcacttgccacattatataaggttttagagtctgctgttgcagacagaggaactgggtcctcggcacagggacaagtaatttggatccactttggggtcaacagtggcgcaataaggtttgcccttgagaaccaagctgttaatgaggctaccttccggtgtccagatgagctaggatggaaaccacagagggtccctattgtgccctctgatggaagcatctcacggacgagagagactaccctgccagtcaatgaattaaccaagtcactccggaagataggctacgacgtggtgccctccggcgacgccggtcggtttgtatgcaactacgtgtactaccactctcttcggttcgcggagcaacacggcatcaaatccctgttcgtgcatgttcccctcttcttgacgatcgacgaggaggtccagatgcacttcgtcgcttccctccttgaagtcatcgctttctcatccaactaggaacagcagttggaagatcagcgtctggattcctatctcaaggatggatgtaaagctggaatgctgcatgtaggctgaataaggtggtgtggtcattggcgatagatgttaatcttgctccacaggttgtgtttgggaatcgggagggaaaaaaagagaggtcattggcgatagatgatgatcttgctccagagggtgtgtttgggaattgggagggggggaaaagaggaaattgctgcatagagtcagacggtgtatcagcttgtacgccatcaatcaagtgctgtaaacatgcctgggaaataattggggacctggatttgaataagatttgagttgttgggggcggacgcgctacattaagacttgttcggttattcccaatatatatggatcggatgagattggaaaaaattaagaaaaagtttgacttgtttgggattcaaacccatccaattccactcaatccatatggattaggagctaaccgaacaagtccttacgtgatttacgtgcgacgggatagaaatcatgtatgttgacgtggataaatgtgct

SEQ ID NO: 142194 - DNA, 1434 bp, Zea Mays
tgggctttgaaggcgtgctagtttcattcataccggttggaatttgggtacttgttgtcgtcaggcttgctttggtatgggggtagacatcagacatgtggccatgtgatgtgctactgcttcagcctgtcgctgtgctggctagtgctgcgaattaggtttctggaggacaattcttcgctgtctagccttcctcaaaagtaaaaagggtaaatgggatcagaagggccttcagttgtcactgtccatgttactggatttaagaagttccatggggttgctgagaacccaaccgagaaaattgtgaccaatcttaaatctttcttggaaaagcgagggttgccaaaaaatcttgtcctcggaagctgcacagttctcgaaacagcaggggaaggggcacttgccacattatataaggttttagagtctgctgttgcagacagaggaactgggtcctcggcacagggacaagtaatttggatccactttggggtcaacagtggcgcaataaggtttgcccttgagaaccaagctgttaatgaggctaccttccggtgtccagatgagctaggatggaaaccacagagggtccctattgtgccctctgatggaagcatctcacggacgagagagactaccctgccagtcaatgaattaaccaagtcactccggaagataggctacgacgtggtgccctccggcgacgccggtcggtttgtatgcaactacgtgtactaccactctcttcggttcgcggagcaacacggcatcaaatccctgttcgtgcatgttcccctcttcttgacgatcgacgaggaggtccagatgcacttcgtcgcttccctccttgaagtcatcgctttctcatccaactaggaacagcagttggaagatcagcgtctggattcctatctcaaggatggatgtaaagctggaatgctgcatgtaggctgaataaggtggtgtggtcattggcgatagatgttaatcttgctccacaggttgtgtttgggaatcgggagggaaaaaaagagaggtcattggcgatagatgatgatcttgctccagagggtgtgtttgggaattgggagggggggaaaagaggaaattgctgcatagagtcagacggtgtatcagcttgtacgccatcaatcaagtgctgtaaacatgcctgggaaataattggggacctggatttgaataagatttgagttgttgggggcggacgcgctacattaagacttgttcggttattcccaatatatatggatcggatgagattggaaaaaattaagaaaaagtttgacttgtttgggattcaaacccatccaattccactcaatccatatggattaggagctaaccgaacaagtccttacgtgatttacgtgcgacgggatagaaatcatgtatgttgacgtggataaatgtgct

SEQ ID NO: 142195 - DNA, 1217 bp, Zea Mays
aggaacgttctagagggcacccgagaggccggcgcacgttgcgttggcgcggcgaacgatctcaaaggggcaggctcgtaatttttccgctgcgccggcgtctgtccataaaaccctaaaacctccggctgatcggttggtgttgaggcgagtggaagcttcgagttttttttttcttccttttggcttactgcgcaagaagaagggtaacaagaggacggcggcgatggcgaagaggctgctcccatctctgaaccgggtgctggttgagaagctggtgcagcccaagaagaccgccggcggcatcctcctcccggaaacatccaagcagctgaatgctgctaaagtggtggctgttggccctggtgagcgcgacaaggcaggcaatctgatcccagttgctctgaaggaaggtgacactgttctcctgccagagtatggtggaactgaagttaagcttgcagctgataaagagtaagaaaaccattcttctctgtttcagtacgtacgtcgtgttatactgctagtgcatgattaatttctcaattaggcacacaatagaactgttgcacttataaaaaatgtcttgcagctgtattatttgctgtcctatgaaatcatcaaaatatatgctgaacaggcaaacccatgatatgatgtggaatcatgatagtgactgttttaattgtgtcaaatgttgtgttggtgataggctgtttgatactgcatgtcaactatgccttttgcgacttagaaaaaaaatgatgcatcttaacctttgttcgctaactggcaacacaatcagttgtggtcgcaaataccaagtcaactgtttgttggattcttatcattgaagattgtttttttccttctgtttaatgccatttaacctcttctgaaaaatcttcaggtacctcctcttcagagagcacgacattttgggcacacttgtggactgattcagagcatcagcaagcctgtcactagtcgttggttctagacttctagtgtgagatgcgtagtatcagattctgggatcaaaatccctaagaactctgaactgtcgtgatgtcatagattttgtgatgaaacatcataattgcctgcttcttgttgcaagcgaacttttgcgtttaaaatggttccctaatattgtgttcgccactctgtccctggttgcaatgctctctagtttacgttggctgttgattggattt

SEQ ID NO: 142196 - DNA, 866 bp, Zea Mays
aggaacgttctagagggcacccgagaggccggcgcacgttgcgttggcgcggcgaacgatctcaaaggggcaggctcgtaatttttccgctgcgccggcgtctgtccataaaaccctaaaacctccggctgatcggttggtgttgaggcgagtggaagcttcgagttttttttttcttccttttggcttactgcgcaagaagaagggtaacaagaggacggcggcgatggcgaagaggctgctcccatctctgaaccgggtgctggttgagaagctggtgcagcccaagaagaccgccggcggcatcctcctcccggaaacatccaagcagctgaatgctgctaaagtggtggctgttggccctggtgagcgcgacaaggcaggcaatctgatcccagttgctctgaaggaaggtgacactgttctcctgccagagtatggtggaactgaagttaagcttgcagctgataaagagtacctcctcttcagagagcacgacattttgggcacacttgtggactgattcagagcatcagcaagcctgtcactagtcgttggttctagacttctagtgtgagatgcgtagtatcagattctgggatcaaaatccctaagaactctgaactgtcgtgatgtcatagattttgtgatgaaacatcataattgcctgcttcttgttgcaagcgaacttttgcgtttaaaatggttccctaatattgtgttcgccactctgtccctggttgcaatgctctctagtttacgttggctgttgattggatttacagtatgtacttcttatggtgcacgggatcgattacttgtgaacctttgcacaatcatcaaaggcgatgttgccatgctgctat

SEQ ID NO: 142197 - DNA, 713 bp, Zea Mays
tctcaaaggggcaggctcgtaatttttccgctgcgccggcgtctgtccataaaaccctaaaacctccggctgatcggttggtgttgaggcgagtggaagcttcgagttttttttttcttccttttggcttactgcgcaagaagaagggtaacaagaggacggcggcgatggcgaagaggctgctcccatctctgaaccgggtgctggttgagaagctggtgcagcccaagaagaccgccggcggcatcctcctcccggaaacatccaagcagctgaatgctgctaaagtggtggctgttggccctggtgagcgcgacaaggcaggcaatctgatcccagttgctctgaaggaaggtgacactgttctcctgccagagtatggtggaactgaagttaagcttgcagctgataaagagtacctcctcttcagagagcacgacattttgggcacacttgtggactgattcagagcatcagcaagcctgtcactagtcgttggttctagacttctagtgtgagatgcgtagtatcagattctgggatcaaaatccctaagaactctgaactgtcgtgatgtcatagattttgtgatgaaacatcataattgcctgcttcttgttgcaagcgaacttttgcgtttaaaatggttccctaatattgtgttcgccactctgtccctggttgcaatgctctctagtttacgttggctgttg

SEQ ID NO: 142198 - DNA, 671 bp, Zea Mays
atggtgtcgacgctggagcagctgctcatcgcggctgccttcctggtggtggcggcggcggcgtcgacagtgcccgtgtctcctgctgcggcagcgacacggccgtaccacggcggcggctgctacagccatttcttcgcgttcggcgactcgctcatcgacacgggcaacttcatccgctactccacggcgagaccttcttccaccgccccaccggccgctggtccgacggccgcctcatcgttgacttcattgttgagcggctggggtacccgcgctggccgccgtacctggacgggaagagcaaggacgacttccggcacggcgctaacttcgcggtggccagcggcacggcgctcaaccagctgctgttcaagaagcacggcctcaacgtcaacggcatcacgccctactccctcggcgtgcagatcggctggttcaagaaggtgctcgccatgctcgcctccaacgagcacggtatgcgtgtatacgtacatatagccagcaattaccacgtactacatacataactgtggatgaatccagctctgtggcttctagaaaaaatacatttctctctaacatagatatgcatttttttcttaaaaaacagtctcctaggaaacctataaattttaaggtgccgttgccttatatgatgaaattattgt

SEQ ID NO: 142199 - DNA, 891 bp, Zea Mays
gcccgtgcgttccccatcagcacatctgccaccgtgcgattacctgcggagccgccaccggaggccgacatttcaggcgctactgctgcagatactgtgtcggcccgcttcgcactcacgatcggtggcttcttctccccagatttgcctatagcggttgtcgtggccgcactcgcggtggggagaggcagtggtggaaatagaaatgcgggagcgggtgtagaaggagaggatagcaggaggcggggctccacggagaggaggtcgtggaaccgtgggttcttcattcccagatccggccaatgcgagcagaactgcggcatcgggggcggggatgggattcctggcgaagagacaagggaggggaggggatggcgatgcgagcacagttgcggtgtcgtggagagggggagaggaggggaaggattggggatctcgacacctttagattcggccggagtaggcatggttatggcgtcgtggagggagaaaggacgtagggaggaggagaatggctcgcatctgttgggagcgtcaagctgctccatcatcgtcgttgtagccatcgcggtcgacaccctcttcaccatggatagtgccgccccggcagccgagagggatccgccggcgggaggggggagctcctggcagggtgggggatccgccagcgggaggggggagctcatggctgggttggagatccgtcggcaggaggggggcggagctcctggcggggtggtggagttgctggcaccgtggtccgtgatgggagctaacggagctcctggcggggaggtggaggggggccttctccggtccagaaccttcgcgagcatcccagaaccgagatgggtaggcagatttgtcggacgtcgatgcgcgatccgatag

SEQ ID NO: 142200 - DNA, 104 bp, Zea Mays
ccgatggcgctcttcggacgcaggttggtgttggtcacgggtcaccgccttcacacacaaagcccgtcgtcgcctgatcttctctcgctcggatctagccgacg

SEQ ID NO: 142201 - DNA, 503 bp, Zea Mays
cactgtgtcatctctgtgtttgatctcttgtggtattgtgttttgttgagactcctctctagccacttggcgattattgtgctaacacttaacaagtttttgtggcttaagtttttaagtttcacaggatcacctattcacccccccctctaggtgctctcaccggtccctgcctagaccttgtcgatgtactgtaggatgatctgggacttgtttacggggcgacccacgtggagcagcacgggcacggtcttgtgcaccgggttggagctgagcaggagcgcgctcttgttgccgaggtcctcctccacgtactcgtacgccaggcccttgaggttgagcacgatgcggactcggatcacaaacgggctcgtccacattcccagcaccttcaggtcgtcggctcccgccattgccagctctctctctctctctcctgcccagtccaatgggttgcccggtgagtcatagcagatcagaacagcgactcacctcaacggaga

SEQ ID NO: 142202 - DNA, 2830 bp, Zea Mays
atggcggcctcctcctcccgcggcgccgccgctgccgccgttgatgacgacgacgagccctacctcctgggcttcatcatctccaagatcgtcggcatgcgctactaccgcggcaaggtccacggccgcgagaccgtcggcctggtccgccagccgctcaaccggtacgataacaacgccatcgccgtctttaatgcccgcaacgaccaggtcggccacctcccaggcgccctcgcggcggtgctcgccccgctcctcgactcccacctcctcgccgcggcgcagggcatcgtgccccggtcgggctcgaagatcaaccccaacgcctacagcctcccctgccaggtccacctattcgcgcgccccgctgccgcatccgtcgtcgaggccgcgctccacgaggccggcatcgacctcatccacgtcgaccaccccgagttcgccctctcccaggcggccgcggtcatggagcagttcaagaagccggaccgcgaccgcgacgtcgataagctcttctcgcttgtggggaaagaagggaagaatcagactcagcccatggacccgcccggggatgtcgtgctgtccgagctcttcggacaccagaaggaggcgctggggtggatggtgcaccgggaggagtccgccgacctgccgcccttctggcaagaaggtgaagatgggggattcgagaacgtgcttaccaatcaaaagacggagaaacgaccgccgccgttaaagggcgggatcttcgctgatgatatggggcttgggaagacgcttacactcctgtcattgattggaaggactaaagctcgcaatgtgggtgcgaagaaggctagagggggcaagaggaggaaggttgaggacggaggggaggggtcgcggaccacgcttgtggtctgcccaccctcggtgttctcatcttgggtgacacaactggaggaacacttgaaagcaggcagcctgaaagtctacatgtaccatggcgagcggacgagagataagaaggagctgttgaagtatgacctcgttcttaccacctacagcatcttggggacagaatttgagcaggaggactcaccggtgaaggatatcgagtggtttcgtgtgatcctggatgaagcccatgtgatcaagaactctgcagcacggcagacgaaggcggttatcgctctgaatgcagagaggcggtgggtggtcactgggacacccattcagaacagctcatttgatttatatcccctcatggcatttttgagattccagcctttctcaatcaagagctactggcagagcttgatccagcgccccttagagaaaggaagtaaggctggattgtcacggttgcaaaacctcttaggtgctatttcattgcggagaatcaaagagatggacgatggaaacaagagcatggttgaacttccctccaaaactgttttggcatgttatattgatctttctgcagaggagcgtgaatactatgatcagatggaacaggaagggaggaacaaaatgcaggaattcggtgacagagattcgattctgagtaattactcaaccgtgctttatttcattctgaggctccgccagctctgtgatgatgttgctttgtgtcctttagacatgaaagcatggtttcctgcaagctctatcgaagatgtgtctaaacacccagagctgttgaagaaactggccttattggttgatgatggagatgactttgactgtcctatttgcctctctccaccaactaaaactgtcataaccagctgcactcacatatactgccaaacctgcatcctaaaaatcctcaagagctccagttcccgctgtccaatatgcaggcgcaccttatctaaagaggacctcttccttgctccagaggtaaagcatcctgatgaagatggttcaggcaaccttgagtctgacagacccctctcatccaaggtgcaagcactgctgaagctgctgacggcttcacagaacgaagacccctcatcgaagtctgttgttttttcccagttcaggaagatgctgatcttgctggaagcgcccctcagaaaggcaggctttaagacactacgcctcgacggctcaatgagcgcgaagaagaggctgcaagtcatccaagaattcagtcacggtggctctgactccccaactgtgctactggccagtctgaaagccgcgggagccggcgtgaacctcacagctgcctcgacggtgtacctgttcgacccctggtggaaccctggggtagaggagcaggccatggacagggtgcaccggatcggacagaagaaagaagtgaaggtgataaggctcatcgtgaagggcagcatcgaggagaggatactggccctgcaggagaggaagaagcggctgatcagcggcgcattcgggaagaagggaggcaagaacgagaaggagatgcgtgtcgaagagctacggatgatgttgggcctaggtaagtaaggaaaaggctggttggtggtgataggaggagtgatgcttgtgttgcttgtgatatagctctggcggtagaagttgtagctagggcgatggagatgagaccatcaaccatgacatcacagttttctcggtgtaggtagtttcagtgtaggcataggtagggctggaagaaaacgaaatccaggcacgcgtgctaaacattagcactagatcagtgctaaatgattgggtcctcacttcctcagctgtgatggtcaattactgaacacggtcaaatctagtagtagctgtgctaaatgaattgcgtttgtagctttcctatttatccaattggacagtcaggactcctgggcttggg

SEQ ID NO: 142203 - DNA, 1899 bp, Zea Mays
ctcctcctcctcggtatccatccgctcccgccttctcattccaaagctcgccccgcgtcgccgcccctccgcggatcctccctccccttccctcgtgtgctccggcggcattctccttcccgctgccagggtcgaggatttcttgtagatgactcgagcttcgactatcgatttcggacggcggaagcagagcgagctcttcggctcagggccactgcgtccagcaaacatcatcagaaataaattccccacctacaagaatggttcgaatgggattgttatcaaattggccgatggcccagaaatgccatctctcaaggaggccgttgccaaggaggcaacagatctgcttgataggtgtcagcgcccttcagtccgagagctcaccatgaaattcgagaagggctttaacacagctaccttgctgtctaatgaggctaaatggagacatgcggctttattggagcgggacatccttctaaaggatcttaaaagtgtgttggaatcgctgagaggtcgagtagggggcaaaaataaagatgaaatcgtggagtctctatctatggtggatattttagccattgagctatccaaaagagaagatgagttgctccggcaaaaaacagaggtcacaaaaattgcagacacgctgaaactggcttctacagatgccaagagaattattgacgaagaaagagccaatgctcggttggagatagaaagtgctaaagcttctgtacaaaaaattcaatcagcacttaaagagcaggaacttttttctcaaagaactgggaagcaggatgtcgatgaactgaaggaagaagttcaagaagcacgaagagtgaaaatgctgcattgcccaagcaaggcaatggacattgagaacgagatccaagttctgcgtgatcaactggctgaaaaatcttcagattctcttcgccttttgaaagagttggagctgcatcgaagttacggggaaaatgacatgcccttgtatgaattaaagggtctagaaaccttaggctcaacgttgcgcatagttgttcacgagtgtgcctctgtagatttctcgaacagttcaatccagtggtttcgcatacagcctgaaggaagcaagaaagaaattatttcaggcgccacaaaaccagtatatgctccagaaccacatgatgtggggcggtacatccaagctgaagtcaaatctggtggccaaatctcagtcgcaaaaactgccggttcaatagatcctgctgcaggattggttgaatatgtagaaactctcgtgaggaatcctgaaactgattataatgtagtcattattcaagtaaatggagttgctcaggctgcagactccgttcacgttctttgcatcgggagattgcggatgagacttgctaaagaaaagacggtcgttgcgaaggagttctattcctcgtcaatgcagttgtgtggcgttagaggaggtggagacgccgctccccaatcgatcttctggcaacccagaaagggcctcagctttgtgctggcatttgagacaaccagagaacgcaactcggcgctcatgctcgcccggaggttcgccatcgactgcaatatcatccttggtggtccgggggacaaaacgtcatggtgaagtgaaacaaccagcgcactctggaacctgaagcctgaccgattcttgaattgcacatactgtagttcgattgtcgcatctgatcactgagagtagctgagctcagtttagcgttgtacgtacgtagtgccaactgccaagtgttggctccgattcattttttttaagtttaggactcgttgcgtgtactcgccggttgtgtagtgtagtagttatgtatacttgtgttcctgatgaagagctgaactacgagtgcctagatgtca

SEQ ID NO: 142204 - DNA, 1048 bp, Zea Mays
catggcctttttgcctcccctaagaactgcattgttctttttttaaattttttttacacttcgttcgggaattccaacgcgtgcctgttcgctgctccagggtcgaggatttcttgtagatgactcgagcttcgactatcgatttcggacggcggaagcagagcgagctcttcggctcagggccactgcgtccagcaaacatcatcagaaataaattccccacctacaagaatggttcgaatgggattgttatcaaattggccgatggcccagaaatgccatctctcaaggaggccgttgccaaggaggcaacagatctgcttgataggtgtcagcgcccttcagtccgagagctcaccatgaaattcgagaagggctttaacacagctaccttgctgtctaatgaggctaaatggagacatgcggctttattggagcgggacatccttctaaaggatcttaaaagtgtgttggaatcgctgagaggtcgagtagggggcaaaaataaagatgaaatcgtggagtctctatctatggtggatattttagccattgagctatccaaaagagaagatgagttgctccggcaaaaaacagaggtcacaaaaattgcagacacgctgaaactggcttctacagatgccaagagaattattgacgaagaaagagccaatgctcggttggagatagaaagtgctaaagcttctgtacaaaaaattcaatcagcacttaaagagcaggaacttttttctcaaagaactgggaagcaggatgtcgatgaactgaaggaagaagttcaagaagcacgaagagtgaaaatgctgcattgcccaagcaaggcaatggacattgagaacgagatccaagttctgcgtgatcaactggctgaaaaatcttcagattctcttcgccttttgaaagagttggagctgcatcgaagttacggggaaaatgacatgcccttgtatgaattaaagggtctagaaaccttaggctcaacgttgcacatactgtagttcgattgtcgcatctgatcactgagagtagc

SEQ ID NO: 142205 - DNA, 1695 bp, Zea Mays
acgcgtgcctgttcgctgctgtatatgactcgagcttcgactatcgatttcggacggcggaagcagagcgagctcttcggctcagggccactgcgtccagcaaacatcatcagaaataaattccccacctacaagaatggttcgaatgggattgttatcaaattggccgatggcccagaaatgccatctctcaaggaggccgttgccaaggaggcaacagatctgcttgataggtgtcagcgcccttcagtccgagagctcaccatgaaattcgagaagggctttaacacagctaccttgctgtctaatgaggctaaatggagacatgcggctttattggagcgggacatccttctaaaggatcttaaaagtgtgttggaatcgctgagaggtcgagtagggggcaaaaataaagatgaaatcgtggagtctctatctatggtggatattttagccattgagctatccaaaagagaagatgagttgctccggcaaaaaacagaggtcacaaaaattgcagacacgctgaaactggcttctacagatgccaagagaattattgacgaagaaagagccaatgctcggttggagatagaaagtgctaaagcttctgtacaaaaaattcaatcagcacttaaagagcaggaacttttttctcaaagaactgggaagcaggatgtcgatgaactgaaggaagaagttcaagaagcacgaagagtgaaaatgctgcattgcccaagcaaggcaatggacattgagaacgagatccaagttctgcgtgatcaactggctgaaaaatcttcagattctcttcgccttttgaaagagttggagctgcatcgaagttacggggaaaatgacatgcccttgtatgaattaaagggtctagaaaccttaggctcaacgttgcgcatagttgttcacgagtgtgcctctgtagatttctcgaacagttcaatccagtggtttcgcatacagcctgaaggaagcaagaaagaaattatttcaggcgccacaaaaccagtatatgctccagaaccacatgatgtggggcggtacatccaagctgaagtcaaatctggtggccaaatctcagtcgcaaaaactgccggttcaatagatcctgctgcaggattggttgaatatgtagaaactctcgtgaggaatcctgaaactgattataatgtagtcattattcaagtaaatggagttgctcaggctgcagactccgttcacgttctttgcatcgggagattgcggatgagacttgctaaagaaaagacggtcgttgcgaaggagttctattcctcgtcaatgcagttgtgtggcgttagaggaggtggagacgccgctccccaatcgatcttctggcaacccagaaagggcctcagctttgtgctggcatttgagacaaccagagaacgcaactcggcgctcatgctcgcccggaggttcgccatcgactgcaatatcatccttggtggtccgggggacaaaacgtcatggtgaagtgaaacaaccagcgcactctggaacctgaagcctgaccgattcttgaattgcacatactgtagttcgattgtcgcatctgatcactgagagtagctgagctcagtttagcgttgtacgtacgtagtgccaactgccaagtgttggctccgattcattttttttaagtttaggactcgttgcgtg

SEQ ID NO: 142206 - DNA, 1342 bp, Zea Mays
gatctaggcccgacccgacccgatccggatccggactatggtctgtctatattgaataatcactcttctccgttcacaccctgtgcgcgcgggctctcttcgtcgtgcggcaactgcgcgaccgccgacgcccgacggcaggtgcaccaggtcttcgtcgaccccttcgcaaggcctcggttccatccttcgccggaggcgaccgcccgtcaacaggacttgatctactactcactagcggtgtagaggtgaagataagaacttgaccatgagcagcataggcacaggttatgatttgtctgtcacgaccttctccccagatggtcgtgtcttccaggtcgagtatgccaccaaggccgtcgacaacagcgggactattgttgggatcaagtgcaaagatggcattgtcctgggtgtcgagaagctggtaacctcaaagatgatgctggaaggatcaaaccgaaggatccattcggtgcaccgtcactctggcttggctgttgctggtttagcagcagatggcaggcaaattgtttcaaggaccaaatcagaagctgccagttatgaaaaggtctatggagaacccatttctgtgaaggaattggctgatcgtgtggcaagttatgttcatctttgcacgctgtactggtggctcaggccttttggttgtggtgttattcttggaggttatgatagggatgggccacagctctacatgatagaaccctcaggagtttcctacaaatacttcggtgctgcattggggaagggaagacaggctgcaaagactgagatagaaaagttgaaactttcggagcttacctgccgggaaggcattgttgaagttgcaaagataatttatggagtgcatgacgaagcgaaggacaaagcttttgagttggagttgagctggatctgtgatgaatcgaaccgccagcatcagaaggttccaaatgaactgttggagcaggccaaagctgctgctcaggcagctcttgaggagatggatgctgactaagaaacaggacgatttgcccagacttggtgtttttggtgctgttgaaatctccgatccctttggggtgtgacccactggacatggccaatttgtcacaatttattattttgacccatgtcatgtgaaactcctttcgttgaagtctggtatctagattgacttgtatcagagctgtggtttacgcagactggattctggagtactggactgtgtgtgtgtttttcggaactgtgcatctgacttttagctgttcgttgactttgtttttcttttttcagataaagagctgtttcttgatttgatgcaagtaggcttggtactctt

SEQ ID NO: 142207 - DNA, 1141 bp, Zea Mays
gatctaggcccgacccgacccgatccggatccggactatggtctgtctatattgaataatcactcttctccgttcacaccctgtgcgcgcgggctctcttcgtcgtgcggcaactgcgcgaccgccgacgcccgacggcaggtgcaccaggtcttcgtcgaccccttcgcaaggcctcggttccatccttcgccggaggcgaccgcccgtcaacaggacttgatctactactcactagcggtgtagaggtgaagataagaacttgaccatgagcagcataggcacaggttatgatttgtctgtcacgaccttctccccagatggtcgtgtcttccaggtcgagtatgccaccaaggccgtcgacaacagcgggactattgttgggatcaagtgcaaagatggcattgtcctgggtgtcgagaagctggtaacctcaaagatgatgctggaaggatcaaaccgaaggatccattcggtgcaccgtcactctggcttggctgttgctggtttagcagcagatggcaggcaaattgtttcaaggaccaaatcagaagctgccagttatgaaaaggtctatggagaacccatttctgtgaaggaattggctgatcgtgtggcaagttatgttcatctttgcacgctgtactggtggctcaggccttttggttgtggtgttattcttggaggttatgatagggatgggccacagctctacatgatagaaccctcaggagtttcctacaaatacttcggtgctgcattggggaagggaagacaggctgcaaagactgagatagaaaagttgaaactttcggagcttacctgccgggaaggcattgttgaagttgcaaagataatttatggagtgcatgacgaagcgaaggacaaagcttttgagttggagttgagctggatctgtgatgaatcgaaccgccagcatcagaaggttccaaatgaactgttggagcaggccaaagctgctgctcaggcagctcttgaggagatggatgctgactaagaaacaggacgatttgcccagacttggtgtttttgataaagagctgtttcttgatttgatgcaagtaggcttggtactcttcatgtttgtggcatatggttagcaggcatgaatgtgacatca

SEQ ID NO: 142208 - DNA, 1560 bp, Zea Mays
tacacactcttcggcggattcattgactcgtcgtcggtgagatctcagaggacgggttcatcttcccgtagctcatgctctcgtcgatcgaacgagcaggagttggagattatgaggatgcgtgaagagatgagacaacaacgtgaatttatggaggcttgcaatgcacacaaccaagcgatgtatcaattaatgcagcaacagggcatggcaacaaattttccaccgccaccacaatggagccaatttgcaaacacaccagttccaccaccacagttcaccacccctccgacacatatacctgcacctggagatagggttacgcctgaagcgggtggtagtgggtctgatccagcagtagggactggatttgttgactcgctcttcgcgttccctcctcctggtggtggtggcggcagcgggcaaagctctaaccacccaagtggtgcaaagcaagaaccaataaatcaaatgggcagctccagctccaagaacgccagtcacatgtcgtccctgccgtggacggtgcgcatccaggcagccgccttccaggtggcacaacgtcaggacggcagtatccggcgccctattctcttcctcagcgacctcaagacaggcgccagccgcgccacgcccagcccggatgtttcggaggtacgatccaccgatatcacaattgacgtctcccgcggcctctgggcacgcgtgttctgccccacggcgatcgctgacgatgctccagccccgctccccgtctttgtctacttccatggcggcgggttcatgctcttctccgcgtcgttcggcccctatgacaccttctgccgccgtctctgccggaagctccgggccgtcgtcgtgtccgtgaactaccgcctcgcccccgagcatcgtttcccggcagcatacgacgacggcgtcgccacactccgctacctggacgagaccccgaccccactgccggccgacctcgtaccggcccccgtcgacttcggtagctgcttcctgatcggcgatagctcggggggcaacatggtccaccacgtcgcccagcgttgggcgtccatgtcgtcggcgacgtcgtcacagtcacagtcacagcctccactgcgcatgcgccgcctccgcctggccggcgccgtcctcatacagccgttcttcggcggggaggagcgcactgaggccgaggtaaggcacgacaaggcgtgccgcatattgtcggtggctcgtgcggatctctactggagggagttcttgcccgagggagcaagtcgagaccacccggcggcgcgcgtgtgcggggagggcgttgagctggcagacacgttcccgccggcgatggtggtgaccggcaggatcgatctgctcaaggactggcacgcaaggtacgtggagacgttgcgtgggaaggggaagcgggtcagggtggtcgaatacccggacgccttccatggcttctacgcgttcccggagctcgctgattccagcaagctcgtcgaggacatcaagctgttcgtcgacgatcataggtctggttcccgactagatgcatgtggttag

SEQ ID NO: 142209 - DNA, 1312 bp, Zea Mays
cccccttgcattcctaagcaaagcaagtaaatgggcagctccagctccaagaaccccagccacatgtcgtccctgccgtggatggtgcgcatccaggcagcagccttccaggtggcacaacgtagggacggcagtatatggcgccctcttctcttcctcggcgacctcaagacagccgccagccgcgccacgcccagcccggacacctcggaggtacgatccaccgatatcacgattgacgtctcccgcggcctctgggcacgcgtgttctgccccacggcgatcgctgacgatgctccagccccgctccccgtctttgtctacttccatggcggcgggttcatgctcttctccgcgtcgttcggcccctatgacaccttctgccgccgtctctgccggaagctccgggccgtcgtcgtgtccgtgaactaccgcctcgcccccgagcatcgtttcccggcagcatacgacgacggcgtcgccacactccgctacctggacgagaccccgaccccactgctggccgacatcgtaccggcccctgtcgacctcgctagctgcttcctgatcggcgatagctcggggggcaacatggttcaccacgtcgcccagcgttgggcgtccatgtcgtcggcgacgtcgttacagcctccactgcgcatccgccgcctccgcctggccggtgccgtcctcatacaaccgttcttcggcggggaggagcgcacggaggccgaggtaaggctggacaaggcgtgccgcatattgtcggtggctcgtgcggatcgctactggagggagttcttgcccgagggagccagccgagaccacccggcggcgcgcgtgtgcggggaaggtgttgagctcgcagacacgttcccgccggcgatggtggtgaccggtgggatcgacctactcaaggactggcacgcaaggtacgtggagacgttgcgtgggaaggggaagctggtcagggtggtcgactacccggacgccttccatggcttctacgtgttcccggagctcgctgattccggcaaactaatcgaggacattaagctgttcgtcgacgatcataggactaaggcctctggttccgactagatgcatgttgtattgttgtgtcatgcatgcagagccatgcatgcgcgaccagtgcacgttcgcccttgctgccttgctgttgtgttctgcataccatacactggtcgaataaaaaagacccattgttaaataccgtactacgtggaaaatgttctccagatgtgaagaagtgctatatctgcgcaggtgcagcatatgactttctaggcat

SEQ ID NO: 142210 - DNA, 119 bp, Zea Mays
aacctctctcccgtccaaaccctagctaagctcccccaatcccctctgcaccgagatccgatctcgcccttctggccgcgggacagtcgccgccatggcctccggcggcaaccccaacc

SEQ ID NO: 142211 - DNA, 1361 bp, Zea Mays
aagcagtcatgactcatgacactagaatggaatgggatggtgttcgtgcatcacgcgtcggcgagcttgggcgtgggtatgtggctgtcgacgaaggccttcatatcctgcagcaccttggtagcctcggggagctccgggaagccgtagaagccgtggaacatgcctgggtactcggccaccagcacctccttccccttccggcgcagcacgtcggcgtagcgtcgctgccagtccatgagcgggtcgaagccgccgataatgaccatggcgggcgggaagtcgtcggcgaggtcggcgttgtcgtcggtgacgtgcgcggccgggtggtcgcgggtggcgccgtcgggcaggaacgcggtccacgagaagtcggagcgcctgaggttgaccacgggcgccacgccctctagctccagctccgacggcgtgcgctccacgccgccgaagtagggctgcacggggaagacgcccgcgacgcggagggcccgcgcggacggctgccacgccgccgcccagcggttggcgacgtggtgcacgatgtttccgcccgcgctctccccggccaggaagcaggtgccgaggtcgacgggcacgccgtcgtccaggcccgggacgccgccgcgggcgtcgaggaagcgcagcgcgtcgacgccgtcgtcgtaggcggcgggccagcggtgctccggggccaggcggtagttgacggacaccacgacggcgccgagcgcggcgcagaggcggcggcacacgccgttgaagggcccgatggccggggagaagagcgcgaagccgccgccgtggaagtacaccaccacggggagcgggcggtccgccgcggccggcgcgaagacgcgcgcccagatgccgcgggacgcgtccatggtcacgtcgtaggagcgcaccccggaggcgtccgggcgcgggctggcgcgcgcgctcaggagccggtcgatcacgccgtacaggcagcggttcaccgtcccgtcgcggcgctccacggcgtcgatggccgctgtcagcccggccagctggaggcgcacggacagcggtagcggtggtggcttcggcttcggcttggctgctgctccttggttgctgtcgtcgctggccatggagtccattccttcgctctggcctgctcgtcggtatcttggatgggtgtttccctggggttggacgtgcgatggagtatatagctgacagctcgtgtgccgtgtgggcagcggagcaggtagagagtttgagacggaactgtcggtatggcggcgcgtgcgtgccctgtctgtatttgtcaagacgggcgtggcgacgtgtcgcctggccttccacaaacggcaacggagagaccctgtctgatc

SEQ ID NO: 142212 - DNA, 1060 bp, Zea Mays
aatagcccaatgcgctgaatagcgcagcatcctttcccttctcccccaccctcggcctcgcttccagccatccgccgcggctcgtctccgtctcccggctcctcggcgtctagctcgtcaacgcgcgcgtccgccgtcggctcctccgaccggcgtcccaccacaggggaatacagatcgacgatccgctgggcttgcaaacatgtatatccgagtgaagcgcaacaagagtacctacttcattcaatgtgaaccaacagagacagctttgagcatcaaacagaagttgcactcgctgatagatcaacctcctagtagtcagcagttggtcttgtggcctagcagtgatgtgcttgaagactcaaagactttggcagatcaaaaggtggataacgattccattgttgcattggcactaagaaaagatgacggtgagtttgaggaagttttcatcgctaggccggaggatttcatgtcatcatcatgataaagattagtccatcatttctacaaagggaccactgcgcgttcttggagtggaccgtcgctctatgctggttcttctagaatctgggatgtggcttgcttgtccctttgggaggaaaaagaaaatcttttatgtgagatcccaaacaaccgttgtggatgatattaagctttgatttgacgctccaactgatgccgtgcttcttgtacctactggtgtctgtcttggtgttgggatcagagcgcacctaattgtccttttttgtaccagctgttgtatgcgaatccatctgtgccttcatcacctaatgcactcgctgttgctgctggcattcctggttggccccattgctcgattcaactgcgctgtcggtcacataatgggcaacgcgtttggttggcgccacaagattacgacgacagttttgggcttgtggtttctctttctcagggcaaaattttagtgaatgtttggacagatttcgtctgctcttacattaatggttctttttttttttttttgcctttgtaagtcagtttcataatttggcagaattgttgcctactttggtcc

SEQ ID NO: 142213 - DNA, 2067 bp, Zea Mays
gaaagcggccttgcccacgtttcaaaccatcttgaagaaggagatcgagaggcattcctacggcaccgtctttttttcccgattctcctgttcttgtttgtgacttgtgagtgagagcgggatccgacatccgaggagaggtcgaggccgggcaaagtcgaagtccgcgctccggcctccagctgacgaagcaggatgcactgtgacgcgctggcccatggtgagcttctgatgccaattaggactaaacatgcttcctcgctgcgctcaagtgggagaacaagaaatcagcctagacactagtcatctgctgcaagcagaaaatgcacccttattcacttaagagttccaagggagcaccaattctgccacggccagtcttcgttttcttcatcgcgacatttggtttctatgtatgctatctctccttcaatcagataacgctagagaacaacagagaggggaatagtcgagaagaacaaagggacgatatttgcagaaagccttatgtgccgtatgaggagctcagttatgtgcactttccaaaacctacaagttatagcaggggggagtgctcgtgtactcctgttcggttctttgtaatcgtgtctatgcaaagatcgggaagtggatggtttgagaccttgatgaatagtcaccctaacattagttccaatggcgaaatctttaacagaatggatagaagagaaaatatatcgtctatcttacaaacgcttgatacgctgtataatttggactggctcaccagcgccgctaagaatgagtgcacagctgcatttggactgaagtggatgcttaatcagggaattttggaaaaccctgaagatatagttagttatttgaacaagaagggtgtctccgtgatatttctgttcaggaggaacacattgcgcaggcttgtatctgtgctggccaacgactatgacaaagatgcaaagcagttgaatggaactcacaagtctcatgttcactcaaaagaagaggctgagatattagcaaaattcaaaccacatctggatacgtcgactctaattacaaacatcagaaacatcgagaaggccatcagagattgcttggaccacttcaagagtacgcggcacatgatcctctattatgaggatataatcagcaacagcaatgcattatcccgggtgcaagagttcctcagggtcccggtgaggaggctgatgagccggcaggtgaaaattcacacgaggcctcttccggaccttgtcaagaactgggaggaagttagcagcaaactgaacgggacagagtttgctcacttccttgatggttcagattatgccaagtgatggacggcaggttattcgcatttggagttgtagttgcaaacatgctttagaattcttttgtacagatgagtttgtaaagagcaaggcatgaagacaacagatgacgatcacaagtgcagatggaatcgtagaaaatattcctagttttctccttttttttgtattgttattacgactgccaataagattgcggccaagaatagctggcttctgactatcagatcagacaattctggaccaaagataataacgtttcggcatcatattagcagcgggtatacccccgaacaacttacgtaaatgctttgcacaggagtaaaattccactcgaaaaaatgtttacaagtacaacatcgctaaagatcgtacggatgtcatggtgcacacatgggctctcatcttagcagaggcagactattggcgtcgtctctttatcctctcgagggcgcccagctgctcattcccttgggcacctgagctttcctcattgttctcggcagctctcttgccgagctcaccaaataccgcagcaggaacgctcttctccgcaatttggacatcgggttcctcatcgtcactctcatcgggcagctcaatgtcctcattgttagcagcctgttgcctgctgctctcgacctgggcctctactccagcactgacaaagttcatcatcctgttagcagaggctggggcagtgcttggtgctgctggtggggcagtagatggtccg

SEQ ID NO: 142214 - DNA, 2065 bp, Zea Mays
ggggtttctggggaccggcttgcttctagagctgaatctcactcacctcgagtataaaaccagccgccttcggatcttctctcccttcttctcgcggggggttcttcgccatttcggagttgcaaattgcaatcccaccagggatttctgtcggctgcttaggtttctccgcgtcgcgagctttgatgagaggatgcactgtgacgcgctggcccatggtgagcttctgatgccaattaggactaaacatgcttcctcgctgcgctcaagtgggagaacaagaaatcagcctagacactagtcatctgctgcaagcagaaaatgcacccttattcacttaagagttccaagggagcaccaattctgccacggccagtcttcgttttcttcatcgcgacatttggtttctatgtatgctatctctccttcaatcagataacgctagagaacaacagagaggggaatagtcgagaagaacaaagggacgatatttgcagaaagccttatgtgccgtatgaggagctcagttatgtgcactttccaaaacctacaagttatagcaggggggagtgctcgtgtactcctgttcggttctttgtaatcgtgtctatgcaaagatcgggaagtggatggtttgagaccttgatgaatagtcaccctaacattagttccaatggcgaaatctttaacagaatggatagaagagaaaatatatcgtctatcttacaaacgcttgatacgctgtataatttggactggctcaccagcgccgctaagaatgagtgcacagctgcatttggactgaagtggatgcttaatcagggaattttggaaaaccctgaagatatagttagttatttgaacaagaagggtgtctccgtgatatttctgttcaggaggaacacattgcgcaggcttgtatctgtgctggccaacgactatgacaaagatgcaaagcagttgaatggaactcacaagtctcatgttcactcaaaagaagaggctgagatattagcaaaattcaaaccacatctggatacgtcgactctaattacaaacatcagaaacatcgagaaggccatcagagattgcttggaccacttcaagagtacgcggcacatgatcctctattatgaggatataatcagcaacagcaatgcattatcccgggtgcaagagttcctcagggtcccggtgaggaggctgatgagccggcaggtgaaaattcacacgaggcctcttccggaccttgtcaagaactgggaggaagttagcagcaaactgaacgggacagagtttgctcacttccttgatggttcagattatgccaagtgatggacggcaggttattcgcatttggagttgtagttgcaaacatgctttagaattcttttgtacagatgagtttgtaaagagcaaggcatgaagacaacagatgacgatcacaagtgcagatggaatcgtagaaaatattcctagttttctccttttttttgtattgttattacgactgccaataagattgcggccaagaatagctggcttctgactatcagatcagacaattctggaccaaagataataacgtttcggcatcatattagcagcgggtatacccccgaacaacttacgtaaatgctttgcacaggagtaaaattccactcgaaaaaatgtttacaagtacaacatcgctaaagatcgtacggatgtcatggtgcacacatgggctctcatcttagcagaggcagactattggcgtcgtctctttatcctctcgagggcgcccagctgctcattcccttgggcacctgagctttcctcattgttctcggcagctctcttgccgagctcaccaaataccgcagcaggaacgctcttctccgcaatttggacatcgggttcctcatcgtcactctcatcgggcagctcaatgtcctcattgttagcagcctgttgcctgctgctctcgacctgggcctctactccagcactgacaaagttcatcatcctgttagcagaggctggggcagtgcttggtgctgctggtggggcagtagatggtccg

SEQ ID NO: 142215 - DNA, 2736 bp, Zea Mays
aatgagatgtacaattcagtaatagatgcattcaaggactttggtcaaacaaatcctcaacttcatcatcttggctaccgagacaaggcttggaatgtgaataagctcgctcacatagctcgcaagcaaggtcttcctgaagtttgtgtaactatacttgataagatgtatggtcatgctactatggaagttcaggaagcatttgtgaagatatgtgaacaagctaaggcttacttagaaatgaaaggagaactagtcagtggtcttaacttaatcaataataccaatttagaatttttccctgtgaagaacaaagcagaaatatttcgtctgagaggtgattttctgttaaaaatgaacgaatgcgagactgcaaatcagtcttattcaaatgccataactctttttaagcatttgcccaaaggatggattagctggggaaattactgtgatatggtttttaaagaaacaaaagatgaggtttggcttgagtatgcagtcagttgttttttccagggcatcaaatatggagtttcaaactcaaggagccatctagctcgaattctctaccttcttagctttgatggacaaaatgaacctgttggaagagctttggataaatatcttgagcagctgcctcactgggtttggctttcatggatacctcagttgttgttgtcgttacagagaagtgaagcccaacactgtaaattggttttgatgaagatagctcaagtttacccgcaggcattgtattattggcttcgtacatacttgatggaacgccgtgatgttgctactaaaactgaaataggaagaaacatgttggctcagcagcgcatgcagcaagctatgatggcaaacaatgcggccaataacttacctgacggaagtgcaagggcatctaatcatgcaggtagtaacatgacttctgacaaccagtctcatcaagcctcccaatcagttggtgctgcaggttctcatgatggtggtaatgtccaaggacaagatccggaacgatctacccctgaaggtggcacaaataccagccatgatcaaggtcaacagagttctacaggtgctgagggctcacaagttccgcttagacgtaatagcggacatgggtgggtaacttctgcagcaagtgcatttgatgctgcaaaagacataatggaagctcttagaagcaaacatactaatctagccaatgagcttgagcttttactgtcagaaattggatcacggtttgttactctgcctgaggaaagacttctagctgtggttaatgctctgcttcatcgctgctacaaatatccaactgcaaccactggcgaggttccacagtctctcaagaaggaactctctggtgtatgtagagcttgcttctcacaagatgctgttaacaagcatgttgattttgtgaaggagtacaagcaagattttgaacgtgatcttgacccagagagcgctactacttttcctgcaacccttgctgaacttacggagagattgaaacactggaagaacattcttcagagtaatgtagaggatcggttcccagcagtattaaaactggaggaagaaagtaaaacacttcgggattttcatgttgttgatattgaactcccagggcagtacttcacagatcaggaaatcgcaccggaccacactgttaagttggacagagttggacctgacattccaattgtccggaggcatggcagtagctttcgacggttgacactcattggttctgatggttcacagcgccattttattgttcagacatcactgactccgaatgctcggagtgatgaaaggatgctgcagctattccgtgtgctaaataaaatgtttgacaaacacaaagaatctaggcggcggcatctggctatccatactccaataattattcctgtttggtctcaggttcggatggttgaggatgatttaatgtatagcacttttcttgaggtgtatgaaattaattgtgcacggcataatagagaagctgactcgcctattacaattttcaaagagcagcttaatcaagccgtttcagggcagctctctcctgaagcaattgtggagctacgtctgcaagcatacaatgagattacaaaaaatattgttaatgataatattttctcccaatatatgcacaagattctgccaactggcaactacctgtggaccttcaagaaacaatttgcaatccaagtggctctctcctgcttcatgtcgtatatgctgcagattggcggcagggctcctaacaaaattctatttgctaaaaatactgggaagatcttccagactgacttccatccagcttatgatccaaatgggatgattgagttcaacgagcttgttccatttaggctgacacgcaacttgcaagctttcttctcgaattttggtgttgaaggtctcattgtgtctgccatgtgctctgctgcccagtcagtggtttctcctaaacaaagccagcacatttggcatcatttggctatgtttttccgagatgaactgttatcttggtcgtggaggcggcctctgggcattccatcagtccctgtcgctgctggaatgatcaacccatcagatttccaacagaaggtggtaaacaatgtggagcatgtcatcagtcgtatcaagtcaatatcgccacattgtctggctgaggaggaagtgtttcttggtgggattaatattgtatcattatggtgcttctga

SEQ ID NO: 142216 - DNA, 990 bp, Zea Mays
gcccgccgccgtagctggtagctaagctacgtgaagaagatggttgggctcctccgtccactctccgccgccgccaccttactcctcgcccccgccacgccactcactggttcctcagtctccgctagttccgtcggcggcaggcggtggagaagcgtgagggcggacgccggcgggggctggctatccgggctgctgggcggcaagggcggcggcgcgtccacggcgatgatggtgacgccgggaaccgtgaaggccggcgaccccgtcctgcacgagcccgcgcaggaggtggcgccgggggacgtgctgtccgagaaggtgcagggcgtcatcgaccggatggtcgacgtcatgcgcagggccccaggcgtcggcctcgccgccccgcagatcggcgtcccgctcaggattattgttctcgaggatacgcaggagtacatcagctatgcacccaagaaggacatcgaagcacaagaccgccgcccctttgatcttctcgtcggtcattatcaatccaaagattaagagcacgagtaaaagaaccgcgctgttctttgagggatgtctcagtgttgatggatacagggcggtcgtggagcggcatctggacgttgaagtttcaggtctggaccggaatgggagcaccatgaaggtacgggcttcaggatggcaagcgcgcatcctccagcatgaatgtgatcatcttgaaggcacgctgtatgttgacaagatggtagcaaggacattcagggtcgtcgagaacttggatttgccccttcccactggatgccctcaactaggtgcaagataatggggatagctttccatttttcctcgtcgaatagatgtgattctctctctctttttgaaaattacaacgtctcatgtacagtattgcattttgcttcccgtctaattgctgtgtttgttctactatccaaccaacattaacatttcatagtttaatactgcatgaccctctgatcc

SEQ ID NO: 142217 - DNA, 1006 bp, Zea Mays
gcccgccgccgtagctggtagctaagctacgtgaagaagatggttgggctcctccgtccactctccgccgccgccaccttactcctcgcccccgccacgccactcactggttcctcagtctccgctagttccgtcggcggcaggcggtggagaagcgtgagggcggacgccggcgggggctggctatccgggctgctgggcggcaagggcggcggcgcgtccacggcgatgatggtgacgccgggaaccgtgaaggccggcgaccccgtcctgcacgagcccgcgcaggaggtggcgccgggggacgtgctgtccgagaaggtgcagggcgtcatcgaccggatggtcgacgtcatgcgcagggccccaggcgtcggcctcgccgccccgcagatcggcgtcccgctcaggattattgttctcgaggatacgcaggagtacatcagctatgcacccaagaaggacatcgaagcacaagaccgccgcccctttgatcttctcgtcattatcaatccaaagattaagagcacgagtaaaagaaccgcgctgttctttgagggatgtctcagtgttgatggatacagggcggtcgtggagcggcatctggacgttgaagtttcaggtctggaccggaatgggagcaccatgaaggtacgggcttcaggatggcaagcgcgcatcctccagcatgaatgtgatcatcttgaaggcacgctgtatgttgacaagatggtagcaaggacattcagggtcgtcgagaacttggatttgccccttcccactggatgccctcaactaggtgcaagataatggggatagctttccatttttcctcgtcgaatagatgtgattctctctctctttttgaaaattacaacgtctcatgtacagtattgcattttgcttcccgtctaattgctgtgtttgttctactatccaaccaacattaacatttcatagtttaatactgcatgaccctctgatccaaacgatggttcgcatttgc

SEQ ID NO: 142218 - DNA, 1121 bp, Zea Mays
gcccgccgccgtagctggtagctaagctacgtgaagaagatggttgggctcctccgtccactctccgccgccgccaccttactcctcgcccccgccacgccactcactggttcctcagtctccgctagttccgtcggcggcaggcggtggagaagcgtgagggcggacgccggcgggggctggctatccgggctgctgggcggcaagggcggcggcgcgtccacggcgatgatggtgacgccgggaaccgtgaaggccggcgaccccgtcctgcacgagcccgcgcaggaggtggcgccgggggacgtgctgtccgagaaggtgcagggcgtcatcgaccggatggtcgacgtcatgcgcagggccccaggcgtcggcctcgccgccccgcagatcggcgtcccgctcaggattattgttctcgaggatacgcaggagtacatcagctatgcacccaagaaggacatcgaagcacaagaccgccgcccctttgatcttctcgtcattatcaatccaaagattaagagcacgagtaaaagaaccgcgctgttctttgagggatgtctcagtgttgatggatacagggcggtcgtggagcggcatctggacgttgaagtttcaggtctggaccggaatgggagcaccatgaaggtacgggcttcaggatggcaagcgcgcatcctccagcatgaatgtgatcatcttgaaggcacgctgtatgttgacaagatggtagcaaggacattcagggtcgtcgagaacttggatttgccccttcccactggatgccctcaactagggttcagtccacaagtacactagtgtgagcaattgtagccatggaggttgagagcctttggagcgatagaccacacgtggcagagaagcttgagcaaagacttgatgccgatagaacaaagcaacagtgaagagcaagtgaagttctgattgatgaaccaataaggacacatgatgacatgaagtggatcatatcattcatgatgttgattgcatgtttctgtaccatcaccattagagaaagagataaaatggaatgcacaaaacatgtataatttgtagaacatttcattttattattcaaaggttgtgtagagaagtaa

SEQ ID NO: 142219 - DNA, 2024 bp, Zea Mays
cgatctgctcctcggtccaggcccaataacgcggcgtggtatcgctttcgcgtctgcgtgcgtgcgtgtgcaggcaggcaggcggctggcctccgtccgcgcatcctcttctggcgaggagctcccccacgcagccgctgctctctccacgtcctctgttccttcccctccccgatctcccccaatccgaccaaaccggcagagccggggggcggcgatggcgctgcgacgggcgctcctcagatcggcagagatctctttcgaacgcaaggctgcaattgagtacattcattctttatcaagggcacagcctgctcgttctctcaatggtgctggcctttgtcctgctagtagatcacttagcacccaggccgccactacgtcaagcacaccacaacctccgcctcccccaccccctccagagaagactcactttggtggcctcaaagacgaggatcgcattttcaccaacctctatggtctgcatgacccttttctgaaaggcgcgatgaagagaggtgactggtataggaccaaggatttggtgatcaagggggcagactggatagttaatgaaatgaagaaatcaggtcttcggggtcgtggaggtgcaggttttccttctggtctcaaatggtcctttatgcccaaggtttcagatggacgcccttcttatcttgtcgttaatgctgatgagagtgagcctggaacttgcaaagatagagaaatcatgcgccatgacccccacaagcttctggaaggatgccttattgctggagttggaatgagggcatcagctgcttacatctacattagaggtgaatacgtgaatgagcgtctcaaccttgagaaagctcggcaggaagcgtatgcagctggacttctgggtaagaatgcttgtggctctggttatgattttgatgtgcatattcattttggtgctggtgcgtacatctgtggtgaagagaccgccctactagagagccttgaagggaagcagggcaaacctaggctgaagccacctttcccagccaatgctgggctctacggctgccccacaactgtgactaatgtagaaactgtggctgtatccccaacaattcttaggcgcggtccagaatggtttgcaagctttgggcgcaagaacaactctggaaccaagctctattgcatctcagggcatgtgaacaaaccttgcaccgtggaagaggaaatgagcatacctctgaaggagttgctcgagaggcactgtggaggtgtgagagggggatgggacaacctgcttgcggtaattcctggcggttcatctgttccccttttgccaaagcacatatgtgatgatgtgttgatggactatgatgcactgaaggctgtgcaatctggattgggtaccgcagctgttatcgtgatggacaaatctacggatgtcgttgacgcgattgctaggctgtcctacttctacaagcatgagagttgtgggcagtgcacgccttgccgagaggggacaccctggctctggatgatcatggagaggctcaaggttggtgacgcgaagctggaggaaattgacatgcttcatgaggtcacgaagcaaatcgaagggcatactatctgtgcgcttggggatgctgcggcatggcctgtgcaggggcttatcaggcacttcaggccagagttggagcggaggatccgcgagcgagctgaaagggagctgttggcggcttctgcataatgtgtcagccatgttgcccctgtactagtttcctgatttcttcctaccgaaataatacaaactgatggagctcctttctgtgtaaggaaatgtagccttcctggtttctttaaaccatcatttatttgatgcactcaagcagctggtgaattttgatggactagataaactttccaaagtagaaacaaactcgagggttgtaccgtgtatgctacataatattattgtggatgtgtatgtctacctgcatgtgtcttcaatgctgagctatgtatggtttgggcgtttggct

SEQ ID NO: 142220 - DNA, 339 bp, Zea Mays
atgatggatccggccttgcttgacgacgtcatacgccggctgctggaggtgaagaatatcaagcctgggaagaacgcgcagttgtcggagtcggagatcaagcagctatgcgctgccgccaaaggagatcttcctgcaccagccccaacctgctggagctcgaggcgcccatcaaaatctgcggtatttgccccccttctcccgtggctcccgagaccgctagcaccccaagacgacgtcttggggaggtcaacggggtatcgcgccgtttggtcttttgccttttgggggtcttgctcatgtcctaaacccgatcttcaagaaccggttgagggctga

SEQ ID NO: 142221 - DNA, 93 bp, Zea Mays
ttttttttatcatcgatcggatggtcctattatatattttgcgtgtatcctccctcaactactgatgctaactcttgaggtatcaatgctaaa

SEQ ID NO: 142222 - DNA, 1954 bp, Zea Mays
atgaaggtgtctaagctagcagttgaagaactagatattggccacgcctttaaagaaagacaagcaagaaagcaaaggtcctggtcacggctaaatgtttcggagctgtctggtcccattctaaatgaaaataaccctgatgctagatgcctctgctggaagttgcttgtacttgttccaccgggtatggaatcccagaccaacagttttgtctcaaaatggttacttagaaagctcatgggttatggaatcggagatattggattggttgtttcttcagcaggcctatcaatttggacagagtggatcagttttccaaatgcatgttgtttgtctgttgttagggccagcgatcagcaagttattgataatgatattgctaacagtacaagctgtatagtatttgtagtgtctgaaagcatttcatgggaaatgcagaaggaacggtttaacagtcttttagcctacataccagatgaatccaatcttccccttctgattttcagtggcgatacatataacgaaggatatgagtatgcgtcaaagtacatcatcaacaggcttggcctcaatggtcttaacagaggaaagatcggtttgtctttggttatttttcttgttgaaaactacacagaagaccatgccaatggtttctttgatgatgacaaactgcgtgagggcctgaagtggctggtaagtagtttgccagtgcagcctgatgtcactcttgtgaagacccatgaattgcttctggaatacttgaatccacaacttgagctgcttaacacccatgttgcacctggagctggtcctggcgattgcatttcagtattcaacaatgctgtcaatcaacttgcagaagagattttggctgcagcaaacacaaactgtagccaatggccagctcccgagattggtcttctggagagaacaagcaatgagaggatatatgcagaaatgtccttgcctagcattggatggtcttcgccatcaaggatccagccactgcttgcagccattaatagctgcaagattccagagttcagttacgatctatcttggctaaaccatggttctcacatgggcaagcagatccaggatcagaagaagttacttgaggagtgcttggcgagatacttgaccgaatcagcccggctgttagatgaaagccaggtggtcaccgaagtgaatgttatggtgcagaattgtgttggccttgaactccgggattcgtcttactatctcgctcccagatgggtggcgatcttccgtcgtatttacaactggaggctagcaaagctctctaccggaaagttctcagaagcttatgttctgactcagcacctgtatcaggctcctgcagcagctggctcaaatggtaccacacaagggcttactgctaacaccgccagcagcgatgctgtggatcacatcatgatgcctgctgtttcaaccggcatcacactagacgaaatcattgagatcagttgtgacctcgatgctgttgatgcgcagcccgtaactctggcaccacgactgcctgtgcatgttcatgaagaacctcaggcacttgctgacaacaacggcgtgcatggagttgatgaaatgtacataccaagaagagtagagttgggagaggtgatgcccatcgagacagacgacaagctttcccagctaagagtagagttgggcgaggtgatgcccatcgagacggacgacaagctttcccggctactggagcagtgcaccaagctgcaggacaggatcgatgagacactttccatatacttttgagccccgtagtaaggctggaagggttttgttacaccatccttccacatttgttgtaacttgtaaaactagattttgtggaagtgaaaactaacactgccaagttaaagcgttcttgtttcgcaggaatgaaatatagaagcgtcatttttcttctcgaatc

SEQ ID NO: 142223 - DNA, 4439 bp, Zea Mays
ttagtagattcacgggttcaatgcagaatcaatcatcagatcataacatttcaaaaaggtcaaggtcacctactttgtcctacgaggatgctgatggcacgaaagctcatgttaatactggtggaaattctagaagactggttgactattcggataccatcaatgatgaaaatgttgaagcctcaaaaaggatgcgatcacctgcatcagagttcacacgcatggtcaagtcaccaccatcagataccagaggcaatatcaggtctgatgcatccttttccaagttcagaaatcaaatacaatcacgcattggtggtgcatgttcaccatcacaacagatgtctcatctttcagactccaatgaactaaacacgttagctatttctccaccaaagccttctacccttagcgctaccagaagaacagggatctcttctttggatgctactgctgatgatcatttgaccccttcaactgaacttgagagggaggaacaagcaaaagccaagcgtctggctcgtttccatgttgaattaagcaggccagtagaaaatactaatgattttgtgaaaacagttaaaagctctgcagataagtccaaacaagccacatcagtgggaagaactcctttgagaacaaatgatgacaccgatgacaatactttggttgacatggattccacagctttggctgcaattgttgggctttgccctgatatgtgcccagaacctgagagggcagagcgtgagagaaaaggagatcttgataggtatgaaagattggacggagacagaaacctaactactgagcttctcgctgttaaaaagataaggctccacataattgcgatgcatgaattatgtgaatacaacaaaggagaaggtttttccgagggttttgatgcacacctcaacattgagcagatgaataaaacatcagttgagctatttcaaatgtatgatgaccataggagagaaggtgttctcttctcaacagaaaaggagtttcggggttattatgcactgctcaagttagacaaacatcctggttacaaggttgaacctgctgagttatctctggatcttgctaagatgtctcgtgaaattagaggcagtccagagatcttgtttgcaagagaagttgcaagagcatgcagaatggggaactttatttccttcttccgtcttgcaaggaaagctacatatttgcaggcctgtttgatgcatgctcattttgcaaagctaaggaggcaagcactcgcttccttgcacagtggtcttcagaatggccaaggcatccctatttcgcaggttgtggtgtggcttgctatggagggcgaggatgttgaaaatctattagaataccatggttttgggttgaggcagtatgaagaactgtacttagtcaaagaaggaccttttcttaacagtgaaagtgatttcccatctggctgttcacagcttgtgcattctaaaaaatcgcagagggtcgttgatgatgtttcttctgggccagattgtgctccaactagcaaagaaaagactgtctttccatatactggtcaaccagttgctggcaaaagagatctatttctaccacagaatgctcctgcgattcctcctgatggcagaatggatttggatccatcatttcctgggcctatttcaatcactcctgacagacagattagcccattgttttcagatcctttctctccaagagctgccagtaaactattcagttcaacacatccaaagcctctctccccaactgaaggtagaaaagacaggttttcatctgtccttactgctgtttctccacgtactggcaagagggacatactgtcaaaaacaccaaaagtagcttcaccaaaagctgaagccaagacaaaattggttaatgaccttatagctgaagaccaggatagtggtgttgctgagatccctcagaaggtagagatgcaaacagacatactgtggtcacaagctaacacgcaaaacgccaatgctctggcagaaccaattatttcacatcctcttgcagatagcatgtctttaaattactccagtatgtatggagcggaagatgacttcagggcacatgtttctggcatcggtgcagatatggatgagggaactccaccagatcatgaatgtctggttattggagctggattgcctattagctcccctttgtcctatcatgaggaatatgaggaccatagtattagtaacagcacaaatgatgattggttaccaattgttatgcccgcaaagaaactaatttctgatgaaaacctgaaagcaatattgaggaaatggaggcagcatgctgctgacaagcgattacttagggagcagaagaatgctcttgctgttgcagcattgtgttctctatcactcggcccaccagttcataaaagtacaacggtgtctaagctagcagtcgaagaactagatattggccacgcctttaaagaaagacaagcaagaaagcaaaggtcctggtcacggctaaatgtttcggagttgtctggtcccattctaaatgaaaataaccctgatgctagatgcctctgctggaagttgcttgtacttgttccaccgggtatggaatcccagaccaacagttttgtctcaaaatggttacttagaaagctcatgggttatggaatcggagatattggattggttgtttcttcagcaggcctatcaatttggacagagtggatcagttttccaaatgcatgttgtttgtctgttgttagggccagcgatcaacaagttattgataatgatattgctaacagtacaagctgtatagtatttgtagtgtctgaaagcatttcatgggaaatgcagaaggaacggtttaacagtcttttagcctgcataccagatgaatccaatcttcctcttctgattttcagtggcgatacatataacgaaggatatgagtatgcgtcaaagtacatcatcaacaggcttggcctcaatggtcttaacagaggaaagatcggttcgtctttggttatttttcttgttgaaaactacacagaagaccatgccaatggtttctttgatgatgacaaactgcgtgagggcctgaagtggctggtaagtagtttgccagtgcagcctgatgtcactcttgtgaagacccatgaattgcttctggaatacttgaatccacaacttgagctgcttaacacccatgttgcacctggagctggtcctggcgattgcatttcagtattcaacaatgctgtcaatcaacttgcagaagagattttggctgcagcaaacgcaaactgtagccaatggccagctcccgagattgatcttctggagagaacaagcaatgagaggatatatgcagaaatgttcttgcctagcattggatggtcttcgccatcaaggatccagccactgcttgcagccattaatagctgcaagattccagagttcagttacgatctatcttggctaaaccatggttctcacatgggcaagcagatccaggatcagaagaagttacttgaggagtgcttggcgagatacttgaccgaatcagcccggctcttagatgaaagccaggtggtcaccgaagtgaatgttatggtgcagaattgtgttggccttgaactccaggattcgtcttactatctcgctcccagatgggtggcgatcttccgtcgtatttacaactggaggctagcaaagctctctaccggaaagttgtcagaagcttatgttctgactcagcacctgtatcaggctcctgcagcagctggctcaaatggtaccacacaagggcttactgctaacaccgccagcagtgatgctgtggatcacatcatgatgcctgctgtttcaaccggcatcacactagacgaaatcatcgagatcagttgtgacctcaatgttgttgatgcgcagcccgtaactctgccaccacgactgcctgtgcatgttcatgaagaacctcaggcacttgctgataccaacggcgtgcttggagttgatgaaatgtacataccaagaagagtagagttgggggaggtgatgcccatctcggacgacaagctttcccggctaagagtagagttgggggaggcgatgcccatcaagacggacgacaagctttcacggctactggagcagtgcaccaagctgcaggacaggatcgatgagacactttccatatacttttgagccccgtagtaaggctggaagggttttgttacaccatccttccacatttgttgtaacttgtaaaactagattttgtggaagtgaaaactaacactgccaagttaaagcgttcttgtttggcaggaatgaaatatagaagcgtcatttttcttctcgaatcatgtcattgtcagtaaagtacctaaagcacgatttgggtcagaccagcccggtgcgagcataact

SEQ ID NO: 142224 - DNA, 3651 bp, Zea Mays
atggtcaagtcaccaccatcggataccagaggcaatatcaggtcatcatctgtagattttggcagcaacaactcagtccagaatcttcatgcatatgctgatgtccagaagtctgatgcatccttttccaagttcagaaatcaaatacaatcacgcattggtggtgcatgttcaccatcacaacagatgtctcatctttcagactccaatgaactaaacacgttagctatttctccaccaaagccttctatccttagtgctaccagaagaacagggatctcttctttggatgctactgatgatgatcatttgaccccttcaactgaacttgagagggaggaacaagcaaaagccaagcggctggctcgtttccacgttgaattaagcaggccagtacaaaatactaatgattttgtgaaaacagttaaaagctctgcagataagtccaaacaagccacatcagtgggaagaactcctttgagaacaaatgatgacaccgatgacaatactttggttgacatggattccacagctttggctgcaatagttgggctttgccctgatatgtgcccagaacctgagagggcagagcgtgagagaaaaggagatcttgataggtatgaaagattggacggagacagaaacctaactactgagcttctcgctgttaaaaagctaaggaggcaagcactcgcttccttgcacagtggtcttcagaatggccaaggcatccctatttcgcaggttgtggtgtggcttgctatggaggacgaggatgttgaaaatctattagaataccatggttttgggttgaggcagtatgaagaactgtacttagtcaaagaaggaccttttcttaacagtgaaagtgatttcccatctggctgttcacatcttgtgcattctaaaaaatcgcagagggtcgttgatgatgtttcttctgggccagattgtgctccaactagcaaagaaaagactgtctttccatatactggtcaaccagttgctggcaaaagagatctatttctaccacagaatgctcctgcgattcctcctgatggcagaatggatttggatccatcatttcctgggcctatttcaatcactcctgacagacagattagcccattgttttcagatcctttctctccaagagctgccagtaaactattcagttcaacacatccaaagcctctctccccaactgatggtagaaaagacaggttttcatctgtccttactgctgtttctccacgtactggcaagagggacatactgtcaaaaacaccaaaagtagcttcaccaaaagctgaaggcaagaccaaattggttaatgaccttatagctgaagaccaggatagtggtgttgctgagatccctcagaaggtagagatgcaaacagacatactgtggtcacaagctaacacgcaaaacgccaatgctctggcagaaccaattatttcacatcctcttgcagatagcatgtctttaaattactccagtatgtatggagcggaagatgacttcagggcacatgtttctggcatcggtgcagatatggatgagggaactccaccagatcatgaatgtctggttattggagctggattgcctattagctcccctttgtcctatcatgaggaatatgaggatcatagtattagtaacggcacaaatgatgattggttaccaattgttatgcccgcaaagaaactaatttctgatgaaaacctgaaagcaatactgaggaaatggaggcagcatgctgctgacaagcgattacttagggagcagaagaatgctcttgctgttgcagcattgtgttctctatcacttggcccaccagttcataaaagtacaacggtgtctaagctagcagtcgaagaactagatattggccacgcctttaaagaaagacaagcaagaaagcaaaggtcctggtcacggctaaatgtttcggagttgtctggtcccattctaaatgaaaataaccctgatgctagatgcctctgctggaagttgcttgtacttgttccaccgggtatggaatcccagaccaacagttttgtctcaaaatggttacttagaaagctcatgggttatggaatcggagatattggattggttgtttcttcagcaggcctatcaatttggacagagtggatcagttttccaaatgcatgttgtttgtctgttgttagggccagcgatcagcaagttattgataatgatattgctaacagtacaagttgtatagtatttgtagtgtctgaaagcatttcatgggaaatgcagaaggaacggtttaacagtcttttagcctacataccagatgaatccaatcttccccttctgattttcagtggcgatacatataacgaaggatatgagtatgcgtcaaagtacatcatcaacatgcttggcctcaatggtcttaacagaggaaagatcggtttgtctttggttatttttcttgttgaaaactacacagaagaccatgccaatggtttctttgatgatgacaaactgcgtgagggcctgaagtggctggtaagtagtttgccagtgcagcctgatgtcactcttgtgaagacccatgaattgcttctggaatacttgaatccacaacttgagctgcttaacacccatgttgcacctggagctggtcctggcgattgcatttcagtattcaacaatgctgtcaatcaacttgcagaagagattttggctgcagcaaacgcaaaccgtagccaatggccagctcccgagattgatcttctggagagaacaagcaatgagaggatatatgcagaaatgttcttgcctagcattggatggtcttcgccatcaaggatccagccactgcttgcagccattaatagctgcaagattccagagttcagttacgatctatcttggctaaaccatggttctcacatgggcaagcagatccaggatcagaagaagttacttgaggagtgcttggcgagatacttgaccgaatcagcccggctgttagatgaaagccaggtggtcaccgaagtgaatgttatggtgcagaattgtgttggccttgaactccgggattcgtcttactatctcgctcccagatgggtggcgatcttccgtcgtatttacaactggaggctagcaaagctctctaccggaaagttctccgaagcttatgttctgactcagcacctgtatcaggctcctgcagcagctggctcaaatggtaccacacaagggcttactgctaacaccgccagcagcgatgctgtggatcacatcatgatgcctgctgtttcaaccggcatcacactagacgaaatcattgagatcagttgtgacctcgatgctgttgatgcgcagcccgtaactctggcaccacgactgcctgtgcatgttcatgaagaacctcaggcacttgctgacaacaacggcgtgcatggagttgatgaaatgtacataccaagaagagtagagttgggagaggtgatgcccatcgagacagacgacaagctttcccagctaagagtagagttgggcgaggtgatgcccatcgagacggacgacaagctttcccggctactggagcagtgcaccaagctgcaggacaggatcgatgagacactttccatatacttttga

SEQ ID NO: 142225 - DNA, 1801 bp, Zea Mays
tggcgcatgtgccgtcagtcacctactgatgatatggatcatcgtctaagtatagcataggcgcacagggcgtcgtcgacgccgtccgtccgtccctcgacaccaacctcgcccttcgcgcgcgcgcgtcccgcctcctcccttgccaactttatcctcccctgcccaaccaccccacaaacacctctggcgcgcggtgggggcgtggcgccccttcccacgtctgccaccacccccggtcgtcgggtccggtccggtcaccatggcgagggcctgctgcaggatggctgcagcaccagcagccgccctcctgctcctgctcgtggccgccgcgtcggccatccgggtggacgtggtccggatatcatcatcgtcgtccgcgccgccgcagccgccgtcgcccccggcgttccgcgaggcgcccgcgttccgcaacggggacgagtgcccgccccgtggctcccccgacggccacgtcgacgtcgccatgacgctggacgccaactacctgcgcggcaccatggcggccgtcttctccatcctgcagcacacggcgtgcccggagaacgtggcgttccacttcctagccgccgcagcggacccggactcggactcggacccggacccgctggcggcgatccgcgccacgttcccgtaccttgacccgagcgtgcaccggttcgacccctcccgggtgcgcggccgcatctcccgctccgtgcgccacgcgctggaccagccactcaactacgcgcgcatctacctggccgacacgctcccggccgtcgtgcgccgggtcatctacctggactccgacgtggtggtggtggacgacgtgcgcaagctctggtccgtggacctgggcgagcgccacgtggtggcggcgcccgagtactgccacgccaacttcaccaagtacttcaccgacgccttctggtccgaccgggagctgcgcgccgccttccgggaccgccgcccctgctacttcaacacgggcgtgatggtcatggacgtggcgcgctggcggcggggagggtacacccggcgggtggaggagtggatggcggtgcagaagcggaagcggatctaccacctggggtcgctgcctccgttcctgctggtgctcgccggcgacatcaggcccgtggaccaccgctggaaccagcacggcctgggcggcgacaacgtcgagggcaggtgccggagcctgcacccgggccccatcagcctgctgcactggagcggcaagggcaagccctggctgcggctcgactcccggaagccctgcaccgtcgactacctctgggcgccctacgacctctacaaggccgcggccaccgcgctggaggagtagtagtgacccgtccgtccatgctaagcaagctacaccggaatgcgtcttggcggccatgcatgggtcaacgatcgagatcgacccggggcacgacggcggccgacggcggcgagcagggagacgatcgatccaagaggaggtgtgtccgtgcgtacgtgtgtgccgtgtgcacacggcagcgagcagctagggcatatgcatcatttcagaagagaactagctactccgatcaagatgagcgacgaaggattgtacgtatattgctgagaggagatcgaggagacggtgagttgcattggcggaagatcgatgcatgcgtggatgatcagccaatcgtacgtagtacgtgtgtaaaaggtcggccggagggaataatcgtgcatgtctcgatcgagacacctcactcgctcgctcttcctctcgatcgtacgtcttcattgggtttgt

SEQ ID NO: 142226 - DNA, 887 bp, Zea Mays
ccggccatcagccgtaacatagcggcgagatgtccttcttgttccgtaaaagcgcgcccgtagccgcaggagatcgcgcgctccgtcaaggacccccctcgtcgccctcgacaccatgaccggcgcggcggcgcgaagttataaagttaatcatgacagtgagatgacacttggtcttacttgttcaccacatgctcttgaggatgctgagaaaaacatacttacgtttaggcatacacttgctggtgaagtggaaccaaatcaagagcaggttctgcagatagcccttgagatttgcaaggagggtgttatttccttctttgttcagaatcttccttccttgggttgggaggatttgctaaccaaacatgaagatcaagtctctgaattcctgagctcaaattatgaacagggtacaaaaatgcgatgctttaaggcacttcgctgcatgccagtttcgttcagagtttctgttagaggccccaaatgctcaatagtgaagagtttcattttcgaagttcgttacttaaacattatggtgggtcttctgaaggattcaaccaaaaatatcaggatatgttccttgcacattttgaaggtatttgttgccaatccaaacaaacctcgagagattatctcaggttttggctgacaatcacagagaactgttgaagctactccacaatctccccactagcaaaggtattactactgtattgcctaattctaacattttaattatcaaagaaatcgagaagcttgcgcggatgtcagtataaaccctcaggaaattcgaacatagctccttgatgttgatgttcaggaaccctttctcacctcaaagttctgaagacatcctgtgtaatgtgctgccctgtatggagctt

SEQ ID NO: 142227 - DNA, 521 bp, Zea Mays
gcgttacgtttgcacctggataaaataggctggataaacggatacgctacaagactagtgttcttccgtggaggtgggagaactggagaaacatcaagccgccaaacgaaatgagcatgatttaatgcaatgaaccacaatttccgcctggtttgacagttttgtgcaccacgggccaaacgaaatgagcgtgatttacagcaatgaaccacaatttccgcctgttttgacagttttgtgcaccacagaccccttacgttacgtgcatgttgatgaacagagcatttttgaactaaataatttacaaggccagcttgcttctattgaaaggggacacaaaagacgaaaggaatggagtaactaaccaaaacagtgacagtgctgattttcaagttactgccacttcacacccacaaatacaaacagaaaattgatgcgaaaatgtagtcgaattgttatttggccgtattattttgcaagcgaagaggacttcgcagtctcgacggtatgacttccatgac

SEQ ID NO: 142228 - DNA, 1648 bp, Zea Mays
agctgctcttgcctcttggcccgatcatttcatttccccacctctctaaaaccctcgctcttgcccgctgttttacacctaaaagaaaggtcctcgccgtcgagccgccggctcccatctcccgcgccgtcgccgacgaggacacaccagacgcctcgctgatggccttggctcgcctcggacggtctcttgccggccgcctccaccgttctatctaccgtccaccggcgcccacagactaccatgcctccgtttcccgacccttcgctccgacccacacaggcgtatgcgtacgaggttttgcaagcttgacgtacaatgccagcagcatgattggccacaatctcgaggggccgttgccagtccacattgtgaaggttctggatctcgtagtacatatgaatcatgctagaccgatgtcaacagcagcagcatcaaaggtgcctgttggagcccggaaggttggtctgaaggttgccatgatgagtcctggtttcgtatatgagccgtacagcccacgggaacgcattcccttctggaaaagatggtttacactaagtggctggagaaggacaaaggaggacatcattttggagatgaagaacgcatatgctgtttcaaggctgaggaagaaaactgggtataccaaaaatcaattctacgatcaagcattaaaaatatacaaggaggttaacactttgatggcacatggagacacatcatcgcttcggaaaattctgacagagaggatgcattctactataaaaaatgaactaaagagaagacagtccatgtggaattctgtacactgggaactggtggagcctgctgttagtatcagaactttgagggctcgcatgattggcctcgataagaatgacctggataaagcttttatacagcttacacttgagtttgttaccaaacagaaatttgaagcctataattcaaagggtgcagttgtgtctggagacaagtcgaaggaggtacttgtgaaagacatttgggtgtttgagaggtccctttttcaccccggagcatattggcgtgtatgcggaagaattacactgtaaccatatctgttttggtgtccacgttcaatttctcaccctggagctgaacaagagctagttcaataaaattttgccctgaactcctttttttttcatccggttctaactgatgcctaacagggtctatgcagtgatgtagtatttatgcctttcttctttgtgttttttattagcagaaaatacaggttttctatttatgcttttgttagagaactagctcttggagagggggcatattgaccccatttggaagggtttgcatctcagcagcagcaggtatcagaattgagaatactgcctaatgtgctcgacaagtaaaagctggatctcttttgtctatggcactttcatgctattcatacgcggtcttctcctgcattggcattgcaaatctccgtttaattaaatttctggtggttatagtaaggctacaggaaaccttccatggccaggcacctctgtgtaactgtcacgtgacctggctctcactattctgaacattcatcttgtgctgactgctgaacgcctgggctctgttcagcgactgatgtaacacatcgtattttggagaaggc

SEQ ID NO: 142229 - DNA, 1565 bp, Zea Mays
agctgctcttgcctcttggcccgatcatttcatttccccacctctctaaaaccctcgctcttgcccgctgttttacacctaaaagaaaggtcctcgccgtcgagccgccggctcccatctcccgcgccgtcgccgacgaggacacaccagacgcctcgctgatggccttggctcgcctcggacggtctcttgccggccgcctccaccgttctatctaccgtccaccggcgcccacagactaccatgcctccgtttcccgacccttcgctccgacccacacaggcgtatgcgtacgaggttttgcaagcttgacgtacaatgccagcagcatgattggccacaatctcgaggggccgttgccagtccacattgtgaaggttctggatctcgtagtacatatgaatcatgctagaccgatgtcaacagcagcagcatcaaaggtgcctgttggagcccggaagatggtttacactaagtggctggagaaggacaaaggaggacatcattttggagatgaagaacgcatatgctgtttcaaggctgaggaagaaaactgggtataccaaaaatcaattctacgatcaagcattaaaaatatacaaggaggttaacactttgatggcacatggagacacatcatcgcttcggaaaattctgacagagaggatgcattctactataaaaaatgaactaaagagaagacagtccatgtggaattctgtacactgggaactggtggagcctgctgttagtatcagaactttgagggctcgcatgattggcctcgataagaatgacctggataaagcttttatacagcttacacttgagtttgttaccaaacagaaatttgaagcctataattcaaagggtgcagttgtgtctggagacaagtcgaaggaggtacttgtgaaagacatttgggtgtttgagaggtccctttttcaccccggagcatattggcgtgtatgcggaagaattacactgtaaccatatctgttttggtgtccacgttcaatttctcaccctggagctgaacaagagctagttcaataaaattttgccctgaactcctttttttttcatccggttctaactgatgcctaacagggtctatgcagtgatgtagtatttatgcctttcttctttgtgttttttattagcagaaaatacaggttttctatttatgcttttgttagagaactagctcttggagagggggcatattgaccccatttggaagggtttgcatctcagcagcagcaggtatcagaattgagaatactgcctaatgtgctcgacaagtaaaagctggatctcttttgtctatggcactttcatgctattcatacgcggtcttctcctgcattggcattgcaaatctccgtttaattaaatttctggtggttatagtaaggctacaggaaaccttccatggccaggcacctctgtgtaactgtcacgtgacctggctctcactattctgaacattcatcttgtgctgactgctgaacgcctgggctctgttcagcgactgatgtaacacatcgtattttggagaaggc

SEQ ID NO: 142230 - DNA, 844 bp, Zea Mays
taaaaacctcatctaaatttgtgatttttcttccttttttttagatgaggtgacttatattagatcaagaatagcatgcatattacataacaggaacctggtacacacaaaatctacaatggaaaacactggtacacacataatgtacgataaaaaaacatggctcccaacaggcagagcttcatctccaatccaatccaccatcgccagacatgaccggaggaaacataactcaaatctgcaccgatgaggaggggccagtaatggccgttacacttttagcagtcaccaaggggtgcgttaggaagatgaatggttcgggtgacctcgccgagccgggcatagagaaatccgaccccgtcaagcacgtcgacggctggctcgggaaggagaaccggcggcgcctcccatgggcacatcatcggcccggaggaagaagacacggtctagagccgctgctaaccccaccggcgaactcctatagatctactaataacctaggcagctaagctgccgcccgacaactgccgccaccattccatgcgacttgcctgcccgctactgcaagacgaatgagctctcgagcagtccatgcgtatccacgcaagaagtttccaaactccgttgcatccaaaatccccccttcaactgcatcttctggtaagcaaaggatcaaccctgcgtacgcctgacgcttactagaagcgtacaaaccacaaagtatcttccgatccaagcaagcagcaatctaaactagcacaagcagtggtatgctggtatgaccggtgcaactccgtcaccgatctgttagctgatagcctgatacgccatcatgaacatacat

SEQ ID NO: 142231 - DNA, 1976 bp, Zea Mays
gtcccgcaacaattacagagagaagcagggttgcctagggttttagagcaaaggcggggtctccgcggcggcgacggcgagccatggagaacacgaagctctcgtcggcgctattcgccgggacccacttcgaccgcaagcgcttcgccgccgacttcgcccggtttcgtaaaggcccggctctcccatccgccgccaccccctccgcaccgtccccggagaagaagcggaagcgcaagagcggcaaggcaaaggcgaagaagaataagaagagagcccaggatgcggcggccgccgcctcgtcggattttgtggaggggttcagcgtgttcaagggattggctgataataatgcggagctgcgttctgagaaggtggatatgaggaaagatgatgattcggtggctgtgaggagacggaaagagattgagagggaattcgagagagctgcagttcttcgtaagaggtttgatatccacattgccgggcaaaatgctccagcaccacttgagagctttgaagaattgatttcaaggtatggttgtgattcttatttggttggaaacttgtcaaaacttggttttcaagaacctacaccaattcaaaggcaggccatgcccattcttctttcgggtagggaatgctttgcgtgtgcacctactggttctggcaagacattggctttcttgtttccacttcttatgaaaattaagccaggatcaaaaggtggtgttaaagccgtgattctttgcccaacaagggaattggctgcacaaactgtgagagaatgcaagaagttggttaaggggaggaagtactatattaaattgatgaccaaagagctgtccaaatcagggaatttcaaagatatgcactgtgatatccttgtttccacccctcttcgtttggaccatgctgtgaagaaaagagaccttgatttaagtagtgtggaataccttgtcttggatgaatctgataaactttttgagcttggatttgttgaagtggttgattcagttgtagaagcctgttccaatccttcaataattcggtctctgttcagtgccactttgcccgattcaattgagactcttgcacgcactataatgcatgatgccattcgagtcattgtcggcagaaagaattcggcctcttcactgattaagcaaaagttgatttttgctggaactgagaggggaaagttgctaactcttcgccaaaactttcaagagtctctcaatcctccagtattgatttttgtccaaagcaaagagagggccaaagagctttacaaagaactggcatttgatgacattagagttgatgtaattcatgcagatctcagtgagcagcagcgtcaagatgctgttgacaatttgagagctggaaagacctgggtactgatagcaacggaagtcattgcccggggaatggacttcaaaggtgtcgcctctgtgataaactacgattttccggagtcggctgctgcctatattcacaggatagggcgatccggaagagccggtaggtccggggaggctatcacgttcttcacagaggaggacaagccattcttgaggaatatcgccaacgtgttggtatcttcaggctgtgaagtgccttcctggataatggcactgccaaagctcaagcgaaagaagcacagagtggatagggacccaatctcctacctacctgacgaagtttgagagcggcttggtaagatgctctatttatttatttttgtggggagggggggatatataacacaggctgtccagagtggtactttaaccatgcacttccgagaggtggcacgttggcttcagttttccctgtttgagcagtgcaccgatcagtttgtttagccacaacccaagacgagggatcagtatatctttgttaattggagtacgttacagtttgtgtggacgattggtggtgaatccacagagtagagcagctcgtttctgttt

SEQ ID NO: 142232 - DNA, 2044 bp, Zea Mays
aagcagggttgcctagggttttagagcaaaggcggggtctccgcggcggcgacggcgagccatggagaacacgaagctctcgtcggcgctattcgccgggacccacttcgaccgcaagcgcttcgccgccgacttcgcccggtttcgtaaaggcccggctctcccatccgccgccaccccctccgcaccgtccccggagaagaagcggaagcgcaagagcggcaaggcaaaggcgaagaagaataagaagagagcccaggatgcggcggccgccgcctcgtcggattttgtggaggggttcagcgtgttcaagggattggctgataataatgcggagctgcgttctgagaaggtggatatgaggaaagatgatgattcggtggctgtgaggagacggaaagagattgagagggaattcgagagagctgcagttcttcgtaagaggtttgatatccacattgccgggcaaaatgctccagcaccacttgagagctttgaagaattgatttcaaggtatggttgtgattcttatttggttggaaacttgtcaaaacttggttttcaagaacctacaccaattcaaaggcaggccatgcccattcttctttcgggtagggaatgctttgcgtgtgcacctactggttctggcaagacattggctttcttgtttccacttcttatgaaaattaaggatcaaaaggtggtgttaaagccgtgattctttgcccaacaagggaattggctgcacaaactgtgagagaatgcaagaagttggttaaggggaggaagtactatattaaattgatgaccaaagagctgtccaaatcagggaatttcaaagatatgcactgtgatatccttgtttccacccctcttcgtttggaccatgctgtgaagaaaagagaccttgatttaagtagtgtggaataccttgtcttggatgaatctgataaactttttgagcttggatttgttgaagtggttgattcagttgtagaagcctgttccaatccttcaataattcggtctctgttcagtgccactttgcccgattcaattgagactcttgcacgcactataatgcatgatgccattcgagtcattgtcggcagaaagaattcggcctcttcactgattaagcaaaagttgatttttgctggaactgagaggggaaagttgctaactcttcgccaaaactttcaagagtctctcaatcctccagtattgatttttgtccaaagcaaagagagggccaaagagctttacaaagaactggcatttgatgacattagagttgatgtaattcatgcagatctcagtgagcagcagcgtcaagatgctgttgacaatttgagagctggaaagacctgggtactgatagcaacggaagtcattgcccggggaatggacttcaaaggtgtcgcctctgtgataaactacgattttccggagtcggctgctgcctatattcacaggatagggcgatccggaagagccggtaggtccggggaggctatcacgttcttcacagaggaggacaagccattcttgaggaatatcgccaacgtgttggtatcttcaggctgtgaagtgccttcctggataatggcactgccaaagctcaagcgaaagaagcacagagtggatagggacccaatctcctacctacctgacgaagtttgagagcggcttggtaagatgctctatttatttatttttgtggggagggggggatatataacacaggctgtccagagtggtactttaaccatgcacttccgagaggtggcacgttggcttcagttttccctgtttgagcagtgcaccgatcagtttgtttagccacaacccaagacgagggatcagtatatctttgttaattggagtacgttacagtttgtgtggacgattggtggtgaatccacagagtagagcagctcgtttctgtttggcctagcgtagtcagattgcaattagggtccgtttggttgggctgtggctgtgaaaaaagttgttgtgggctgtgagctgtggaaaaagctgc

SEQ ID NO: 142233 - DNA, 315 bp, Zea Mays
ctttttaatattaattaaaatttatcattgtacatcactactaatgtaagattaacacaatcatttgtttatgatataaatatttttaacattttaaatggtgtacttctgtttttagtatattatttaatgtttaaaatcacttgtaattagcgagaggacggaatcaagcttaagcatgtggggtttacaatgcaccaagggccagacggattattcagtactattaaacaaaatgtaataaataaatcagtcgcaaaagcaaaaacaaatcaagatgagaaataaatttggacggacaaatcagcggcataa

SEQ ID NO: 142234 - DNA, 279 bp, Zea Mays
atggcggcaggtggccttggcatcatgatcgctttacctggagcgttgaaggcactcactagcagatgcgtggaggcagctgcaccgaaattcctagggacgtggatgagcttccttctgctatccgttcttccatcccctacgatgtcagctataaggatacacagctgcaccgaaattcctagggacgtggatgagcttccttctgctatccgttcttccatcccctacgatgtcacctatgaggaggaagaatgttggtcaaagatctatgactag

SEQ ID NO: 142235 - DNA, 1634 bp, Zea Mays
atggcggcaggtggccttggcatcatgatcgctttacctggagcgttgaaggcactcactagcagatgcgtggaggcagctgcaccgaaattcctagggacgtggatgagcttccttctgctatccgttcttccatcccctacgatgtcagctataaggatacacagctgcaccgaaattcctagggacgtggatgagcttccttctgctatccgttcttccatcccctacgatgtcacctatgaggaggaagaatgttggtcaaagatctatgactagaaatgatggagaggccactattgttgcatcgtcagtgcgtggtcagagaggggaagattttggcatggtggatcgtcatcgtctccaactgcaagtttaggaatcatgagaaaaactgaaagtagtgtagctatatgtacttagttatatacaaggattgagggaggtcgtgccttaagtgctccagatcaaattgatgttgcctcccctttcacaacaagccaccaaacgatgatggctttcttggtccgggcgttgccttaagtgctccagatcaattttttggttgttcctttgttccttagtaattatattcttctcttttctattacagtgtgcttatttgcaaactaggtatacaaagaaagtaaaaacatgcatgtatcaggtaattactacagaaaatttatcaaccccaactgttacaactttaaattaaatagatttatgttcctgtcaatccacaacatatgctgcagaaaatgtacatgtttatcatctattctattcagcttattttctcttaaaaatatatctagaatactgctattatattatgcgcgcggtggcgagcgcaagtgactagttaatgttcatccaaatgcagcagctctctttgctgcctcggtggtgacaactattgaagatggcgctaatactttttttctggacatacttatggctgcatggagccatggacagtccctctccatccttgctcctactctggttggagcagttcccaaacgtttggttagaaagagaacagtccaggaggctctgcaacattcactttggattggtgacatccaaggacagttgtcggtcttaagcgattttctctggctttgggatgtgctacatggcttttaacttcaaccaggagtggcggatcaccactcctggagtctgactgcttcggggtcttattcctctagatcggcctaccaggcctttttcatgggggcgataagttttgacccggctagcgaattggcacagctgggcccctccgagatgtcgtttcttcatgtggttggctgctttagaaaggtgttagactgcagatagactagcccgtagaggattggatcatccagaatgttgtgtgttgtgcgatcaggaggaggaagatatcaaccatctgttaattaggtgtcttctcaaggacggtctggtttgaagtgcttaacctgattcatctcccacaattgagtcctgggccagaggatcacctgctgcaggattggtggcgagaggtggagagtagggtgccaaagattcaaaggaagggcataaactctttagttatcgtagtagcttggtgtatttgaaaagtgttcctgttgctgttc

SEQ ID NO: 142236 - DNA, 1920 bp, Zea Mays
attgaagccatcactggatatgtgtgtccatctccatcatcacaaacaagagccacgcagtcggcacacacacagagacaagtcactgtctcgaagtgtcggtttcgaactcgaacagggcaggtgctcgccgtccctcttttactagccttcggaaagcgcggcctgtgtctccggcctttgccacttccacagggagtccggggccatgcagagctccgtaaagctcgcggtgcttgctcttctgctagcggcagcagctcaccacggtctgctgccgctgccgacggcgcgatgctactggctcaacccggagatctacgacgccggcgggctgagccgccgcgcgttcccggacggcttcgtcttcgggacggccgcgtcggcgtaccaggtcgaggggatggccaagcacggcgggcggggccccagcatctgggacgccttcatagaggttcccgggaccatccctaacaatgccaccgctgacgtgacggtcgacgagtatcatcggtacaaggaagatgtgaacataatgaagaacatgggctttgatgcgtaccgattttcgatctcttggtcgaggattttcccagatggaactggcaaggtaaaccaggaaggagtggattactacaacaggctcatagattacatgctccagcaaggtatcgcgccgtatgcaaatctctaccattatgacctcccattggcactccatgaacagtacctgggctggcttagcccaaagattgtggaggcgtttgcagactacgccgagttctgcttccacgcgttcggagacagggtgaagaactggtttaccttcaacgagccgaggtgcgtcgctgctctgggctacgacaatggcttgcacgcaccgggaaggtgttccgggtgccccgccggaggcaactccaccacggagccgtaccttgtcgcacaccatctcatcctttctcatgcagctgctgtcaggcgataccgcgacaagtatcagcttcaccagaaggggaagattggaattctcctggatttcgtgtggtacgaacctttcagcgacagcaatgcggaccaggctgcagcacagcgagccagggacttccacctaggctggttccttgaccccattgtacatggacggtacccgtactcgatgcaagagattgccaaagacaggctaccgttgttcagcgatgaagaagccaggatggtgaaaggctctatagactatgttggcatcaaccactacacttctttctacatgaaggaccctgggacatggaacctgacaccagtcagctaccaggatgattggcatgttggttttgtctacgaacgaaatggagttcctattggcgctcacgcaaactcctactggctgtacattgtgccgtggggcatcaacaaggctgtcagctatgtcaaggaaacttacaaaaatcctacaatgatccttgctgaaaacggaatggaccaacctggtgatgtcagtattactcagggtgtgcatgacacagtaagaatccgttattacagagactacataactgagctcaagaaggcaatagatgatggtgccagagtcattgggtactttgcgtggtcgctgcttgacaacttcgagtggaggcttgggtacacttcgcggtttggcttggtgtacgtggactacaagactctgaagaggtaccccaaggattcagctttctggttcaagcatatgctgtccaagaaaaggagctagagaattgcagacaagaggaccactggcttcacgtgtcatacaaaagttcactctgcaaatcctcttagtatgtcagatttagcttaaggaaccgtgcagacaattgagtctcaaggctcgacatctctagcttcgttaattgttgcaaggcaataaattggtatcttcgaaaa

SEQ ID NO: 142237 - DNA, 2334 bp, Zea Mays
caacacaaagcagtcaaacaatttcaccggcgggcggcggcggccaccagcgcgtcgccgcgacgttagcgcttgatccggcggcggtgactcagcccctttctctcccccaacgctcaaatgccaccgcgcgccttgcccactacctcaacacccgcatctaggcgcgtcgtctacgtcctcctcgcggcgctcgccacagcgccgttcctgctcctcctcctctacggtggcgcctccccgtctgcgctctgccccacctcctaccgcactccccgccgcctcccgtacccgtccgtgctctggtccaaggtgcccccgctcccggcgctctccacctcgccgcacccggacctccgcggctctcgctggatcgtcttcaccgcgtcgccgcacgccccgcggcaccgcccgctgcgcgcggtccccgggtggcaggtcctcgccgtcgccgacgaggctacccccgcggactggtcccacccaggcgccgtgctgctcacgctcaccgaccagggccgccttggattccgctccgtcgctttccttccggcccggggcccggcgcgcaaggcagcggcgtacctcttcgccgtacagcgcggggcgcgggtcatctacgacgccgacgcgcgcaacgccgtcctgggcgggaacctcaccaggcacttcgatgtggatctggaccagcgccacggaggcgccgtgctgctgcagtacagccacgccaatcctaaccggacgatcgtgaacccgttcgtgcactttgggcagccatcgatctggccgcgtgggctgccgctggagaaggccggggagctggatgctgaggagttctacactgagatattcagtggtggccaattcatgcagcaagggatgtgtaatggccttccagatgttgattcggtgttctacttcactcggaagtcattggagatggaggcatttgatttccagtttgacgcggatgcacccaaggtcgcgctgccgcagggcatgatgacaccagtcaactctgttaacacattgttccactcgccggcgttctgggggcttgcgttgccagtgtcagtgagcccaatggcatcagatgtcatacgcggatactgggctcagaggatactatgggagattggtggctacctagttgtctacccaccaactgtacaccgcatagataacgtgcgtggtcacccatttgatgaagagaaggatctccatgtcaatgtagggaagctgataaagttcctaatggagtggcgatccagtaagctgacactattcgagcggattcttgatctaagctatgcgatgacagaggagggattctggagtgagaaggatttgcatttcatgactgcttggctgcaagatctggttgctatcgggtatcgacagccacggttgatgtcattggagattgaccggcccagagcaaccattggacatggtgacaagaaggggtttggtcccaagaagctgccttcagtgcatcttggggttgaagagattggggaagtaagcactgatattggcaatctaataaaatggaggaagcattttggtgatattgtgctcatagtgcattgcaccgaacttgtggaccgaactgcattagagtggaggctgctttatggtcggatatttcgagcagttgttgttctttcagagcaaagcaattctgatcttgctgtggaattcagcaacttgacacaagcctacaagtacttgccgaaggtgtttgatcggtttggaggtgcccaaggatttctgttccttcaagatcgtatggtcttcaattactggaacctcttgaatgctgataaggctaagctctggataaccaaccaggtgaaggaatcttggtcggatgtgcctctacatggtaacaacattgagtggtttgtgaaccaaggggatatgattaaaaaggcggtcagcaattttccatctcaatatcaagataactacaggagaagtgtaggtgaaaataatctgattcgttgcagcagtgagatattttacgtacctcaacggtacacccgtgatttctcagatcttgtaaaagttattgggagcttagacattcatcacagttttgcagtccccatgttattccttgcgatcgattcaccgagcaactttgagtccaaagctttgacaaaacttgtctacagggcagatcttccatcagatacaactctttcaacaatttatactactgaagcacatgcagtgtaccctgtgaaggttcagaacgagatggattttgtaaaactgataagggctatggctttaggagatccatttcttatggaattggtctgatct

SEQ ID NO: 142238 - DNA, 1394 bp, Zea Mays
ccaagctgcagtacagactcgcgagtcgcgacccgctcctctcagctctcacgcacgactcttcacgtgtagtgtattgtatatagtagaaccaaccaacagtgggagtgggacacacccgacagtgacaccaaccacgaggtacatcccctcctgcgctgcccgctgcccgcctctccttcagatcgccgcctcgcagtcgcacagtcgcactcgctccacttccattcccagcgaccccgcccgcccggaggcgtcacacctgcacgctgcggcagcagccaagcctctctcgtgcggcaagcaccacacagacacccgatggcgctcctgctgctgcgcggctgcgccgcgccgccagccgtccacgcggccccggcggggtcccggctgctccctccggcgctgccgcggcggcggctcgtggccgtcgcctcttcggcctcccccgcgccgtccggagaggtggcgtcgtcgtcccaggacggccgcggctacgggaccgtgggcgggcccaacggccacgccatcgctcccgccacagtcaccaagtccaccgccgtcgagaccaccgtcgagagggtgatcttcgacttccggttcctggcactcctcgccgtcgccgggtcactcgccggctccgtcctgtgcttcctcaatggctgtgtcttcatcaaagaggcgtaccaggtttactggtcgagctgtgtcaagggggttcatacggggcagatggtcctcaaggtcgtcgaggccatcggtgaggtgtttgtttgttcttgtagctgacctctgttcagccaactagcgtcgtcagttaactgttcctttgctggtacacttgtgcaagcacgatcttctgcagatgtgtatcttgctggaacagtcatgctgatatttgggatgggtctctacggcctcttcatcagcaacgctcccgcgagtgttgctcctgaatccgaccgtgccctgagcggctcgtcgctgttcgggatgttcgctttgaaggaacgcccgaagtggatgaacatcacctcgcttgacgagctcaagacaaaagtggggcacgtcatcgtgatgattctacttgtgaagatgttcgagaagagcaagatggtgacgatagccacggggctggacctcctcagctactcgatctgcatcttcttgtcatcagcttctctctacatcctgcacaatcttcacaagggcgaccatgaggagtgacgagagtgaaatgccgaatttgtagcctagagagagttgatggtgttgtccaataatcaatactggatttttaagactctcttcaacggtcttctcttcataaaatataaaatgaaaaatatatgatacaatttatctatatcagaagaccgaatcacgaatagaca

SEQ ID NO: 142239 - DNA, 1294 bp, Zea Mays
ccaagctgcagtacagactcgcgagtcgcgacccgctcctctcagctctcacgcacgactcttcacgtgtagtgtattgtatatagtagaaccaaccaacagtgggagtgggacacacccgacagtgacaccaaccacgaggtacatcccctcctgcgctgcccgctgcccgcctctccttcagatcgccgcctcgcagtcgcacagtcgcactcgctccacttccattcccagcgaccccgcccgcccggaggcgtcacacctgcacgctgcggcagcagccaagcctctctcgtgcggcaagcaccacacagacacccgatggcgctcctgctgctgcgcggctgcgccgcgccgccagccgtccacgcggccccggcggggtcccggctgctccctccggcgctgccgcggcggcggctcgtggccgtcgcctcttcggcctcccccgcgccgtccggagaggtggcgtcgtcgtcccaggacggccgcggctacgggaccgtgggcgggcccaacggccacgccatcgctcccgccacagtcaccaagtccaccgccgtcgagaccaccgtcgagagggtgatcttcgacttccggttcctggcactcctcgccgtcgccgggtcactcgccggctccgtcctgtgcttcctcaatggctgtgtcttcatcaaagaggcgtaccaggtttactggtcgagctgtgtcaagggggttcatacggggcagatggtcctcaaggtcgtcgaggccatcggtgagatgtgtatcttgctggaacagtcatgctgatatttgggatgggtctctacggcctcttcatcagcaacgctcccgcgagtgttgctcctgaatccgaccgtgccctgagcggctcgtcgctgttcgggatgttcgctttgaaggaacgcccgaagtggatgaacatcacctcgcttgacgagctcaagacaaaagtggggcacgtcatcgtgatgattctacttgtgaagatgttcgagaagagcaagatggtgacgatagccacggggctggacctcctcagctactcgatctgcatcttcttgtcatcagcttctctctacatcctgcacaatcttcacaagggcgaccatgaggagtgacgagagtgaaatgccgaatttgtagcctagagagagttgatggtgttgtccaataatcaatactggatttttaagactctcttcaacggtcttctcttcataaaatataaaatgaaaaatatatgatacaatttatctatatcagaagaccgaatcacgaatagaca

SEQ ID NO: 142240 - DNA, 1293 bp, Zea Mays
ccaagctgcagtacagactcgcgagtcgcgacccgctcctctcagctctcacgcacgactcttcacgtgtagtgtattgtatatagtagaaccaaccaacagtgggagtgggacacacccgacagtgacaccaaccacgaggtacatcccctcctgcgctgcccgctgcccgcctctccttcagatcgccgcctcgcagtcgcacagtcgcactcgctccacttccattcccagcgaccccgcccgcccggaggcgtcacacctgcacgctgcggcagcagccaagcctctctcgtgcggcaagcaccacacagacacccgatggcgctcctgctgctgcgcggctgcgccgcgccgccagccgtccacgcggccccggcggggtcccggctgctccctccggcgctgccgcggcggcggctcgtggccgtcgcctcttcggcctcccccgcgccgtccggagaggtggcgtcgtcgtcccaggacggccgcggctacgggaccgtgggcgggcccaacggccacgccatcgctcccgccacagtcaccaagtccaccgccgtcgagaccaccgtcgagagggtgatcttcgacttccggttcctggcactcctcgccgtcgccgggtcactcgccggctccgtcctgtgcttcctcaatggctgtgtcttcatcaaagaggcgtaccaggtttactggtcgagctgtgtcaagggggttcatacggggcagatggtcctcaaggtcgtcgaggccatcgatgtgtatcttgctggaacagtcatgctgatatttgggatgggtctctacggcctcttcatcagcaacgctcccgcgagtgttgctcctgaatccgaccgtgccctgagcggctcgtcgctgttcgggatgttcgctttgaaggaacgcccgaagtggatgaacatcacctcgcttgacgagctcaagacaaaagtggggcacgtcatcgtgatgattctacttgtgaagatgttcgagaagagcaagatggtgacgatagccacggggctggacctcctcagctactcgatctgcatcttcttgtcatcagcttctctctacatcctgcacaatcttcacaagggcgaccatgaggagtgacgagagtgaaatgccgaatttgtagcctagagagagttgatggtgttgtccaataatcaatactggatttttaagactctcttcaacggtcttctcttcataaaatataaaatgaaaaatatatgatacaatttatctatatcagaagaccgaatcacgaatagacacaaa

SEQ ID NO: 142241 - DNA, 1183 bp, Zea Mays
cttgcggcgtctttcccgcgtccacgaggtagaagtaggaaggcgaatgaatagcgatccgtaaccgttgccgagttgtgtccatctcgttcctttttgctgcagcttctagccttctacccaagtaccaaacgtgcttaatacgtacgtgtgggaaaactcggtacacaatacgtgtgcggcttggtagtcactactccttccactgccagtaatggaagcaggcgccgggggaggagagccaagcacgccgcgcagccggaccctgccgtgtaaggtgcggctccagctcttctgcctcgaagtggtcgctggcggtctctcggtgagtcgcgacggcaccatcaaccgctccatcttcaacctcttcgaccttcgtgcccgcgcgtgttctggccgtcgacggaggcgtcctcgtcgccgctccccatcgtggtgtacttccccggcggcgccttcgcgctgctctccgcggcctcgtacgtctatgacgccatgtgccgccggttctgccgcgagctgggcgccgtcgtcgtgtccgtcaactaccgcctcgcccccgaacaccgctaccccgccgcgtacaaggacggcgtcgacgtgctccgacacctcgcctccgcgggcctccccgacggcgtcgacgacgtcccggtggacctctcccgcggcttcctcgccggggacagcaccggcgccaacatcgcccgcctcgtggcgcagcgttggacgacggccagtgtcgagtcatcatcctccccgccgcgttctagccccgtctgccctgccggcgccgttctggtgcagccgtacttgggcggcgaggagcggacggaagcggaggtcaggctggacggggaaggtgccggtggtgaccgtcaggggctcggactggatgtggcggccgttcctgccagaaggcgccgaccggaacgacccagttgcgcacgtgactgacgagaacgctgacctggcggacggctttccaccggtgatggtggtgactggtgatcggtggcctcgaccgctgcaggattggtaaaggcggtaggccgacgtgctgtggaggaaggggaaggcggtgcgggtggtggagctcccggacgccattcacacgttctttctcttccccgagctccacgactacggtacgctcgtgcaagcgatgaagacgttcatagac

SEQ ID NO: 142242 - DNA, 1660 bp, Zea Mays
aaaaatactaatacagtatgaaagtgaaaatgagccggagaccaagactggggagacagcacagtcacggaatcaaaacacaaaaacgatttttacaaacaaaataaaaaagactttcctaaagagagagaaatgacgacaaaaacaaaagagagacttcaactgggcaggcgccgacggcgacgtgtgggtggtggcggctggtcccaagctcggggcgggcgcgacgcgcgagcaccgcaccgatgccgatgctcctcccaccccctcccctcccctcctcctcatcacccaactactacctcccatcccatccgcgccctccttcggtcctctcccatccgctccgctcgcagcccctccccttgccccccgcgatgtcgtcgtcgtcaccgccgccgcggcccgacgacgacgacggtgcgcaggaggtgggcgccagcgatgggaggtcgctgggctacggcgaggcggagtactgggacgcgcggtacgtggaggagggcggcgcgccgtacgactggtatcaacgctacgacgcgctccgccccttcgtccgctgcttcgcgccgccggcgtcccggatcctcatggttggctgcggctccgcactcatgtcggaggatatggtcactgacggctatgtggagatagtgaacattgacatttcgtcggttgtgattgagatgatgagaaagaaatacttcgatgttcctcagctgcaatacttgcgcatggatgttagagatatgagtatgtttccggacgaatcgttcgattgtgcaatcgataaagggactctggactcattgatggtaagtaggagtaggtaacattaagtcaccatgtctttttccttatttctggacttcttcagcaatgccgtcttgctgctttcatagtgtggtgtggatgctcccctcagtgcagctcagatgattttggaagtggacaggttttttagtgtcttgctgcctttctgaagtatcactctgcagtgtcatctgggccaagatatcttgtaaatttcaacagccctgcagccttatcagttatacttttttattgcaggcttcttaaaccaggaggaacctttattttgataacatatggtgatccatcggtacgaatgcctcatttgaatcaatcagcatgtgactggaaagttgtactttatattctaccaagacctgtgttcactggaaagataacgaggcgtgtactggatcctgttccactgaccgagaggggtagactccctgatggatttgtcccagaggatcctgactcccattatgtctatgtctgcaagaagatgcagggattaacaggcacaggttccccaactgtaaaccacatagagaggcaaggggaagaataaacaaataggctgatttcacctcccacaagattagtggattgttatgatttatatacaagatcagatacgtttccaccattgttgtggccatccaaatgtagaagcgtgccattgcatatctaactgatcttgtaaaagttgcaagaatccgggagtcaatgctttgcgcaagagctgtcctttttctttctttcttttctgtatcatcttgggaagcacaacggaattgtttggtacattcgaggaagagatttatttttattacgccccgtttggatc

SEQ ID NO: 142243 - DNA, 1458 bp, Zea Mays
aaaaatactaatacagtatgaaagtgaaaatgagccggagaccaagactggggagacagcacagtcacggaatcaaaacacaaaaacgatttttacaaacaaaataaaaaagactttcctaaagagagagaaatgacgacaaaaacaaaagagagacttcaactgggcaggcgccgacggcgacgtgtgggtggtggcggctggtcccaagctcggggcgggcgcgacgcgcgagcaccgcaccgatgccgatgctcctcccaccccctcccctcccctcctcctcatcacccaactactacctcccatcccatccgcgccctccttcggtcctctcccatccgctccgctcgcagcccctccccttgccccccgcgatgtcgtcgtcgtcaccgccgccgcggcccgacgacgacgacggtgcgcaggaggtgggcgccagcgatgggaggtcgctgggctacggcgaggcggagtactgggacgcgcggtacgtggaggagggcggcgcgccgtacgactggtatcaacgctacgacgcgctccgccccttcgtccgctgcttcgcgccgccggcgtcccggatcctcatggttggctgcggctccgcactcatgtcggaggatatggtcactgacggctatgtggagatagtgaacattgacatttcgtcggttgtgattgagatgatgagaaagaaatacttcgatgttcctcagctgcaatacttgcgcatggatgttagagatatgagtatgtttccggacgaatcgttcgattgtgcaatcgataaagggactctggactcattgatgtgtggtgtggatgctcccctcagtgcagctcagatgattttggaagtggacaggcttcttaaaccaggaggaacctttattttgataacatatggtgatccatcggtacgaatgcctcatttgaatcaatcagcatgtgactggaaagttgtactttatattctaccaagacctgtgttcactggaaagataacgaggcgtgtactggatcctgttccactgaccgagaggggtagactccctgatggatttgtcccagaggatcctgactcccattatgtctatgtctgcaagaagatgcagggattaacaggcacaggttccccaactgtaaaccacatagagaggcaaggggaagaataaacaaataggctgatttcacctcccacaagattagtggattgttatgatttatatacaagatcagatacgtttccaccattgttgtggccatccaaatgtagaagcgtgccattgcatatctaactgatcttgtaaaagttgcaagaatccgggagtcaatgctttgcgcaagagctgtcctttttctttctttcttttctgtatcatcttgggaagcacaacggaattgtttggtacattcgaggaagagatttatttttattacgccccgtttggatca

SEQ ID NO: 142244 - DNA, 4002 bp, Zea Mays
cgctgcatcaccaccacctctcttctctttcctcttcgatctcgatcgccctcgcaattcctccgtaaagcgcccctgccctgggcgagctatagcgcgcgcgcccagatctgcgcggtctcgccggcgatggcgtgcatcaagagcgcgcagcgggcggcgctgacggcgttggcgccggacgcgccgtacctcgccgcgggcaccatgaccggcgccgtcgacttgagcttctccgcctccgccaacatcgagatcttccgcctcgacttccagtccgactccccggacctcccgctcctcgccgccgcgccctccccggaccgcttcaaccgcctctcctggtcgcgcccgggcgccgtcgagggcgactccttttcgcttggactcctcgccggtggcctcagcgacggttccgtcgccgtgtggaacccgctgagcttgatcagctccgaggggaaagcggaggacgccatggtcgcgcgtctggagaagcacaccggaccggtttgtggactggagttcagtgagctgacaccgaatcggctcgcttctggggctgagcagggggagctttgcatctgggatctcaagaaccccgttgagccaattgtgtaccctccactcaagagtgttgggtcccatgctcaagctgaaatctcttgtttatcctggaatcccaagtttcaacatatagttgcctcaacttcgagtaatgggatgacagttgtttgggatttaaggaaccagaaaccactgactagtttttcagattcaaatcgaaggaaatgctctgttctccagtggaatccagatatgtccacccagttgattgttgcatcagatgatgacagttctccctcactgagagtttgggatgtgaggaagaccatttcaccagtaagagaatttgttggccattcaaaaggtgtaattgctatgtcgtggtgtccttatgatagttcattcttgcttacatgttcaaaagacaacagaacaatttgctgggatactgttagtggagagattattagtgagctacctgcaagtgctaattggaactttgaccttcactggtaccggaaaataccaggtgtcattgcagcatcctcatttgatgggaagatcggcatatacaacctagagttctctggtatttatgcggctggcgatgctgttggtgccccagcgcgtcaaagggctccggttccaaaatggttgaaatgctccactggtgcatcttttggctttggtggtaaacttgtttctttccatccggtggcacccacccaaggtgcacaagcatctacatctgaggtgcatgtgcacaatttggtgattgagcaaagtctggtgagccgatcagctgagtttgaagatgctattctgaatggcgacaaaagttcgctgcgtgctctgtgtgaaaaaaaatcacaagaatctttatctgatgaggagagagaaacatggggcttcttgatgattatgtttgaggacggggattttgtaaggacaaaattgcttgctcatcttggcttcgaaccacctcaggcaccacctgcaagttcacctgatgaattgagccaaacattggcagatacacttaatcttgatcacgccacaataaccgattatgcagatgcccaatttcttactgataacggggatgattttttcaacaatcctcaaccttcagaggctagtttggctgaagatttagtttctacaaatggtcaacagacagagcaggaaatgtctggagatgttgtgccgtcagatccatcaattgacaaaagtattcagcatgcattggtggttggagactacaaaggggcggttaaccagtgtctttctgctaatcgtatagctgatgctttggttatagcccatgccggtggttctgctctctgggaaagcacaagaaatcattatcttaaaaacagtatctcaccttacttaaaggttgtctccgctatggtgggcaatgatttaatgagttttgtaagtacctggccactaagttcatggaaggaaactcttgctctgctttgcacgtttgcacagaaagaggagtggcatgttttgtgtgacacgcttgcgtctagacttctaaatatcggagatacactagctgcaaccctctgttatatttgtgctggaaatattgataaagctgttgaaatatggtcccgcaccttgaaatctgaagatggtgggaagatttatgttgatcttctccaggatttgatggaaaaaaccattactctcgcccttgctacgggccacaagagatttagctcatcactgtctaagcttgttgagaactacgctgaattgctggctagtcaaggtcttcttaaaactgcaatggagtatttaaaactgttgggatcagatgaacattcaaatgagctggcaattttgagagatcgaattgcatgttctatggaagagaatgataatgctaggagttatgtttctgaaagcaccgccactccttccctttatggcacaaatcaatcttatacagccccagaccattctcagaatgtttaccaggtacctcagccatacaatgtaccaagtaatacatattcagaagcttacccacaacaacctactggcgcctatggatacaacaacacatatcaacctcaacaaccaacccatatgtttgttccacctagcgcccctgccagctctcagcaacagccaggcccttcacctgtaccagtgcctcagcaaacagtgaaggcatttactcctgcgaacccagctggtctaaaaaatccgggacaatatcagcaacctaataccctaggttcccagctttacacgggcactgcaaatcaacagtatccttctggaccatctgcttcttatccaagcggacctccaacaacatttcatcagcctgtatcacctgttcaataccagcctgttgctccaccagtatcttcttttggtccgagcgctcctgtaccagcaacagtccctaaccagatgtttccccattctgctgctgctaactcaacttcaaggttcatgccatcgaacaatcaaagctttgctccgaggccaggtctaagtcccgcacagccctcaagtccaacacaggtgcaggcacagccagctcctcctgcaccgcccccgactgtgcagacagctgatacgacaaaagtgtctgctgagttgagacctgttattggtacactaactagactattcgatgagacgtccaaagctctgggaggatcacaagctactcaagcaaaaaagcgtgaaattgaggacaattcaaggaaaataggggcattgttttcaaaactaaatagtgatgacatatctccaaacgttgcatcaaaactcaggcagttgtgcagtgcaattgatgctagcgattttgccactgcgatgcacctccaggtactcttaacaacaagtgactgggacgagtgcaacttctggctcgcggcattgaagcggatgatcaagacaaggcagaatttcagaatgtaaaccttgtggcctttttctgcagccagttctgtacacaccttttttctgctgcttgccagaaatgatagctgtagcagttcagagagtttgcctgcacaggggtgttatcatgctgctttgttctcggcccttgattctgcctaagcgctttggtacctcagtgctgttatacattttgataatagttttttgttttcgacatctgctataaggtgacctgcggctgggttgttcgttatgaatgttaattgtaagaggacacttagtctgttatagctggtggatcacctgtttcaattcttcctcttagatttcgtcagtttggacattccaagaactctagatggttaatacaagtgacagtggcttgttttttttttttttggtaatgccaacagaaatcaataaacttctggaatcctgaggtctgtgtttcttgctggacttcccagtcccggttttgctcttcgtgtatagctgctc

SEQ ID NO: 142245 - DNA, 110 bp, Zea Mays
atataatcaagatggtttagatggtctagctagtagtcacactattaatattttgataactggtactcggggttcgtctaagaagtcaacaattccaaacttcaatattc

SEQ ID NO: 142246 - DNA, 1913 bp, Zea Mays
atccgagaccgggaggccttctctctctctctctctctctctggcgacggccatggtgcagcaacagcaacacagaatctacatcttgcagttcaggaagggcgagacggagcaggaggtggcatgcaaagtgtcgcagcccaagggcgtcgggcggcgggtcatgtactactaccaggactacggcagcggcggcggtggcaagagcggcaagacggtgcaacccagggcgctcggcgtgcggcgcttcttggccatgctcctgctctccttcctctgcgtggggacgctgttcgtggcgcccgtgtccttcctctccttcgtgcatagcgatgaaggcggcgcggcggcggcggccacggccgcgcgcggcggggtgtccgggccgtgctcggccgtggggaacaacagcctctgctgcgaccgcacgtcggagcgcgcggacatctgcttcgcgaggggggacttgcgcatgcactcggccagcgcgtcgttccagctcgtgtccaccggcaactcgacgccgggggagcggatacggccgtacacgcgcaagtgggaggcgaacgtgatggcgacgatcgacgaggtgcggctgcgccgcgtggcccccggcgacgccgcgcggtgcgacgtgcgccacgacgtaccggccgtggtgttctccaccggcgggtacacggggaacgtgtaccacgagttcaacgacggcatcctgccgctcttcgtgacggcgcgccacctccggcggcgcgtggcgctggtgatcctcgagtaccacgactggtggatgaccaagtacggcgacgtggtgtcccagctgtcggagttcccgccgatcgacttcagcgccgaccgccgcgtgcactgcttccccgaggtgatcgccgggctgcgcatccacggcgagctgaccgtggacccggcgcggacgcccgagcgccggggcatcggcgacttccgcaggttcctggacgacgcgtaccgcggccgcatcgagttcctggagcgcctggagcggcgcgcggcgcgcaggcgcccgcaccgccaccaccgcggcggcgccttggtcccccgcgcgcctcctgcaggtccccgcgaggccgaggccgagcggcggcccaggctggtgatcgtgtcgcggacggggtcccgcgtgatcgagaacgaggcggacgtggcggcgctggcggcggacgtcgggttcgacgtgcgcgtgatccgccccgaccgcaccacggagctgtgcaagatataccgggagctgaacgccagcgacgcgatggtcggggtgcacggcgccgccatgacgcacttcctgttcatgcggcccgggaaggtgttcatccaggtggtgccgctgggcacggactgggccgccggcgcctactacggcgaccccgcggcgcggatggggctgcgctacgtcggctacaagatcctccccgaggagagctcgctgtcccgcgagtaccccacgggcgaccccgtgctgacggaccccgccggcgtcgcgcagcgcggctgggacgtgaccaagaaggtgtacctggaccggcagaacgtgcggctggaccttgcccgcttccgggaggagctcgtcgcggcgcaccggtacctggccgcggccggcggccggcggcggcggccgagagcggccgagacgacgaaggctcggaacggcttcctcacgcggccagtcgccgccacagccttgtagttccgtgtaggttgggttttttttttcccgccaggctgtatgggtttgttggaacagactaatcagctttggttaagcgtcaacaaaagcctgctagcagtggccgtaaagcgccgccacccatcgggggtgtgctggctggctggctctggcatggacggccccctaacggcacgcacagtaccacggcgat

SEQ ID NO: 142247 - DNA, 1855 bp, Zea Mays
atcagatccctcccgcagtctcgcgcgctctcccccacccacccaccccctatccatccatccatcccacctcctgctccacatcctcccctccgcccaccaacgcagcagcagccagcagccccgccacttcccccctcgccgcttgcgatggcggtcacgcgcgtcgccgtggccgccgccctctcggcggccccgctctcctcccgccgccaccgggttgccctcccctccgcctgccgccttctccccgcctcggccacctgctgcaacagccgcgcgccgatgtctctgcaggccgccgccgccgcacctgccgccggcgcggtcgacgaggagactcctgcctcctcccctccgtcagatgctagcaagggggtggagaacctggtgatcatcggctctggaccagccggttacaccgctgccatctacgccgcccgggcgaacctgaagcctgtcgtgtttgaagggtgccagatggggggtgtccccggcgggcagctgatgaccaccaccgaggtggagaatttccctggcttcccggacggtataaccgggcctgatctcatggacagaatgcgcaagcaagcggaacgctggggcgcagagctttaccaagaggatgttgagtttgtgaatgtaaagagcagcccgtttgttattcgtagcagcgaccgtgaggtgaaatgtcatagtctaattattgcaactggagctacggctaagcgcctccgtctgcctcgtgaagatgaattttggagtagaggcatcagcgcatgtgcaatatgtgatggagcttcaccacttttcaagggccaggttcttgcagttgttgggggtggtgatgtagctacagaggaagcagtatatttgacaaaatatgctcgacatgttcatttactagttagaaaggatcagctacgggcttccaaagctatgcaggacagagtactcaacaaccccaacataacagtacatttcaatacagaagccatggatgttgttagcaatgacaaagggcagatgtctggcgttcatctgaagagaagagatacaggagaagaatcagttcttactgtgaaaggtttattttatggcataggacatactccaaacagtcagctgttgcagggccaaatcgaacttgatagtgctggctatattttagttaaagagggctcagccaaaacttcagttgatggtgtattcgctgctggtgatgttcaggatcatgaatggagacaagctattactgcagctggatctggatgcatagctgctttgtcagttgaaagatacttagttgccaatgatcttcttgtcgaatttcaccagcctgttcaagaagaaacaaagaaggatattacagataaagatgttcaaatgggctttgacatttctcacagaaaacacaagggacagtatgcactccgcaaactgtaccatgagagtccacgactcatttgtgttctatacacttctcccacatgtggtccttgcagaaccttaaaaccaattttgagcaaggtcatagacgagtacggcgagtttgttcatcttgttgaaattgacatcgaggaggatcctgaaatagcagaagctgcaggcatcatgggaacaccttgtgttcaattttttaagaacaaagaaatgctcaggaaatggtatacactttttttggagaatactgaatgaacttgcaaaccaaaggcacaggcacatcttggctaaatattggactagttggtgtatgtgtattttatcgttcttggccaaacattatctgatgttctcgaataaaattttgttaaacaaaggcatgcaattgaattcttaagtctgtcttctttgt

SEQ ID NO: 142248 - DNA, 2075 bp, Zea Mays
atcagatccctcccgcagtctcgcgcgctctcccccacccacccaccccctatccatccatccatcccacctcctgctccacatcctcccctccgcccaccaacgcagcagcagccagcagccccgccacttcccccctcgccgcttgcgatggcggtcacgcgcgtcgccgtggccgccgccctctcggcggccccgctctcctcccgccgccaccgggttgccctcccctccgcctgccgccttctccccgcctcggccacctgctgcaacagccgcgcgccgatgtctctgcaggccgccgccgccgcacctgccgccggcgcggtcgacgaggagactcctgcctcctcccctccgtcagatgctagcaagggggtggagaacctggtgatcatcggctctggaccagccggttacaccgctgccatctacgccgcccgggcgaacctgaagcctgtcgtgtttgaagggtgccagatggggggtgtccccggcgggcagctgatgaccaccaccgaggtggagaatttccctggcttcccggacggtataaccgggcctgatctcatggacagaatgcgcaagcaagcggaacgctggggcgcagagctttaccaagaggatgttgagtttgtgaatgtaaagagcagcccgtttgttattcgtagcagcgaccgtgaggtgaaatgtcatagtctaattattgcaactggagctacggctaagcgcctccgtctgcctcgtgaagatgaattttggagtagaggcatcagcgcatgtgcaatatgtgatggagcttcaccacttttcaagggccaggttcttgcagttgttgggggtggtgatgtagctacagaggaagcagtatatttgacaaaatatgctcgacatgttcatttactagttagaaaggatcagctacgggcttccaaagctatgcaggacagagtactcaacaaccccaacataacagtacatttcaatacagaagccatggatgttgttagcaatgacaaagggcagatgtctggcgttcatctgaagagaagagatacaggagaagaatcagttcttactgtgaaaggtttattttatggcataggacatactccaaacagtcagctgttgcagggccaaatcgaacttgatagtgctggctatattttagttaaagagggctcagccaaaacttcagttgatggtgtattcgctgctggtgatgttcaggatcatgaatggagacaagctattactgcagctggatctggatgcatagctgctttgtcagttgaaagatacttagttgccaatgatcttcttgtcgaatttcaccagcctgttcaagaagaaacaaagaaggatattacagataaagatgttcaaatgggctttgacatttctcacagaaaacacaagggacagtatgcactccgcaaactgtaccatgagagtccacgactcatttgtgttctatacacttctcccacatgtggtccttgcagaaccttaaaaccaattttgagcaaggtcatagacgagtacggcgagtttgttcatcttgttgaaattgacatcgaggaggatcctgaaatagcagaagctgcaggcatcatgggaacaccttgtgttcaattttttaagaacaaagaaatgctcaggactgtatcgggtgtgaaaaggaagaaggaatatcgggagtttatcgaggcgaacaaatgagttgagcacgcagtggaccccctcaaggttttttgaagtcagtagttcttttggcgctattttgacgccaccccgtcccccggtggccaatttttcatcagattttaagacgagcctggtctagtgccatgccaaaggaaactagccgatccctcatattggattatacagctcaaaatatattctttgctgtgtgtgtacaacatacatggagttgaccccccaccccctgctgatcaatcatcattgcggcattgccttgacactgccaatgtgcaaactatttccacggattagcatacattaatctgaagtatatatatactcggcaatgctgaatccattttgatcaa

SEQ ID NO: 142249 - DNA, 2098 bp, Zea Mays
atcagatccctcccgcagtctcgcgcgctctcccccacccacccaccccctatccatccatccatcccacctcctgctccacatcctcccctccgcccaccaacgcagcagcagccagcagccccgccacttcccccctcgccgcttgcgatggcggtcacgcgcgtcgccgtggccgccgccctctcggcggccccgctctcctcccgccgccaccgggttgccctcccctccgcctgccgccttctccccgcctcggccacctgctgcaacagccgcgcgccgatgtctctgcaggccgccgccgccgcacctgccgccggcgcggtcgacgaggagactcctgcctcctcccctccgtcagatgctagcaagggggtggagaacctggtgatcatcggctctggaccagccggttacaccgctgccatctacgccgcccgggcgaacctgaagcctgtcgtgtttgaagggtgccagatggggggtgtccccggcgggcagctgatgaccaccaccgaggtggagaatttccctggcttcccggacggtataaccgggcctgatctcatggacagaatgcgcaagcaagcggaacgctggggcgcagagctttaccaagaggatgttgagtttgtgaatgtaaagagcagcccgtttgttattcgtagcagcgaccgtgaggtgaaatgtcatagtctaattattgcaactggagctacggctaagcgcctccgtctgcctcgtgaagatgaattttggagtagaggcatcagcgcatgtgcaatatgtgatggagcttcaccacttttcaagggccaggttcttgcagttgttgggggtggtgatgtagctacagaggaagcagtatatttgacaaaatatgctcgacatgttcatttactagttagaaaggatcagctacgggcttccaaagctatgcaggacaggttgattatggcgaatgtttcagagtactcaacaaccccaacataacagtacatttcaatacagaagccatggatgttgttagcaatgacaaagggcagatgtctggcgttcatctgaagagaagagatacaggagaagaatcagttcttactgtgaaaggtttattttatggcataggacatactccaaacagtcagctgttgcagggccaaatcgaacttgatagtgctggctatattttagttaaagagggctcagccaaaacttcagttgatggtgtattcgctgctggtgatgttcaggatcatgaatggagacaagctattactgcagctggatctggatgcatagctgctttgtcagttgaaagatacttagttgccaatgatcttcttgtcgaatttcaccagcctgttcaagaagaaacaaagaaggatattacagataaagatgttcaaatgggctttgacatttctcacagaaaacacaagggacagtatgcactccgcaaactgtaccatgagagtccacgactcatttgtgttctatacacttctcccacatgtggtccttgcagaaccttaaaaccaattttgagcaaggtcatagacgagtacggcgagtttgttcatcttgttgaaattgacatcgaggaggatcctgaaatagcagaagctgcaggcatcatgggaacaccttgtgttcaattttttaagaacaaagaaatgctcaggactgtatcgggtgtgaaaaggaagaaggaatatcgggagtttatcgaggcgaacaaatgagttgagcacgcagtggaccccctcaaggttttttgaagtcagtagttcttttggcgctattttgacgccaccccgtcccccggtggccaatttttcatcagattttaagacgagcctggtctagtgccatgccaaaggaaactagccgatccctcatattggattatacagctcaaaatatattctttgctgtgtgtgtacaacatacatggagttgaccccccaccccctgctgatcaatcatcattgcggcattgccttgacactgccaatgtgcaaactatttccacggattagcatacattaatctgaagtatatatatactcggcaatgctgaatccattttgatcaa

SEQ ID NO: 142250 - DNA, 457 bp, Zea Mays
caaaggcacaggcacatcttggctaaatattggactagttggtgactgtatcgggtgtgaaaaggaagaaggaatatcgggagtttatcgaggcgaacaaatgagttgagcacgcagtggaccccctcaaggttttttgaagtcagtagttcttttggcgctattttgacgccaccccgtcccccggtggccaatttttcatcagattttaagacgagcctggtctagtgccatgccaaaggaaactagccgatccctcatattggattatacagctcaaaatatattctttgctgtgtgtgtacaacatacatggagttgaccccccaccccctgctgatcaatcatcattgcggcattgccttgacactgccaatgtgcaaactatttccacggattagcatacattaatctgaagtatatatatactcggcaatgctgaatccattttgatcaa

SEQ ID NO: 142251 - DNA, 536 bp, Zea Mays
ggacgctttaagatttttttgggggttagatgatattggaaggcagttgagattaacgatttggtctctcgaacgaatccaccatttttctatgcacatgttatgtattagtaatatataatgatagagagccgacaatctgtcttttccacacactagattttagggttttcctgtgaggctgtgaaaaaccctttatgtgaggaaaaaatatttcatgagtaagcatgccatgtcaactaaatcgagtggatattgtgaaatttgagtctgtgaacttgtgatctttatgaacttgttataatgtgaatttgttatattgtgaacttgtgatctttgtaaactttttatattataaatttgtgatccttgtgaacttgttatatcatgaattgtgaacttgtggtatttgtgatcttttgtcaattttgttttattgtgaagtttgatatgtttaccgatcgtattttagatttcgatcgttaccggtgcattttccgcaccgaactttcgtttccgatgtttccgaaataccg

SEQ ID NO: 142252 - DNA, 134 bp, Zea Mays
ctcgacctgtttggatagaagaagctaaaatagacctgaaattattgaagtatagctctcccaagcagcgtctaaattacaagttttcctggttccacggtttccgtattcacttttacaaaaaaaaaaaaaaa

SEQ ID NO: 142253 - DNA, 474 bp, Zea Mays
atgtccttggtcattggagagagggatgagaaggcattctttgatgactacaaagaggcccacctcaagctctccgaactgggcattctcactgggcttctgtccttcatgatggacgatgcactgacaactggaagcatcaagacatcagatgcagaaaagaggcgtttagcaaaagcttcccttgcctacaattgtgagagcaaaaactgtccgcacttcaggaaacttttcccagagtatgttgagaagtacaatcaacagctacaattggagaacactactgcagagccggtgcctcaggagaatcctgcacctgctccatcccctgctgcccagcaagccccgaccgtggccaatagggcacaaccactggcggaggcgcgccgtgacaagaaccagaagaaggcggtgcccttctggatggtgctggtcatgttttcagttttcggggctgtgatggcgtgcccctaa

SEQ ID NO: 142254 - DNA, 1564 bp, Zea Mays
taggttgcttttatggcatcttgatccatcaattattaggcttgatctctcagtgatgctcaaggagggattaagtggttgtaatgacattggggtagatcgtgctaattttgatttgattttttctactttttcagtacttgatgatgaggccgtcatgaggaaacaactccacgaggcgagagaacagctggtgagacaaaggttgttgcctcccaagactggccctaggtggctaactataatggcattatccgtgcacaaggtcaccgtcaagagctcatcgatgggctggaaaacattgtcaagtacgatcatcatcaccatctctgaaattcaaatggcaccccatacccgattgagagagttccttaatttgcaaaatatttttagggaactcctacttgcattcgtggaacggtctaagcagagacccaagcagctgatcttctacagggatggcgtaagtgagggccaattcaaacaagtgctggagcaagaaatccatgagatagagaaggcatggacagctctttacaatgagaagccaaagatcaccttcgtagtggtgcagaagaggcaccacacaaggctcttccccagcaaaccaaaggatcgccaatacgcggacaagagtgggaatattcgagctggcaccgtagttgataataatatctgccacccaacagaatttgatttcttcctgtgcggccatgctggggccaagctttgcctctggatgcgtgtgggttttggtttggcgatggtttttgtggggaaagtggggaggaagaacagcaagagggaacctcttgttacaaatatcatgtggagaaacttgtttgttcaggccctttaccaagtagcaattcttctgattttcgattttgatggagtaaggattctgcgtctgcagaatgaaagccgatctaatgctgagaaggacaagcctcagccgccacctgagggccgtcttcctgatgccaccaagggttctaaccacctgaggcaagtctttggcaagcagatgggtttgagtgatcaggacatcgttgccctctctggtggccacaccttgggaaggtgccacaaagagcggtctggttttgagggggcctggactacgaaccctttggtctttgacaactcttacttcaaggaacttctgagtggtgacaaggagggccttcttcagctcccaagtgacaaagccctgctgagcgaccctgtcttccgccctcttgtggagaaatatgctgcagatgagaaggcattctttgatgactacaaagaggcccacctcaagctctccgaactgggtggaacaaatctgatcgtttactcttctggggtgcagtgttttacaacagtttggcttttggaattgctactgctaaaacttcgttcctctaagaagaccttttgtttttgcattcccagcattctcactgggcttctgtccttcatgatggacgatgcactgacaactggaagcatcaagacatcagatgcagaaaagaggcgtttagcaaaagcttcccttgcctacaattgtgagaggtag

SEQ ID NO: 142255 - DNA, 3425 bp, Zea Mays
atgacccacccacccacagccacacaggccgagctgaagggagggggactgcctgcgggctgcggcttccggcgcaagatgccatgtggactccggatgactcgaaagtccatccatctcctctctatctctctatctatctatttcacgcctccacggctccacggctgctgccagcctgactagtgaggtgattgccgcagcggcggtcggccagagcgcgtgtgctcctccccagcataatcccaccaccatcgcgcacccgcccacctcaagcgagcggccccaattcccagccaccgcaagtggcttaaccctcgctcccgcacccccactcttccaccgcacgcacccgcgcgagcgagtgcggcagatcgcggccggccgctgggtccggtgcagttccgggctgcggcgccgggccacagttgatgcggacgatccgaggaggacgggacgggatggcggcttcggcggcgcctgggtcggctgggaggcaggcgcgcggagtcgcggcagcggcgaccggaaacgcggtatttaagagtggccctctcttcatatcatcgaaaggaattggatggaaaacgtggaaaaaacgctggttcatcctcacacgaacatcactggttttcttcaagagtgatcctagtacgttaccacagagaagtgaagtgaaccttacattgggaggaattgaccttaataattctgggagtgtagtagtcagggaagacaaaaggctactgactgtcctttttccagatggccgtgatggccgtgccttcaccttgaaggcagaaagttctgaagatttgtttgagtggaaaacagcgctggaagaagctcttgcacaagctccaaatgcagctcttgtgatggggcataatggaatatttcgcaatgacacaacagatgtatatgaaggggctattccgaattggggaaagaagagacctatcaaatcaatagttgttggcaggccaatactgcttgcactggaagatatagatggcagtccttcttttctggaaaaagctttgtgtttccttgagaaacatggaatgaaggtggaaggaattttgcgtcaagctgcagatgtggaggaggttgacaggagattgcaagaatatgagcaaggaaggacagaatttgcaccagaagaggatgctcatgttgttggtgactgtgtaaagcatgttctccgtgagcttccatcttctcctgttccagcttcgtgctgtacagcattattggaagctttccgtctggaaaccaaggaatctcagatcaaatccatgcgtgcagcaatatctgaaacatttcctgagcctaataggcggctgctacagagacttttgaaaatgatgcataccattgcttctcatactgccgagaatagaatgactccatcagcagttgctgcatgtatggccccgctcttgttgcgtccccttcttgctggtgaatgcgagatggaagatgacttagacatgaatggtgacagtgctgctcagcttattgccgctgcaaatgctgctaacagtgctcaaggcattgtaactactctattagaggaatacaagagtatattcaatgatgagcactttaggtgctccttatcacctgattctcaaacaggagatagtggaagtgaagaatcaactgatgacgaaactgtggataccaagggtaatggatttcatgatgcggaaaatgatgtagatcaagaattagatgatgccgagcgaatgctgagtggaaaattcactgaaaccagtgcaagtgcttgtgctgacctctatgaccacaaggaagttaatggcaatagttcagacactgagctctttgttgaggatcacacatttgaatcaaatgtagatttaaatgatgctcccctaagtcgtttaacagaaaatggaaagggtccatcaaatctgatgtccgctcatgaaactccattatcagtgggagagattcttctgtctttggatgctggaattccattaccttgtcgtgcagctgaatattctagcaaacccaatggaactcagcagcatgtgaagcgtactaacttatggggatggagcaatgtgagaaagggccaacgatcggagttagttgatccatcaggtgaagaagagcttgctattcaacgacttgaggtaatgaagaatgacttgcagatcaggattgcaaaggaggctagaggcaatgcaatcctacaggcaagtttggaaagaagaaaacaagcactacacgagcgtcgtgtggctctggaacaggatgtgtcaaggttgcaagagcagctacaggctgaaagggatcttagagctgcactggaggttgggctaagcatgtcttcttcacaattttctagctcactctccatggactcgaagacaaagtcagagcttgaggaaattgctctcgcagaagctgatgttgcaagattaaaacagaaggttgcagagctgcatttccaactcaatcaacagcgccagcaccagtatggctcttccgtagatgcaaatgatcatcctcaacaccttctaaatcatctctcgcagaacattgtccaaacaggatttgataggagcgttgctttctgtaatcaagagaagcaaagaaatgaggagagcctgccgagcacatcccactggagaagcatcaaacagcatgtgctatctcatggttcttcaaggcctttctcccgaaagcattcctcggacacctccttgagtgattctacaagtgtgcctgcagagggcgggccaatgttggtgaacatccctagaacaacgaaaggtgtcgaatatgggagaccgccgtctgtgtcgtcatccactctggttgaactaacaaccaggctagatttcttcaaagaacggcggtcacaattgatggaacagctccacagcctcgatttagggcatggatccacgtcccatggtttcccatacaaaccttcatctccctggaacagcccaaagtaaagtaggggatgatcatttgctgcagtacgacgtctctgtatattcttggtatagaatctcctttatgtttcactccatctttgtagagcctggtagtgagaatgtatatcccttgccttcacttgttttgctagtgcttgcagcggatctttttttagcatgattttgttttactgtatatgtaatgagttgaggagattgtgacacggcttttatatgttttagcaattttgttctattgtgtatgtaatgagttaaggggattgtgacacggtttttatatgttttcgcaatatatagatgcgtcttttttcttggggatatatagtccactgcaggtggagctactgttgtcatttcgaaaacaatgtggctgatccttgtaggcagctaattctctcccccaaatggattggaggaaacgagtgg

SEQ ID NO: 142256 - DNA, 3138 bp, Zea Mays
gccaccgcaagtggcttaaccctcgctcccgcacccccactcttccaccgcacgcacccgcgcgagcgagtgcggcagatcgcggccggccgctgggtccggtgcagttccgggctgcggcgccgggccacagttgatgcggacgatccgaggaggacgggacgggatggcggcttcggcggcgcctgggtcggctgggaggcaggcgcgcggagtcgcggcagcggcgaccggaaacgcggtatttaagagtggccctctcttcatatcatcgaaaggaattggatggaaaacgtggaaaaaacgctggttcatcctcacacgaacatcactggttttcttcaagagtgatcctagtacgttaccacagagaagtgaagtgaaccttacattgggaggaattgaccttaataattctgggagatggccgtgatggccgtgccttcaccttgaaggtacatgtaccttcctcctaaacagtttgacacgctagagcaagccaaacaggcagaaagttctgaagatttgtttgagtggaaaacagcgctggaagaagctcttgcacaagctccaaatgcagctcttgtgatggggcataatggaatatttcgcaatgacacaacagatgtatatgaaggggctattccgaattggggaaagaagagacctatcaaatcaatagttgttggcaggccaatactgcttgcactggaagatatagatggcagtccttcttttctggaaaaagctttgtgtttccttgagaaacatggaatgaaggtggaaggaattttgcgtcaagctgcagatgtggaggaggttgacaggagattgcaagaatatgagcaaggaaggacagaatttgcaccagaagaggatgctcatgttgttggtgactgtgtaaagcatgttctccgtgagcttccatcttctcctgttccagcttcgtgctgtacagcattattggaagctttccgtctggaaaccaaggaatctcagatcaaatccatgcgtgcagcaatatctgaaacatttcctgagcctaataggcggctgctacagagacttttgaaaatgatgcataccattgcttctcatactgccgagaatagaatgactccatcagcagttgctgcatgtatggccccgctcttgttgcgtccccttcttgctggtgaatgcgagatggaagatgacttagacatgaatggtgacagtgctgctcagcttattgccgctgcaaatgctgctaacagtgctcaaggcattgtaactactctattagaggaatacaagagtatattcaatgatgagcactttaggtgctccttatcacctgattctcaaacaggagatagtggaagtgaagaatcaactgatgacgaaactgtggataccaagggtaatggatttcatgatgcggaaaatgatgtagatcaagaattagatgatgccgagcgaatgctgagtggaaaattcactgaaaccagtgcaagtgcttgtgctgacctctatgaccacaaggaagttaatggcaatagttcagacactgagctctttgttgaggatcacacatttgaatcaaatgtagatttaaatgatgctcccctaagtcgtttaacagaaaatggaaagggtccatcaaatctgatgtccgctcatgaaactccattatcagtgggagagattcttctgtctttggatgctggaattccattaccttgtcgtgcagctgaatattctagcaaacccaatggaactcagcagcatgtgaagcgtactaacttatggggatggagcaatgtgagaaagggccaacgatcggagttagttgatccatcaggtgaagaagagcttgctattcaacgacttgaggtaatgaagaatgacttgcagatcaggattgcaaaggaggctagaggcaatgcaatcctacaggcaagtttggaaagaagaaaacaagcactacacgagcgtcgtgtggctctggaacaggatgtgtcaaggttgcaagagcagctacaggctgaaagggatcttagagctgcactggaggttgggctaagcatgtcttcttcacaattttctagctcactctccatggactcgaagacaaagtcagagcttgaggaaattgctctcgcagaagctgatgttgcaagattaaaacagaaggttgcagagctgcatttccaactcaatcaacagcgccagcaccagtatggctcttccgtagatgcaaatgatcatcctcaacaccttctaaatcatctctcgcagaacattgtccaaacaggatttgataggagcgttgctttctgtaatcaagagaagcaaagaaatgaggagagcctgccgagcacatcccactggagaagcatcaaacagcatgtgctatctcatggttcttcaaggcctttctcccgaaagcattcctcggacacctccttgagtgattctacaagtgtgcctgcagagggcgggccaatgttggtgaacatccctagaacaacgaaacagggtgtcgaatatgggagaccgccgtctgtgtcgtcatccactctggttgaactaacaaccaggctagatttcttcaaagaacggcggtcacaattgatggaacagctccacagcctcgatttagggcatggatccacgtcccatggtttcccatacaaaccttcatctccctggaacagcccaaagtaaagtaggggatgatcatttgctgcagtacgacgtctctgtatattcttggtatagaatctcctttatgtttcactccatctttgtagagcctggtagtgagaatgtatatcccttgccttcacttgttttgctagtgcttgcagcggatctttttttagcatgattttgttttactgtatatgtaatgagttgaggagattgtgacacggcttttatatgttttagcaattttgttctattgtgtatgtaatgagttaaggggattgtgacacggtttttatatgttttcgcaatatatagatgcgtcttttttcttggggatatatagtccactgcaggtggagctactgttgtcatttcgaaaacaatgtggctgatccttgtaggcagctaattctctcccccaaatggattggaggaaacgagtgg

SEQ ID NO: 142257 - DNA, 2442 bp, Zea Mays
cttgggtggtacactacactcagtccaccgtgtccatgcgctggccggccttctgctgttctgctctgctgttctgcacagagacggcagctcatgggccatccggccatcccatgagccaggtctactacctcctggctcctgctcctgcgaatcccgtacatgccacgtgggtagcgccgcgccaagacaagcctcctgtgagtctgtgacgagccaccgtgaaactggacaccgacgtggagcgcgtccgctggccgaagcgacagcctgcgctcacgagctgccgcagctcttggtccccggcgagccgtgctcagccgcggatgctgcaggcagcctggccagcagcaggtacggcgatacgtccgtccacgctaaacctcacgggcgtgccatgcatggcgcgcgcgctctgcccgcgtcgccagaccccagtggcgctcacgtgccccgccgctatatagcccacggcgtcgcgccaccgtccgtccgtccgtcgtctcgcgctctcgtttcgtcgctacgctagcttccagtcccgggcttagcaactgtgctgctgttgcactgcacccggcgcacgcagagatgcgccgtgtcgggacgggtgtgaggatgctttgcggcgcggcgctgtcggtgcttctgcttctcgcgggcggcgcggcggcgtcgcactcgcgctcgtcgtgccccgccacgcctccggacgcggggaacacgctgcaggtgtcgcacgcgttcgggccgtgctcgccgctgggccccgggacggcggcgccgtcgtgggcggggttcctggcggaccaggcgtcgcgtgacgcgtcgcggctgctgtacctggactcgctggcggtgcgtggccgcgcccgcgcgtacgcgcccatcgcgtcggggcggcagctgctgcagacgccgacgtacgtggtgcgggccagcctcggcacgccgccgcagcagctgctcctggccgtcgacaccagcaacgacgcctcgtggatcccttgcgccggctgcgcgggctgccccacgtcgtccgcggcgcccttcgacccggcctcgtccgcctcgtaccgcacggtgccctgcgggtcgccgctctgcgcgcaggcacccaacgcggcgtgcccgcccggcggcaaggcctgcggcttcagcctcacctacgccgactcctcgctgcaggccgcgctgtcgcaggactctctcgccgtcgccggcaacgccgtgaaggcctacaccttcgggtgcctgcagagggccactggcacggctgcgccgccgcaggggctgctggggctcggccgcggcccgctgtcgttcctttcgcagaccaaggacatgtacgaggccaccttctcgtactgtctccccagcttcaagtcgctcaacttctctggaacgctccggctcgggcgcaacggccagccgcagcgcatcaagacgacgccgctgctggccaacccgcaccggtcgtcgctctactacgtgaacatgaccggcatccgcgtgggcaggaaggtggtgcctatcccggcgttcgacccggcgacgggggcgggcaccgtgctggactctggcaccatgttcacccggctggtggcgccggcgtacgtggccgtgcgggacgaggtccggcgccgcgtcggcgcgcccgtgtcctcgctgggagggttcgacacgtgcttcaacaccaccgccgtcgcgtggccgcccgtgacgctgctgttcgacggcatgcaggtgacgctgccggaggagaacgtggtcatccacagcacgtacgggaccatcagctgcctggccatggccgcggcgcccgacggcgtcaacaccgtgctcaacgtcatcgccagcatgcagcagcagaaccaccgtgtgctcttcgacgtgcccaacggacgcgtaggcttcgcgcgcgagcgctgcaccgccgcttgatcagcttgctcgcgcgcctgcgcgcgggctcggattcgggttatatttagttaaacctacgttctacggttgtggacgtcatgcactgctgtcggagtgggtgattaataatttaactttccttttcttttcttttaccggtcagtgtaatctcgttgctcttcagatttaccatatgtgtttcacattcaccgatcgattgcttcaagtggcattatgtggtttaggggctgaatgattggggtctaaataatgtactgcatattccagttttggattaaagaggtgtttggttttagggactaatgtttagtcccttcattttattcctttttagtgtataaattgttaaatatagaaactaaaataaagttttagtttctatatttggtaattttggaactaaaatggaataaaatctagggactaaacattggtccctagaaaccaaacaccctctaagcacggtcgtcgtttaggcttgatatgcctaacaga

SEQ ID NO: 142258 - DNA, 587 bp, Zea Mays
ccccctccgtcatcccccatccacgcgcctcgccgagaatcccgccgcccacgcccgccccctccgacatcaacgccaacggcggcttcctgtcgtatgggaacatggagagctacgcgatgtgggtggcgaccggtgtggcgtcggccttcttcgcgtccctcgagcgctgctcctgcatccacctccacaccgcggaggacgacggcgacgaggaggaggagaacctcgaggaggcccgccgctccttctcccgcccgatccctgagtactactacgaccggtccggctcctccgcctccatcgccaagatgtgacctgaccggaccgcgcctccctctgcccaagaatgcgtggtgatacgatccatttcttgatctatgatgtgctcttgcttgattcattgggtctctagccaagaagatgaagaacaacaccctgtgtcctgtgtaacagttgatgagatatgtgactccccgtgtcccgtgagttgctgatgatttcgttcccctttcttttaatctttccccccttattatggggtcccaaattgatgcggagatctcgagcgactctgcaaatttcag

SEQ ID NO: 142259 - DNA, 123 bp, Zea Mays
ctttgagtctatgaacttgtgatctttatgaacttatttattgtgaacttggtatattgtgaacttgtgatctttgtacactttttatattataaaatttttaatcctggtgactttttatat

SEQ ID NO: 142260 - DNA, 1155 bp, Zea Mays
gacacgttcgcatcgcacgtgaacgccgcagcggctacctcgcctctgacaggcagggcccaccagaagtgggggagggagaggaagatatcccgtgcccagtgccctcgccgtcgccgacctaccacacccgtttccgggaggagagagagggcgggggcgaaggggatggcaaagcgccggcgccacgagttggcgccggtcgtggaggagctgatttcgccgatgaacagcctggacgacggctgcctcatgcacatcttcagcttcctgagcccaatcccagataggtataacaccgccctcgtttgccacagatggcgcttccttgcatgccaccctcggctatggctgcgtgtcgagaggccaatcagagatgcgatggagcctggagtttatccagatctcgaggctgctgtttctgctgctaggccgggtgacaccattcttattgcggctggtggttcccatgttgcatgtaacatccaaataaagaagcctatttgcataattggcgggggcgatcttcctgatgacactgtattgacctgctcacgtggtttcgacaacgcactggagtttctatcaacatgcaagattgcaaatctgactattagagcagaactcggatgctgcttgctgcatcgaggcggtagattgaccatccaggagtgtctgctgcagtgcgagcaaaaccctttggaccacctgtccttcccaataatcagcacagcgatagagtacgatccattctcatccctcaaggagcaagggcacggagtaacggtcgtccgcaccaggatcgaaggaggcgcgagggccgtcaggacgaacggcacactcgcgctgcgccatgtgcgggccatctattcccgcagctctgttttcttctggttcgaagtaggagagaaagtagaagcgcctgtacactagcaaaaaaacccgtgttcgttcttgtatgtcagtgttggtatcaccctagcgtgcgtttggtgaactcggacggctgcctcgtgtctgttgtgatctctttataattataataccccactgatgtttgaaccaacaaacaatggacatgttgcttttgtttttccttaaattgagccatggagtctgtagagtacagattcacaggtggcgatggcattgatg

SEQ ID NO: 142261 - DNA, 1297 bp, Zea Mays
gacacgttcgcatcgcacgtgaacgccgcagcggctacctcgcctctgacaggcagggcccaccagaagtgggggagggagaggaagatatcccgtgcccagtgccctcgccgtcgccgacctaccacacccgtttccgggaggagagagagggcgggggcgaaggggatggcaaagcgccggcgccacgagttggcgccggtcgtggaggagctgatttcgccgatgaacagcctggacgacggctgcctcatgcacatcttcagcttcctgagcccaatcccagataggtataacaccgccctcgtttgccacagatggcgcttccttgcatgccaccctcggctatggctgcgtgtcgagaggccaatcagagatgcgatggagcctggagtttatccagatctcgaggctgctgtttctgctgctaggccgggtgacaccattcttattgcggctggtggttcccatgttgcatgtaacatccaaataaagaagcctatttgcatagtaagttttgcctaccatgtccctgcgtcctggagatgtcaagtcgtcaacggagatttgatctgacaaatgcttcctgcacttggcgccaacatttgttttttgtgtggctgcaactgtgaacccatttaacttacatcagattggcgggggcgatcttcctgatgacactgtattgacctgctcacgtggtttcgacaacgcactggagtttctatcaacatgcaagattgcaaatctgactattagagcagaactcggatgctgcttgctgcatcgaggcggtagattgaccatccaggagtgtctgctgcagtgcgagcaaaaccctttggaccacctgtccttcccaataatcagcacagcgatagagtacgatccattctcatccctcaaggagcaagggcacggagtaacggtcgtccgcaccaggatcgaaggaggcgcgagggccgtcaggacgaacggcacactcgcgctgcgccatgtgcgggccatctattcccgcagctctgttttcttctggttcgaagtaggagagaaagtagaagcgcctgtacactagcaaaaaaacccgtgttcgttcttgtatgtcagtgttggtatcaccctagcgtgcgtttggtgaactcggacggctgcctcgtgtctgttgtgatctctttataattataataccccactgatgtttgaaccaacaaacaatggacatgttgcttttgtttttccttaaattgagccatggagtctgtagagtacagattcacaggtggcgatggcattgatg

SEQ ID NO: 142262 - DNA, 1157 bp, Zea Mays
cgagagccgagagagacaggagatgctttaattcgaacgcggttgcctcctccctcgagcccttctccttccttctttccttgcttcctccccccacagccacagtggcatatcgcatcacgccaaagcccatccgccggccgtagatcggctccggcaaccggcttcgaccgcggcctcccctctgaggattttcggcctagaggttccccatggcatcagttacttatattgatgatagccatgctgaggttattgatcctccaaagaatgaggaaatgctggatgccactgaacttgttggtgatcatattcagaattcaccaaaaccaaatgtggcaagctatggcaacgtgcgtgagctactggaatgccctgtgtgtttgagtgccatgtatcctccaattcatcagtgctccaacggacatactctgtgttctggatgcaagccaagggttcataatcgctgtccaacatgcaggcatgaactgggtaacataagatgccttgctctggaaaaggtggctgcatcactagagcttccatgcaagtaccagaactttgggtgcttgggcatatatccttactattgcaagctgaaacacgaatcgcaatgccaatacagaccatatacttgtccatatgctggatctgaatgcacggttgctggtgatattccgtatctagtaaatcacttgaaagatgaccataaggtcgacatgcacaatggaagcaccttcaatcatcgttatgtcaagtcaaatcctcatgaagtcgagaatgctacctggatgctcacggttttcagctgcttcggccagtacttctgcctgcacttcgaggctttccagctgggcatggcgcccgtgtacatcgccttcctccggttcatgggggacgacgctgaggccaagaactacagctacagcctggaggtcgggggcagcgggcgcaagatgacatggcagggcgtgcctcggagcatcagagacagccaccggaaggtccgggacagctacgacgggctcatcatccagcgcaacatggcgctcttcttctcgggtggcgacaggaaggagctcaagctgcgggtcaccgggaggatctggaaggagcagcagcagctcgacgcatgcggcgttgcgtgtgttccttct

SEQ ID NO: 142263 - DNA, 1542 bp, Zea Mays
cgagagccgagagagacaggagatgctttaattcgaacgcggttgcctcctccctcgagcccttctccttccttctttccttgcttcctccccccacagccacagtggcatatcgcatcacgccaaagcccatccgccggccgtagatcggctccggcaaccggcttcgaccgcggcctcccctctgaggattttcggcctagaggttccccatggcatcagttacttatattgatgatagccatgctgaggttattgatcctccaaagaatgaggaaatgctggatgccactgaacttgttggtgatcatattcagaattcaccaaaaccaaatgtggcaagctatggcaacgtgcgtgagctactggaatgccctgtgtgtttgagtgccatgtatcctccaattcatcagtgctccaacggacatactctgtgttctggatgcaagccaagggttcataatcgctgtccaacatgcaggcatgaactgggtaacataagatgccttgctctggaaaaggtggctgcatcactagagcttccatgcaagtaccagaactttgggtgcttgggcatatatccttactattgcaagctgaaacacgaatcgcaatgccaatacagaccatatacttgtccatatgctggatctgaatgcacggttgctggtgatattccgtatctagtaaatcacttgaaagatgaccataaggtcgacatgcacaatggaagcaccttcaatcatcgttatgtcaagtcaaatcctcatgaagtcgagaatgctacctggatgctcacggttttcagctgcttcggccagtacttctgcctgcacttcgaggctttccagctgggcatggcgcccgtgtacatcgccttcctccggttcatgggggacgacgctgaggccaagaactacagctacagcctggaggtcgggggcagcgggcgcaagatgacatggcagggcgtgcctcggagcatcagagacagccaccggaaggtccgggacagctacgacgggctcatcatccagcgcaacatggcgctcttcttctcgggtggcgacaggaaggagctcaagctgcgggtcaccgggaggatctggaaggagcagtgagtcgcgtgcatgcagtgcaggtgcaggcagcagctcgacgcatgcggcgttgcgtgtgttccttctccggtgttaccatgacctgaagcatggaatccaggaaccttgtagggtggtgtaggtggtagttggaatctttgagtcgtgggtggttcttgtgtcgttgtgtggtagtggtaccgactgatttagagaactggaggcaattctctcctttgctttgaacctgtcgagagctggtcatgatgggcacggctgtggactccatgaaatgtaaatgatgtatcccggctcactctgtctgtggatcagactcgctctctatcggcggaccacaattgttcctgagtttggccaatgagttaggtcccaaccattctctgctccagctggtacacgtagttttagtgagatctgtttg

SEQ ID NO: 142264 - DNA, 644 bp, Zea Mays
ggccatggttctcggtgaaccaaaactgcctaggtaacctgcactggtcaaccggtcaaaggacatggcacgactccactactgggcaccgaatccgttgacgatccctgcttgcatttgaccgtcgatgagattcatattcatggattttttacaatgcaaaaaaagtagggaaaaaaagatcttatcctttctcagtcccaatggatatgtcaaccattttccttgttacatgctctcatccacgcttgctagcataagcagaatcaagtgtcatcttagcaaaccgccttcttcgctgaatatagctacacagcacagacacctaactacccaagaatcaaaagaacatcacacttccagttgtatcaataaaaaaaatactcgctccgtttttttatttatcgcgttttagtttaaaaataaactagctgacaataaatattcaagaatcggatgtagtatattattatgaaagaaattgatggaagaatcccgattacttcacttcatctgggacctgcagccgcgaagcatctctaagagttttctatcaaagagttcttcaaatccccccaaaatactaggaggcactgaataagaccatctccagctgtcttcaataaatcactacgaaaataacc

SEQ ID NO: 142265 - DNA, 1164 bp, Zea Mays
atggcactgcctaaggacggctgcctcgatggtgccaagatcacagaggtaggaggggtcggctacaaggagcttcttgtcatggcgctgcctaaggacgacagcatcgatggcgccaaggtcgcagaggccatcggcgtcaagctgccagacgtcgggggggccataaggactattttgaatagcagagaggccagagaatttgccagtggggcactagctggtgctatgtcaaaggctattcttgcacctctagagactatcagatattgtgcttaccgtattttgagcttagtggttgggttgacaggaggcattaatggcaggacaagaatgattgtaggagtaggacctaggcacatttttggtagtttggtggatatcatccaacaaaacgggtggcaagggctttgggcagggaatacaatcaacatgctccgcatcattccaacccaagcagtcgaactcggaacatttgaatgcgtcaagaggagcatggcagaagcacaagagaaatggaaagaggacggatgcccaaagatacagcttggtaatatgaaaatcgagcttccacttcacctcttatctccagttgctattgccggtgctgctgctggaatagctgccacactggcgtgccatcctctcgaagttatcaaggatcgcttgactatcaaccgagaggtttatccaagcattggccttgccttccgcaggatctataagacggatggtataggtggtttctatgctggcctgtgtccaacgctgattggcatgattccttacacaacatgttacttctttatgtatgacacgatcaagacctcttactgccgcttgcataagaagtcgtctctgagccgccctgagcttctacttatcggcgctctttcaggtcttactgcaagcacaatcagcttccctctggaagtagcaaggaagcggttgatggccggcgccctgcaggggaagtgcccgcctaacatgattgccgccttgtcggaggtgatccaggaggagggcgtcatggggctttaccgcgggtggggggcgagctgcctgaaggtgatgccgaattctggcatcacctgggtgttgtacgaggcatggaaggatgttcttctggctgacaggaacaagccacgctctttagcgaactaa

SEQ ID NO: 142266 - DNA, 627 bp, Zea Mays
atgcccatgggaggaggggctggaacttgggcgccggccatggaagtcgcaggtggcgccatgggaggctggggacgctgctgctcgattgcagggagcaagcgaaggcggagtcttggtcagcatccattgaagggggagtggagactcacgcccgtggagcagggaagtgaagaacgccatggctggggcgtgtggagcagggaggcgaggatctgggcgttccctggccgggcagggaagagcaggggaggcagacgccatggaagggggcgagcagagctgctggctgctgatggccggagagcaagaggacgacggttggggaaaatggcagccagggggagctcacagccgtggaaaaatcatagggcagagaggagctcgcccatgcccgaggacaggcgccatggggaaactcgagcttgcagggaggggcaccacgatctgctgccgtgtgcgcgctggagcttggggaagggagatgccatggcggcaacagagggcatcggccaagccttgccgcactcctgcgcgcagctggtttccatgcgaggacgagcgctagtgaagacagcaaggggaggaagaagacagcgtggggaggaggaagagagtggcggctga

SEQ ID NO: 142267 - DNA, 1441 bp, Zea Mays
cccgtctcgtcctccttcctctcaagagtcgagacccaggcagccaggcttccagttccagccccacctcgcctctaccctcctcaaaccctacaccacgccccccggcccccagcccccggccttcgcccaacccgatagcgtagcgccggcgcagaaccggaccctgccgtgcggttgtccaccccgctcggcgccgcccgccgccgccgccgcctttgatgtctcctacctgcgacctcggcttcctctgcccccggtcgcagaagagctcccaagaggtcccccgagccaccgcttccggcgcccagcgattggcttccccaccgcagccgagatgagcagcggcggcgagaagatgttgttgtttgggtcctttacggaggacgagactaagttgttacagggtcagcccctcaaaagtccaactaaaagtgtcagcaaagaatgtgaacggacggagatccagtttggcaccctgaacttgtcagtgctgaatttagagaaaatatctacttcaagtgttgttcttcctgcaaaatcagcaaaaggggaaaccagtgccatcacgaaggagaatgcatgcaataatgaaaagaaagctgcagggtcaagcctttcaaacggtggaccagttctggctaatggatgccctcctgttaatgttcctgctaacaatggtttatttgagaatgtgaagacagaggctgttgtcccaccagttatacctgtcaaaatcatcagcaatccaacaccgcaaatgacgttggagacgcataaggatggcaccaaacccactgaaagcagaaagttaaataaggaaagggaaattactgaaaatggtagtccaattgtcgataaacacattgttgctgctccagcagaagaggcagtcacaagcctaaataagaaagcctctcagaacatgcccttgcttccacatggtttgaggaacacaggaaatatttgctttctgaatgcaactttgcaggcattgctttcatgctcgccttttgtctaccttttacaggatttgaggaaccgcaggatacctaaggttggctacccaactctgagtgcatttgttgagttgatatctcaattggatgtgcctgatgagtcagttatcaagaaaaatgagaaggttattactgttgccgcaaaaccacttaatcctgccatgtttgatgctgttctcagaaactttacaccagatgtgccggctggaataactgctcggcctaggcaggaagatgctcaagagtttttaagttttgccatggatagaatgcatgatgaactgctgaaacttaatggagatggtttgaattcaaaggaggggatggttgtttcatccgctgatgatgatgcttgggagacagttggacgaaagaacaaatctgcaatagttagaactcagagttttgtcccctctgagctt

SEQ ID NO: 142268 - DNA, 672 bp, Zea Mays
cggggctgggtttgttttcctaacacggctggatgaacaagaactgagctggaacaggaggaaaaactagctacgaggagaggagagagcaccggccgccttggccgaatcccccctctcctagtttttcagtcgtattgtatacacagaaacagactagccttgcttggggttacactaggcacagcagccgtggtggaggtggtggcccgccaggcgccatgagcaggcttctcctagcgaggctggcggatggccctgggggagctgaggctcagcgccgcgagcacgtcgaggacatcgtacccgggcagcagcgccgtcgctggttggtggtggacgacgtcgggcgcgtagaagaggtcgttggtgtcgaggaggtcgtcggggaggagcgcggcgacgtcgtcgcaggcggcctcgtggagctggcgctgccggaagcagtggtcccggaaccaggcggtggtgttgacgagctcccaccactcgggcgagaagtcctccacctgccggtacgccgccgggatgaagagcggcgcgttggggttcagcgacgacgccgttgtggtgctcatcctcttctccccgcctctgctcgctcctggatctctctgctcttcttgtccctagaacacagacaggcacggtgatggagtcaggtggtcgagc

SEQ ID NO: 142269 - DNA, 579 bp, Zea Mays
atgacgggggcgggggaggcgctgaggacggggaggacgcgaggatgggcggcagcgacgttcgcggtaggggcgagtggggcggggatggtgaacttgacgggcggcatgtggggggcgcgcggcgccgccgcgtcagtctcctcctggcgggggcgcatggtagcagtcgtggcaactatggaggggggcaccgacgatgcgcggggatcgatgtggggcgccgacgacgaacggacgcggcagatgtggatcctcatcggatgcgccgatggaagggggtcgatgcagagcgtggatgggggcacggcgcgtggatggaagggcgggcgacgacgacgagggggagaggatcacggggcgaggcataggcgagggtacggcgggggctggccgagattggcggtcgtggccagcgcgggatccgcggcgggggcgagatccggggcgggggcgatggggggacggtgcctgtgcggtcgtgggggggaggggcacggcaggggctggcgggctgcttccttccgcgcgcgtgggagggtgcgggggcaggcgggggcaaccaggtgtggacgctga

SEQ ID NO: 142270 - DNA, 1794 bp, Zea Mays
atggcgccctctcacaaggcgtttgagtgcaggcgcccggtgcgctgcttcacctgcaggtccttggggcatcgtgctgcatggtgcccgacccgtccgcaggtgcccctccgcaagtctgtgtcggtatgggatcgtctcggtccgctgccggttgtggccaggccacggtctgtcttgggtgccggtgcgacagctcaggtgcatgttggtgctaaggggcggcgccaccgcacgaggggcagaaggtctaaccctcccttggtgctggagttgtctgctcctcacgctccgatgcccgctgaggagggaacatcccctcagtccctggttgcagataatgcgtccgcccctcgtggttgcgtgctggagcgatcggatgcaattagcaggatggagttcaggttgcagcgctgtgccttgtttgtggtaatcaccggttcacggcctcgggtggctacggaggttttcgtggctgaggtggcggctgggtttggattgctagaagactccttctcagtgcaccgttcttcccctgaagattttgttttgatcctcaactccgaacaagcagcgattgaggtgtacaacaatggttcggtgttcaattctccctccggttcgttcaagttcatccggtggtctgggctagctcacgcggagggcggtgacggctcgtttcctgtgaccgcgtgtgctggccctgaggagcgtgggcgggaccccattgatggtggtgctctttttggtggagtcattctggctcccgaggtggatgctgtggtcgggcgtgctgagggacctggctccaatggtggttcgagccagggtccttcggtcggttttccgtcctcgtcgggtgggccgggccgatccctggagtctgtcgggccagttcggcctttggagattgttgggccggagattgagttgcatttgggtgggtccggtgtggactctggcgatctgcgcagcacttttgttggtggtggagtcgctccgtcgccggctgccggcgctactcccgtggcggcgaaggccggtatggtccccgctgcggatgccgacatgatccctccgtcgccgactgccggtgctcctcctgtgacgaaggatgccggcatggtccctgctgcggatgctggtttggtccctccgttgccagctgccgacgctgccgacatggcccctgctgcggttgggcccccctcttccttccctgctgctgcgagtggtggtttgcccgttgccgggtctggggaaccatcttcgtcgtcgactgcgccacctgtgctgacgggagggatgaagtcgctcacgatgatgttgggtcctggcacgaggatttggccccgttccccaatcacctactcccgtaagggacgaagggtggttgcttccccggtactttcaccagtccctgcccagccgaggttcgttgagaggatgtcgaaggctgttgattccatcctcgatgatcctccgatgcgacagcgccgtcccaggaaccatgctggtggtaccctccctcgccgcagcaggcgtcttgctggtgcaggggtggagcctccgtcgatccctcagcgtatcccattaggcaagctgcggattgtgaaggagctgggtctgctgcagactgatcacgctgaattgttgtctccaggtgtgttggatgattatgctaaggtgttcgagaaacgaccttcggttctgcagctcaaatctttggcgttgcttctcaacatgtccatcccagaggatttgttgggggagcctgcctcgagggagatctaa

SEQ ID NO: 142271 - DNA, 2117 bp, Zea Mays
ggacttgggcggaacagtaacagcacacgacgattcagaagttcagaatttctagcagacgacaggcaggggatttgctctccgtcactgacctcagcaagcagcgggctctccatggccttcagttccttgagaaccagcaaccaatccgctctcttaggcttcatcgccttcacccagtacgcgagcagcgcgccaagcctctcgtccccggggctcaggcacaccacgcgcgccaccagggccttgcagcggttgggcagcttcggagacaggacccggaccgcccgctgctgcggcccagtcaggtcggacccgaacgcgtcccacctaaaccttggcttgacctcgctcaccaccgcctgctctgcctcagcctccggggccagagctgacaactccccgacatggccaccggacgcgcaagcgcattggcgagcgggcctccagggattcgtgggtgtgatattgccggtgagcttggctcccgccgggcgcaaggccgggatggcgagggaggccatgggagtgggcggcgggacgacaccggagaggacgaggaggcgctatccaaagaaagatgatagatttgcatcgtccgttgatcgaatatgccgatccaacggctcctacggccccacgtgatgcacaaggaatatcctcaccgtagatgcctaatcgcacgggcgctcggtgtcctcagtgtacgactctggcaggtgggccccaccctctagagcgccactatatatataagcggcggtcgcgtctttggactcctctctgtctctctagggtttttgattttagccgccgccgctgctcatctcacatccctcgagaagacgcctgctcctcgccgatcgatacgatggccgtcttctccgacctccacaccgccgacggcctcaagtccctcgaggctcacctcgccggcaaaacctatgtgtctggtgactccattactaaggatgacattaaggtcttcgccgcggtgccgtcgaagcctggcgctgagtttcctaatgccgcccgctggtacgagaccgtctctgcggctgtagcctcaagattccctggtaaggctgttggtgtaaatctgcctgcgggatcagctcctgcggcagctgctcctgcggatgaggtttgttctccccatcccaagccatactgccacatctcttttttatttgtttacattaatctgtcttattggtcaaacaatgggccagtgctgttctgtttgatttagcatggtacaatttttcattgattggtcaaacaatggggaagaaattccagttgatctatgcttattttttattccattaaatatcaacctatttgtcgttgtgtgattaattgcatgccaagtatgctttatatcaatgcttcttttttgttgtcactgtcttctgcttttaattctcgacaggctgaggacgatgatgaccttgatctttttggtgatgaaactgaggaggacaagaaggcagctgatgagcgtgccgccgctgccaaggcctcttctaaaaagaaagaaagtggtaaatcctccgtccttatggatgtcaaaccatgggacgatgagactgatatgaagaagctggaggaggctgtccgcagtgtccagatggagggtctgacttggggagcatcaaagcttgtgcctgttggatacggcatcaagaagatgactatcatgttgacaattgtcgacgatcttgtgtccatcgacactctaattgaggaccaccttacgcaagagcccatcaatgagtacgtccagagttgcgacattgtggctttcaacaagatctagagttcagtttctgagtttgggcaacggcagcggctcagctcgtcaagtttgtgctgggatgccagtttatcccttctagtctattacagaaatgttgttcggagctgagtctattataaacatcttggtctgagtttattgttgagtggtgccagtttttttcaatatacatttatcttaaaaacagcggtactgatgtttttttgtctaaagttaatgagtttgcaatggttctgagtctaaagttcgagtcttcaaatctataccagagtgttaaatgacgttgtgggttttc

SEQ ID NO: 142272 - DNA, 1753 bp, Zea Mays
ggacttgggcggaacagtaacagcacacgacgattcagaagttcagaatttctagcagacgacaggcaggggatttgctctccgtcactgacctcagcaagcagcgggctctccatggccttcagttccttgagaaccagcaaccaatccgctctcttaggcttcatcgccttcacccagtacgcgagcagcgcgccaagcctctcgtccccggggctcaggcacaccacgcgcgccaccagggccttgcagcggttgggcagcttcggagacaggacccggaccgcccgctgctgcggcccagtcaggtcggacccgaacgcgtcccacctaaaccttggcttgacctcgctcaccaccgcctgctctgcctcagcctccggggccagagctgacaactccccgacatggccaccggacgcgcaagcgcattggcgagcgggcctccagggattcgtgggtgtgatattgccggtgagcttggctcccgccgggcgcaaggccgggatggcgagggaggccatgggagtgggcggcgggacgacaccggagaggacgaggaggcgctatccaaagaaagatgatagatttgcatcgtccgttgatcgaatatgccgatccaacggctcctacggccccacgtgatgcacaaggaatatcctcaccgtagatgcctaatcgcacgggcgctcggtgtcctcagtgtacgactctggcaggtgggccccaccctctagagcgccactatatatataagcggcggtcgcgtctttggactcctctctgtctctctagggtttttgattttagccgccgccgctgctcatctcacatccctcgagaagacgcctgctcctcgccgatcgatacgatggccgtcttctccgacctccacaccgccgacggcctcaagtccctcgaggctcacctcgccggcaaaacctatgtgtctggtgactccattactaaggatgacattaaggtcttcgccgcggtgccgtcgaagcctggcgctgagtttcctaatgccgcccgctggtacgagaccgtctctgcggctgtagcctcaaggctgaggacgatgatgaccttgatctttttggtgatgaaactgaggaggacaagaaggcagctgatgagcgtgccgccgctgccaaggcctcttctaaaaagaaagaaagtggtaaatcctccgtccttatggatgtcaaaccatgggacgatgagactgatatgaagaagctggaggaggctgtccgcagtgtccagatggagggtctgacttggggagcatcaaagcttgtgcctgttggatacggcatcaagaagatgactatcatgttgacaattgtcgacgatcttgtgtccatcgacactctaattgaggaccaccttacgcaagagcccatcaatgagtacgtccagagttgcgacattgtggctttcaacaagatctagagttcagtttctgagtttgggcaacggcagcggctcagctcgtcaagtttgtgctgggatgccagtttatcccttctagtctattacagaaatgttgttcggagctgagtctattataaacatcttggtctgagtttattgttgagtggtgccagtttttttcaatatacatttatcttaaaaacagcggtactgatgtttttttgtctaaagttaatgagtttgcaatggttctgagtctaaagttcgagtcttcaaatctataccagagtgttaaatgacgttgtgggttttc

SEQ ID NO: 142273 - DNA, 1829 bp, Zea Mays
ggacttgggcggaacagtaacagcacacgacgattcagaagttcagaatttctagcagacgacaggcaggggatttgctctccgtcactgacctcagcaagcagcgggctctccatggccttcagttccttgagaaccagcaaccaatccgctctcttaggcttcatcgccttcacccagtacgcgagcagcgcgccaagcctctcgtccccggggctcaggcacaccacgcgcgccaccagggccttgcagcggttgggcagcttcggagacaggacccggaccgcccgctgctgcggcccagtcaggtcggacccgaacgcgtcccacctaaaccttggcttgacctcgctcaccaccgcctgctctgcctcagcctccggggccagagctgacaactccccgacatggccaccggacgcgcaagcgcattggcgagcgggcctccagggattcgtgggtgtgatattgccggtgagcttggctcccgccgggcgcaaggccgggatggcgagggaggccatgggagtgggcggcgggacgacaccggagaggacgaggaggcgctatccaaagaaagatgatagatttgcatcgtccgttgatcgaatatgccgatccaacggctcctacggccccacgtgatgcacaaggaatatcctcaccgtagatgcctaatcgcacgggcgctcggtgtcctcagtgtacgactctggcaggtgggccccaccctctagagcgccactatatatataagcggcggtcgcgtctttggactcctctctgtctctctagggtttttgattttagccgccgccgctgctcatctcacatccctcgagaagacgcctgctcctcgccgatcgatacgatggccgtcttctccgacctccacaccgccgacggcctcaagtccctcgaggctcacctcgccggcaaaacctatgtgtctggtgactccattactaaggatgacattaaggtcttcgccgcggtgccgtcgaagcctggcgctgagtttcctaatgccgcccgctggtacgagaccgtctctgcggctgtagcctcaagattccctggtaaggctgttggtgtaaatctgcctgcgggatcagctcctgcggcagctgctcctgcggatgaggctgaggacgatgatgaccttgatctttttggtgatgaaactgaggaggacaagaaggcagctgatgagcgtgccgccgctgccaaggcctcttctaaaaagaaagaaagtggtaaatcctccgtccttatggatgtcaaaccatgggacgatgagactgatatgaagaagctggaggaggctgtccgcagtgtccagatggagggtctgacttggggagcatcaaagcttgtgcctgttggatacggcatcaagaagatgactatcatgttgacaattgtcgacgatcttgtgtccatcgacactctaattgaggaccaccttacgcaagagcccatcaatgagtacgtccagagttgcgacattgtggctttcaacaagatctagagttcagtttctgagtttgggcaacggcagcggctcagctcgtcaagtttgtgctgggatgccagtttatcccttctagtctattacagaaatgttgttcggagctgagtctattataaacatcttggtctgagtttattgttgagtggtgccagtttttttcaatatacatttatcttaaaaacagcggtactgatgtttttttgtctaaagttaatgagtttgcaatggttctgagtctaaagttcgagtcttcaaatctataccagagtgttaaatgacgttgtgggttttcaaa

SEQ ID NO: 142274 - DNA, 1578 bp, Zea Mays
ggacttgggcggaacagtaacagcacacgacgattcagaagttcagaatttctagcagacgacaggcaggggatttgctctccgtcactgacctcagcaagcagcgggctctccatggccttcagttccttgagaaccagcaaccaatccgctctcttaggcttcatcgccttcacccagtacgcgagcagcgcgccaagcctctcgtccccggggctcaggcacaccacgcgcgccaccagggccttgcagcggttgggcagcttcggagacaggacccggaccgcccgctgctgcggcccagtcaggtcggacccgaacgcgtcccacctaaaccttggcttgacctcgctcaccaccgcctgctctgcctcagcctccggggccagagctgacaactccccgacatggccaccggacgcgcaagcgcattggcgagcgggcctccagggattcgtgggtgtgatattgccggtgagcttggctcccgccgggcgcaaggccgggatggcgagggaggccatgggagtgggcggcgggacgacaccggagaggacgaggaggcgctatccaaagaaagatgatagatttgcatcgtccgttgatcgaatatgccgatccaacggctcctacggccccacgtgatgcacaaggaatatcctcaccgtagatgcctaatcgcacgggcgctcggtgtcctcagtgtacgactctggcaggtgggccccaccctctagagcgccactatatatataagcggcggtcgcgtctttggactcctctctgtctctctagggtttttgattttagccgccgctgccaaggcctcttctaaaaagaaagaaagtggtaaatcctccgtccttatggatgtcaaaccatgggacgatgagactgatatgaagaagctggaggaggctgtccgcagtgtccagatggagggtctgacttggggagcatcaaagcttgtgcctgttggatacggcatcaagaagatgactatcatgttgacaattgtcgacgatcttgtgtccatcgacactctaattgaggaccaccttacgcaagagcccatcaatgagtacgtccagagttgcgacattgtggctttcaacaagatctagagttcagtttctgagtttgggcaacggcagcggctcagctcgtcaagtttgtgctgggatgccagtttatcccttctagtctattacagaaatgttgttcggagctgagtctattataaacatcttggtctgagtttattgttgagtggtgccagtttttttcaatatacatttatcttaaaaacagcggtactgatgtttttttgtctaaagttaatgagtttgcaatggttctgagtctaaagttcgagtcttcaaatctataccagagtgttaaatgacgttgtgggttttcaaatctatactcggtgtagtaataacgatgaatcaaacaatgacctgacgtgtaaatcgcgtttatgctcaaaccggccaaattctggggtcaaggtttttttagagcaagaggccgatgttctaatctaatgtattgaagttgccagattttctgagc

SEQ ID NO: 142275 - DNA, 423 bp, Zea Mays
atgtatgatgtggctatagcgagaaatgagaacgcctcaacaataggccccactatcccattactcgatctaagtagttccaaggggtcagaaacagtgctgctccctgcaaggtctggaagtgtccccaagattactccatcccatactaggaacagagccaggggtatggcagtacccgccacaatagctgttcgtacttttgacaggtctccctccaaatttgtacagagaacaggaaccacattctggtatacaaatgaaagagcaattattggtatactttgtggagcagcagcaaaattcgcttcaagaagagaactccactgtaggtttccacttgccactacaacaagagaagtgaaggatgctaggatgccgactaccagaactccatttactgcaccaatcaatcgctggctg

SEQ ID NO: 142276 - DNA, 5101 bp, Zea Mays
atgtatgatgtggctatagcgagaaatgagaacgcctcaacaataggccccactatcccattactcgatctaagtagttccaaggggtcagaaacagtgctgctccctgcaaggtctggaagtgtccccaagattactccatcccatactaggaacagagccaggggtatggcagtacccgccacaatagctgttcgtacttttgacaggtctccctccaaatttgtacagagaacaggaaccacattctggtatacaaatgaaagagcaattattggtatactttgtggagcagcagcaaaattcgcttcaagaagagaactccactgtaggtttccacttgccactacaacaagagaagtgaaggatgctaggatgccgactaccagaactccatttactgcaccaatcaatcgctggctgcggtcatcaataattcaatacaacttgttttagttcatatatattataattgtcttggggaagtagtaattaataatcaattataacataatcaagtaaaaatttaactaattccacactatggataggatccaaaatcctaccacgactgtgttggttgtatccttgtttcttgtgggtttcatctctagcctatcccaacttacttgggacaaaaggttatattattgttgtatttatcctctcctaacaagaatcattcatgattctatttttatggaagcaatataaaatacctaaggaatgaaaattcttggcatttcacccttaaatgttggcgtggcctagccactagcacaactctaacgcctatagatgacaccaatcataacatcttcccacctattcgaacagcttatcctacaactgaacatcagggtagaggtctttgaagtgataaagtggctcccaagtggtgtcgtcaccgagcacgccacaccattgaatgaggacatgctaggtgccccaacgtagttgggcacattacgcataacacattctagcacaggatatcaaccgtcctgtacgggcatcaaggcggtggagtcgttgaagagtccccgggaatggctatagtagccccacatggaacacatcatggagacgagcaccctctagaagctgaatgcgacaagccacctacccgacatgctctagcacctagaaggggttggcacaacatggcccgagcttgcccttgtaccaggactccagcgagtgcatcggtcggtggagacagagccacacccaatcacccaccgcgaacacgtgctcatgatggcgattgtcgtagtagcgcttggcataccgcttggcctgaagaagacgctcacgaaccaccacgaggaagacattgcaatcgcataggaggtgttcgccgcctccatctgatctacccctgcgacgtgtggaagtagaggtggcggggtcagttgtatacaccacctagaatggtgtggtgtgcatcgccatgtgaaacaaaatattatagcaatactccgtacaaggaagttagtcaactcaggcacacagacaatccctcgtggcgcaacagaggtacatgacgattgttgatgacctccgactgaccgtctgtttgagggtggaacaccatgctcaagcaaagcttgataccgaccatcttaaagaggttgtgccacatgtgactagtgaagaccggaccaaagtcgtcggaggtggggaatccgtgtagatgaacaacgccctcgaagaaggcacgagcgaccgaggcagccacgtacgagtgcctgagggcaatgaagtgtgcgtacttagagaagcagtcaatgacggtgagaatgatgaacatcccatggacttctgggaggcccttgatgtagtccatcgagatattttcccacacctgagaaggcaagtcgagggctgaaggagaccgaccgactatagggttagtgtcttattgcgctggcatgtaacgcaagcgcgaacgtagtcttggatgagcacccaatcgctggggatgtagaaatccgtgcatggtcgttggagggtcttctatgttccctcgtagctggtggtatggggccagagcaagcatctgttggtgcaagttgggctcctacggcacgaagatgcacttaccgtaggccaggaaggtgtcgatggcccccagggtgccccgaggaacacaccctgtagctactggtggaggtagtctacctcattgtccatggtggcggcagggatcttgtcaagtaggcgaaacaagggccccgagagagcgtgcagctctacggagtctgtggtggtgtcggtgtcatggcgtgagatggcgtccatcgccaagttaaggcgacctgcggacctgggcaatactcgatcgcgaaatcaaagtcgaacagcttgttgatccactggtgctggggatcgatggaccactagtccaagaggaacttgaggctgtagtggtcggtgcggacgaggaagcggcaaccacagaggtacaatcaccaatgccgcacagcctagactaggctgatgagctcatgctcatacgctgccaatgggcaagagctggccgaaaaaggccatggaaccaccccctagtggagaatggcgttgaaccccaaacctgaaggtttgcagtccatgacaaactgacggttgaagttcgacatctacaagagcgacctcatggagaggacgcgcttgagagccacgaacgccactgcaaccttaggcgtccaggcaaaggtatccttgcgcaacagctatgtcaagggcgcgatgatcatgtggaagtcttggatgaacttctagtagtagtcgtctatccccaagaagctgcacacgctctagggtgagcggggctctagctaggacaagatggtgtccactttgtcgctgcccatggcgatgctaccaacagaggtaacatggctgagataggctactaatggtgccccaaaggagcactttgtctacttctagtggaggttttgtgtatgtaggttatcaaggacaagacgaacatgttgcaggtgcttggaccacgacgaattatagatcaaaatgtcgtcgaagaagatgatcatgaacatgcgaaggaagggatataatacgtcattcatgactccataaggatggggaagttgtccttggacgtcttgttttagcacatgttggtcgatgtagaacctccaggagccctctaccttcttgaccaacagcaccggacgacaagaacggagaagtgcccggcctgatgatgcctttctcaagcatggtggtgcactgctgcttgggctcatccttctacagttgggggtagcaataagggccacctcaacggtttgtccttgggtgcctcgtcgagtaggtagtcagcagcctcaaaatagaacaaacactaacactggtggtcccatagatacagatcatcgcagttgtaacatagcccttgtcgatggtgctttaccatcttggccagtgtgaggcgacaaaactagcattaggaataggcaagatcaccattagaggtggcctaagtatagccatgcacgcagtgggcattggggaggccgggcggcctgttgcaccggggctggcatggtggccgcaacgcgacgctcgtaggcttgcacctggtgcatggccatctacatgtcgtatgatttctggagctcgatgttgacccaaatgtgttccagtagacccccaatgaagaggtcgaccttcttgaccgacagaagattcggtgtttggcacaccagcgtgttgaagtggtcatagtagtcttggaccacgacatggaaggggggcctcaccagttcaacgagacagttgctgcggatggtcgaaccacatatgacaaagatctttgagctgctcccatgatgacatgccctcatcttgctctagagtatagtaccatgtctaggccacacccacgaggtggtacgatgtgagctagatccgttccgaggtaagcgtacgctgcccacggaagaactgctcacaatggttgagccagtttaggaggtcctccttgctgttgtaggtggagaagtagaacttcctgaagcaggggacgcccaatccaacgtgcatgatagtatcaatagcgaagggcgccgacgtagatgagaaaggcaccccttgcagaaatataggtagccaggatggcgaggaggagaagttgatcgggtggacgggaagggggggaaacggtggttgttgcaatgtacaagagagtgtcgggcgctgcagcgggcagggtagtggagggcgacacatcagtggcagtggataaggaaaggaacatcgtcgcctcttaccccgcatcccgtaggggaaaacctggtcatggcacccacagaggaggatgcttactagtgctctagtgggtggagagattggccaccttatcgtctagggcttttgtggtggtgtcggggaacgacgatggtgggatcagcagatgcttcaagcatcatcacctcacatctccgataccagattgataggatctaggatcttaccgcaattgcgtaggatgtacgggtaagagatcgatggactgggcttgtaccccgtgggcgcacaagaatcatggttgcacacagggagcaggcgagcaagagggatagacgtgggagacgacccttgaggcgaggcaagataattgccttgctttctttattctaaaactatttagaggtttttatcctctcctaataaaaatcaaccatggccctatttttatgaaaacaataaaaaatattaaaggaagaaaattctcaggcatttcgccctgactgccggcgtggcctagccactggcacgacctcaccgcgtataggtgatgctggttataacacacacacaaagagtttgagaattacttgtacaatcatctttttaatgctaggaagtcactcaacataaaataaggattcctaagtgcattgcatgtaatcagtaggcaccacaacttatatcttggatataccttgtgaggaaccttcgagtctaatcaaaaggctaaaaactaaaaatgagttgttccctcaaatgtttacaattcttgatgtccaggatgtctgatacattagtaattgacaattaccttccaaag

SEQ ID NO: 142277 - DNA, 1816 bp, Zea Mays
catctgatcacagtcaatggggtcgtttttctcagttttccaaggataagcttgacaaacttatttgtgaaggtactttacaccatgacattatacgttttcattactatgttcagtaccatctatatatacaattatctgaggcagcaacatatgcaagaaagaaaaatgttatcctgaaaggtgatttacctattggtgttgataggaatagtgtcgatacatgggtatacccaaccttgtttcgcatgaataccgctactggagcgcctcctgattattttgacaagaatggacaaaattggggttttcctacatataactgggaggagatgtcaaaggataattatgggtggtggcgagctcgtctgacacagatggcaaagtacttcacagcatacaggatagaccacatcttgggtttctttaggatatgggagcttccagatcatgctgcaacaggtttagttgggaaatttagaccttccatccctcttagtcaggaggagcttctaagtgaaggtctatgggattttaatcggatgagccaaccatacattcgtcaggaaatactggaggagaagtttggatccttttggacagtcattgcagccaattttctaaatgagtaccagaagcagtgttatgagtttaaagaagattgcaacacagagaaaaagattattgtaaagattaaaacaagtgctgaaaagtcactgtgggtagagaaagaggacaatatccgccgtggccttttcgatttactacagaatattgtccttatcagagatccagaggactccacaaaattctatccccgttcaacctggaagacacatcaagttttagggaccttgatgaacacagcaaaaatatcctcagaagattgtattataactattattttgttcgccaagaaaatctctggcgccaaaatgccctgaagactttgcctgtcctgctgaactcgtcagatatgttagcatgtggagaggaccttggccttatccctgcttgtgttcaccctgttatgcaagaactggggttgattggattgcgtatccaaagaatgcctagtgaaccaaacttggaatttggtattccttctcagtatagctatatgacggtttgtgctccctcatgtcatgactgctctacattacgtgcttggtgggaagaagatgaaggaagaagaagtcgtttctacaagactgtagttggcagtgatgaggagcccccatctcgttgcaccccggaagtagtgcacttcattgttcagcagcattttgacgctccatcaatgtgggcaatctttccacttcaggacctccttgcactgaaagacaagtacaccacaagaccagcgccagaggaaacaatcaatgaccccactaacccaaagcactattggagattccgtgtccacgtgacattggagtccctgctgaacgacaaggacatccaggcaaccatcaaggacctggtcacaagcagtgggaggtccttccccggaaagaaggcggaaggtgccgacgagagcggggagaagctgtccaaggtgcagctgaatggtaaagcttaggaaaggattgcgagagctgctggaagtgaccacggttacaagtaaataaatagaataaggcgacagattgcatcaccgtgttgatccaggtgatgctgtttctggtaggaaattcttacccatgtgatgttctttcaactctggaaataagaagcaccctctaccaagtcagaaagtgaaataatccatccagtgtcggttttcattaatagaattttcgttgaccgcccagtt

SEQ ID NO: 142278 - DNA, 122 bp, Zea Mays
atgtagtcggattataaaactaatttgtcagccgaagattaaaagacgagacgaatctagtccagttggttgggtctatatttcatactcctatttaaaagtcaaacgtttgatgtgacccg

SEQ ID NO: 142279 - DNA, 1247 bp, Zea Mays
gccgaaacacagctagctcgctgtggcaggctggcagcatgttccgatctgccgtgcagcgtctcgtcagggccagcgggaagagtacggccgacccagccgccgccgcgtccgctttcttcctcagtcgcttctccgcggcggccgggccgccatcgccacagaggttctccttctccaatctccatctcaccgagctagctagctagcgctagccacctgctggaatccttcatcccgcatgccactgcacggtcatgtctgactcctctcgtccgtcgtcgctaggctggctggaaaggtagcgctgatcatcggcagggcaactggggcgccacgtcgccgcggagctgagcctgccgggggggcccggcccggcggcggccgtccactacacccgctgcgacgtgaccgacgaggcgcaggtcgcggcggcggtggacctggccgtggagctgcacggccgcctcgacgtgatgctcagcaacgccggcatcagcggcagcctggcgccggcccccgtggcggcgctggacctggccgacttcgaccgcgtcatggccgtgaacgcccgcgccgcggtggcgggcgtcaagcacgcggcgcgcgtcatggtgccccgccgcgccggcagcatcgtgtgcacggccagcgtggccggcgtgctgggcggcgtcgcgctgccgccctacagcgtgtccaaggccgccgtgctgggcctggtgcgcgccgtggccgggcagctcgcgcggtcgggcgtccgcgtcaacgccatctcgcccacctacatccccacgccgctcgtcatgggcgccatggccgagtggttccccggcgccaccgccgaggagcgcaggcggatcgtggagaaggacatgaacgagatggacggccccgtgctccaggtggaggacgtggccagcgccgccctgtacctggcgtccgatgagtccaagtgtgtcaatggccacaacctcgtcgtcgacggcggcttcacggtggggaaggcgcccaatatgccgccgcctggaaactactgagcagctaccacttgccaatctaaaggcacggtggatgactttctattgagcatttctttttcttttgcgattggaaaacttaggtaatatagttaaaagaactcgatcacgcgttttctttccatgtgcaagaacatggctagcttaatggtacacagtctgtgttgttggctctatagatctatgaaaagcttccagcatgactgt

SEQ ID NO: 142280 - DNA, 1116 bp, Zea Mays
cagctagctcgctgtggcaggctggcagcatgttccgatctgccgtgcagcgtctcgtcagggccagcgggaagagtacggccgacccagccgccgccgcgtccgctttcttcctcagtcgcttctccgcggcggccgggccgccatcgccacagaggctggctggaaaggtagcgctgatcatcggcagggcaactggggcgccacgtcgccgcggagctgagcctgccgggggggcccggcccggcggcggccgtccactacacccgctgcgacgtgaccgacgaggcgcaggtcgcggcggcggtggacctggccgtggagctgcacggccgcctcgacgtgatgctcagcaacgccggcatcagcggcagcctggcgccggcccccgtggcggcgctggacctggccgacttcgaccgcgtcatggccgtgaacgcccgcgccgcggtggcgggcgtcaagcacgcggcgcgcgtcatggtgccccgccgcgccggcagcatcgtgtgcacggccagcgtggccggcgtgctgggcggcgtcgcgctgccgccctacagcgtgtccaaggccgccgtgctgggcctggtgcgcgccgtggccgggcagctcgcgcggtcgggcgtccgcgtcaacgccatctcgcccacctacatccccacgccgctcgtcatgggcgccatggccgagtggttccccggcgccaccgccgaggagcgcaggcggatcgtggagaaggacatgaacgagatggacggccccgtgctccaggtggaggacgtggccagcgccgccctgtacctggcgtccgatgagtccaagtgtgtcaatggccacaacctcgtcgtcgacggcggcttcacggtggggaaggcgcccaatatgccgccgcctggaaactactgagcagctaccacttgccaatctaaaggcacggtggatgactttctattgagcatttctttttcttttgcgattggaaaacttaggtaatatagttaaaagaactcgatcacgcgttttctttccatgtgcaagaacatggctagcttaatggtacacagtctgtgttgttggctctatagatctatgaaaagcttccagcatgactgt

SEQ ID NO: 142281 - DNA, 562 bp, Zea Mays
cgatccaagtgttcactagaattacctttgccaagatcatccggatcagcatggacaacaacagctcggccaatgatcgagtggggtccagcaagaggtatctgcagttcaaatattgagacaaaaataccatcttctcccgctgtcacattcccaagatcaccggcatggcggtcctcatcttccggtgcgccatgctccttgccaacaggattgaagtgtaccagtcgacatgcagccgttggtggtgtcgccaagcgcgtgcacatggaacccatggagccctggcttgaggccagagatacttccagtcacggtggtcggacctacccatgaagcagatattctcgttagaccacagagatcctcattgtaagtcaaaaacatgtgccgggaattaccatccccctcctgtgaaaagaagatggtgcccttgacatcagtgccggcgaggacagcaactgccttcaccattgtctctgtgatctgccaccaaaaacccacaaagggaaaaaagttcatctcaagagggcatggtggcaagatattaagatcggaagtg

SEQ ID NO: 142282 - DNA, 2520 bp, Zea Mays
ccgaaagagcttcgcgcgaaaccatccgaggcctccagtccagattcccaagccgccttccgttcggccactcgcgcgacggttcgttccgccgccgccgccgccaacgccaacgctcggtcgtgtctctgctgtgaatcttccctccgccgctcgccgaactttccgccgcttcctcggggaaagaaaagcgccgaattttgcttcctttttattccccccctcctcctccgcgcgcctgatctattccgattctccggacgcggccagcgcccagcgtcgtctatctccggccgtcagagtttttcctgggttgtttgggcggccaaaattagccacccccctttcttccccctccttgcagtaagttaaggccgggggctcggctaaacttcgcgccttctccgcggccgcgcgcgcgggggattggattcttctcccggccgcccttctgcctacctgcctgccggattggaggagggcgggaggcatggggctcggcgtggtggcggagctggtgcggctgggcgtgctgagctcgacctccgaccacgcgtcggtggtgtccatcaacctgttcgtcgcgctgctctgcgcctgcatcgtcctgggccacctcctggaggagaaccgctgggttaacgagtccatcaccgcgctcatcatcgggctgtgcaccggcgtcgtgatcctgctgaccaccaaggggaagagctcgcacatcctcgtcttcagcgaggacctcttcttcatctacctcctacctcccatcatcttcaatgccgggttccaggtgaagaagaaacagttcttccggaatttcatgacaatcacactattcggtgctgttggcacaatgatatccttcttcacaatctctctcggcgcaatagcgatattcagcagaatgaacattgggacgctagatgtcggggattttctcgctattggagctatcttttctgcaacggattctgtgtgcacgctgcaggtcctccatcaggatgagacgccctttctgtacagtctcgtgttcggtgagggagtcgtgaacgatgccacgtctgttgtgctcttcaacgcactccagaacttcgatcttaaccacatcgatgtagccgttgtgctgaatttcttgggaaacttctgttacttattcgtgtcaagcaccttacttggagtgtttactggattgctcagtgcctacataattaagaagctatatataggaaggcattccactgaccgtgaggttgcgcttatgatgctcatggcttacctctcctacatgctggccgagctgctagatctgagtggcattcttaccgtattcttctgcggcatcgtgatgtcgcattacacctggcacaatgtgacagagagctcaagagtcacaaccaagcatgcctttgctactttgtccttcatcgctgagacttttctcttcctgtatgttgggatggatgccctcgacatcgagaagtgggagtttgccagtgacagccccggtaaatccatcggcataagctcgattttgctagggttggttctggtggggagagctgcatttgttttcccattgtcgtttttgtccaacctgacaaagaagtctccattggagaaaataacatttagacagcaaattgtaatatggtgggccggactgatgagaggtgccgtgtccattgctctcgcttacaacaagttcacgagatctggacacactgagctgcacggcaacgcgataatgatcaccagcacgatcactgtggtcctgtttagcactatggtgtttgggatgatgacgaagccattgatccggctgctgctccctgcctgcagcaacacggccacctccgagccgtcctcacccaagtccctgcactcgcctctcctgacgagcatgcagggctcggacatcgagacggggtcggcacagattgtgaggccgtccagcctccggatgctcctaagcaagccaacccacacggtgcactactactggcgcaagttcgacgacgcgctcatgcggcccatgtttggcggccgcgggttcgtgcccttctcccctggatcgcccactgagcagagcgtccacgacggacggtgaacaaagccgcgtctgacaccaagagacgagcaggacatgcttttggctgctaatcgtcagatgatgatgtttttgtttgttgacagcttctgatggtgcgttagcaatggcaacgaggtgtcagttggtttggattagcaggatgaagaagagcaaccctggtaactagggcggggggattgagtttgtgcatgacaaggctgcaaacttttgtatgtagataaaaaaaacacccatttggccatttgtattgtatgttattgtatgtaagctagcaggcctgtacaactgcttttaggtcttcgtttggatgggcgaaattctggcaaatagcagcacatccactctgtgttctgatctaagcatcttggtttgattttgaaatggactcggtgtgtaggatagctttt

SEQ ID NO: 142283 - DNA, 2654 bp, Zea Mays
ccgaaagagcttcgcgcgaaaccatccgaggcctccagtccagattcccaagccgccttccgttcggccactcgcgcgacggttcgttccgccgccgccgccgccaacgccaacgctcggtcgtgtctctgctgtgaatcttccctccgccgctcgccgaactttccgccgcttcctcggggaaagaaaagcgccgaattttgcttcctttttattccccccctcctcctccgcgcgcctgatctattccgattctccggacgcggccagcgcccagcgtcgtctatctccggccgtcagagtttttcctgggttgtttgggcggccaaaattagccacccccctttcttccccctccttgcagtaagttaaggccgggggctcggctaaacttcgcgccttctccgcggccgcgcgcgcgggggattggattcttctcccggccgcccttctgcctacctgcctgccggattggaggagggcgggaggcatggggctcggcgtggtggcggagctggtgcggctgggcgtgctgagctcgacctccgaccacgcgtcggtggtgtccatcaacctgttcgtcgcgctgctctgcgcctgcatcgtcctgggccacctcctggaggagaaccgctgggttaacgagtccatcaccgcgctcatcatcgggctgtgcaccggcgtcgtgatcctgctgaccaccaaggggaagagctcgcacatcctcgtcttcagcgaggacctcttcttcatctacctcctacctcccatcatcttcaatgccgggttccaggtgaagaagaaacagttcttccggaatttcatgacaatcacactattcggtgctgttggcacaatgatatccttcttcacaatctctctcggcgcaatagcgatattcagcagaatgaacattgggacgctagatgtcggggattttctcgctattggagctatcttttctgcaacggattctgtgtgcacgctgcaggttggttggttggttggttgctggaacaatctcatggacatttcatttgaaacagtatatcttgcctcttgaggggaacctggtccctgcttagtaaattatttgacctgtaatcaccattttactggaaacaggtcctccatcaggatgagacgccctttctgtacagtctcgtgttcggtgagggagtcgtgaacgatgccacgtctgttgtgctcttcaacgcactccagaacttcgatcttaaccacatcgatgtagccgttgtgctgaatttcttgggaaacttctgttacttattcgtgtcaagcaccttacttggagtgtttactggattgctcagtgcctacataattaagaagctatatataggaaggcattccactgaccgtgaggttgcgcttatgatgctcatggcttacctctcctacatgctggccgagctgctagatctgagtggcattcttaccgtattcttctgcggcatcgtgatgtcgcattacacctggcacaatgtgacagagagctcaagagtcacaaccaagcatgcctttgctactttgtccttcatcgctgagacttttctcttcctgtatgttgggatggatgccctcgacatcgagaagtgggagtttgccagtgacagccccggtaaatccatcggcataagctcgattttgctagggttggttctggtggggagagctgcatttgttttcccattgtcgtttttgtccaacctgacaaagaagtctccattggagaaaataacatttagacagcaaattgtaatatggtgggccggactgatgagaggtgccgtgtccattgctctcgcttacaacaagttcacgagatctggacacactgagctgcacggcaacgcgataatgatcaccagcacgatcactgtggtcctgtttagcactatggtgtttgggatgatgacgaagccattgatccggctgctgctccctgcctgcagcaacacggccacctccgagccgtcctcacccaagtccctgcactcgcctctcctgacgagcatgcagggctcggacatcgagacggggtcggcacagattgtgaggccgtccagcctccggatgctcctaagcaagccaacccacacggtgcactactactggcgcaagttcgacgacgcgctcatgcggcccatgtttggcggccgcgggttcgtgcccttctcccctggatcgcccactgagcagagcgtccacgacggacggtgaacaaagccgcgtctgacaccaagagacgagcaggacatgcttttggctgctaatcgtcagatgatgatgtttttgtttgttgacagcttctgatggtgcgttagcaatggcaacgaggtgtcagttggtttggattagcaggatgaagaagagcaaccctggtaactagggcggggggattgagtttgtgcatgacaaggctgcaaacttttgtatgtagataaaaaaaacacccatttggccatttgtattgtatgttattgtatgtaagctagcaggcctgtacaactgcttttaggtcttcgtttggatgggcgaaattctggcaaatagcagcacatccactctgtgttctgatctaagcatcttggtttgattttgaaatggactcggtgtgtaggatagctttt

SEQ ID NO: 142284 - DNA, 1848 bp, Zea Mays
aagccttgctctgaaactgaatgatctgttgaatccatgacgccaatcccttctagtttgatacttctttgacgtataatcaagattctcacagacgtttcctcacctcaccaggttccaggtgaagaagaaacagttcttccggaatttcatgacaatcacactattcggtgctgttggcacaatgatatccttcttcacaatctctctcggcgcaatagcgatattcagcagaatgaacattgggacgctagatgtcggggattttctcgctattggagctatcttttctgcaacggattctgtgtgcacgctgcaggtcctccatcaggatgagacgccctttctgtacagtctcgtgttcggtgagggagtcgtgaacgatgccacgtctgttgtgctcttcaacgcactccagaacttcgatcttaaccacatcgatgtagccgttgtgctgaatttcttgggaaacttctgttacttattcgtgtcaagcaccttacttggagtgtttactggattgctcagtgcctacataattaagaagctatatataggaaggcattccactgaccgtgaggttgcgcttatgatgctcatggcttacctctcctacatgctggccgagctgctagatctgagtggcattcttaccgtattcttctgcggcatcgtgatgtcgcattacacctggcacaatgtgacagagagctcaagagtcacaaccaagcatgcctttgctactttgtccttcatcgctgagacttttctcttcctgtatgttgggatggatgccctcgacatcgagaagtgggagtttgccagtgacagccccggtaaatccatcggcataagctcgattttgctagggttggttctggtggggagagctgcatttgttttcccattgtcgtttttgtccaacctgacaaagaagtctccattggagaaaataacatttagacagcaaattgtaatatggtgggccggactgatgagaggtgccgtgtccattgctctcgcttacaacaagttcacgagatctggacacactgagctgcacggcaacgcgataatgatcaccagcacgatcactgtggtcctgtttagcactatggtgtttgggatgatgacgaagccattgatccggctgctgctccctgcctgcagcaacacggccacctccgagccgtcctcacccaagtccctgcactcgcctctcctgacgagcatgcagggctcggacatcgagacggggtcggcacagattgtgaggccgtccagcctccggatgctcctaagcaagccaacccacacggtgcactactactggcgcaagttcgacgacgcgctcatgcggcccatgtttggcggccgcgggttcgtgcccttctcccctggatcgcccactgagcagagcgtccacgacggacggtgaacaaagccgcgtctgacaccaagagacgagcaggacatgcttttggctgctaatcgtcagatgatgatgtttttgtttgttgacagcttctgatggtgcgttagcaatggcaacgaggtgtcagttggtttggattagcaggatgaagaagagcaaccctggtaactagggcggggggattgagtttgtgcatgacaaggctgcaaacttttgtatgtagataaaaaaaacacccatttggccatttgtattgtatgttattgtatgtaagctagcaggcctgtacaactgcttttaggtcttcgtttggatgggcgaaattctggcaaatagcagcacatccactctgtgttctgatctaagcatcttggtttgattttgaaatggactcggtgtgtaggatagctttt

SEQ ID NO: 142285 - DNA, 111 bp, Zea Mays
cgcttaaaagataaaaagggggtcagtcgccttacctcgccttgccaccttaacaactatggtatgctcacaacaataggtcaagtggtgctgccaaacacattgacataa

SEQ ID NO: 142286 - DNA, 1647 bp, Zea Mays
tagtagcgacgggcgacggtggagatcgtgcgaggctgtactacctgtacgcctccatcgtcgcctcgcaccatcaatcctgtgcggtgccagatcctccccgggtcttgtcttgtcgcaggtggaagccatgtccgccgcggacgcagccggcggcaaggaggcggcgccggcgtgcgactcctgcacgggcatgccggcggtggtgtactgccgggccgactccgcgaggctgtgcctgccgtgcgaccgccacgtgcacggcgccaacaccgtgtccactcgccacgcccgggcgccgctctgcgccgggtgccgcgcagccgctgccgctgcggcccgccacgcgcggcggcttcctctgcgccagctgccgcttgggggaggagaaggatgagcgggacggcggtggcgccgccgacagtagtagcgacgacggtggcgcggtggaagggtacgccgggtgcccctcggtcgccgatctcgcgaccatcctgggcgccggctccgcgtgggaggagccccagacgctccgcttggagagccggagctccggcggcgagctggctgacgaggtcatccgccagctggtggagctcgccaggtcggaggcggcggctcgcgctgagatggagcagcttactccatggccgtcgccggagcttgctgccattactggacagtacgccgacttcggggctctcgacgctgacaccgcctggcatgatgatgcagcagccatcgcggcagcagtagtgccttccactgaggaggagcagcaagcgtggatcgcggccggctgcgacgtcggcgcgtgccggacggaggagaaggcgcgcgagaacgacgctgctctggccgagccgtgtctgtcctcgttcgtggagatgtcagagatctgccccgccagcgtcgtcgtcaccctcagccacggcggggacgagggcgtcgacagcagcggcaagacagccccgcggccgcagctggccgcgccgacgccggcgaagggcggctacgacgtggcctaccccgaccgcggcacggtgatctcgcgctacaaggagaagcggaagaacaggaggttcgacaagcagatccggtacgagtcgcgcaaggcccgcgccgacggccggatgcggatcaaggggcggttcgccaagtccggcgaggtctgagacgcgtgcgggcgctcacgccatgccaacggcaacgagctggtagggggaccgtgcgtgtgtttcacgtgggtggttaggtttggtattttggttggtgttgcagctcgctgctcgcacgtgtcgatgcgtactagtctacgttgattagagacggttgtctactctttcctcattcgtttaataaaacacggctccaccaccaatgcaagtttcaccccgatcgattggaagcgtgtgtttacgtggagaactcgctaagttagatgtcgtttggtaatgtaatagataaccgatattgttaaattatatttgtttaggtttaattataattaataatatactagaaatagataccggcttattcgaacttgttactgccggtattcgagagtgaatcattaccattattatttaagttgtatttcgtgaatcaaacgacacattagtttctagtcaaatttgttattca

SEQ ID NO: 142287 - DNA, 2418 bp, Zea Mays
accggcgtaggcacatcgaagaggaagaggacactcatgacagcgtgtggggagacccgtcagagtcaaagcgttccgttccgttcttactgcccaccggccccgtgcccgtgccgttccctcactcgcccaagctttactactttactcgcccccaccaccaccacctccaaccccgccttccgcttcccacccgccccgcctgtctccacgcgccgccgccgcctccggatcgcggcctccctcctgccctgcagcgaagctttgcgcgctcggctcggcccggcccggcccatgccccgccgtgggtgaccagcgcctccacgtccggccatgggctgcgtgcacggccgccccgccacctccagccccgcgcccgccgccacctcctccagccgccgggaccatcccacggcctcccagacgcacaaggacggggtcgattccgccgccgccgcacctccggtggacgccgaggcgccggagcagcaggcggccgagaagccccagaaggtcaagcgggagcggcggtcgcggtcgtcgcgctccgccgccttcgcggcgcacaccgaggtgcgcctgggcgggagcttcgccaacaaggcgcgcggcgagcaggtcgccgccggctggcccgcttggctctccgctgtcgccggcgaggccatcgaaggatggaccccgcgccgcgccgactccttcgagaagatcgacaagatcggccagggcacgtacagcaatgtgtacaaggcgcgagactcgctgagcggcaagatcgtggcgctcaagaaggtgcgcttcgacaacctggagcccgagagcgtgcggttcatggcgcgcgagatcctcatcctgcgccgcctcgaccaccccaatgtcgtcaagctcgacgggctcgtcacctcccgcatgtcctgcagcctctacctcgtcttcgactacatggtccacgacctcgccggcctagccgccagccccgacatcaagttcacgctgccccaggtcaagtgctatgtgcaccagctgttgtcaggacttgagcattgtcacaaccggggagtgctacatcgcgacatcaaggggtctaacctgcttttggacaacaacggtgtgctgaagattgctgatttcggtctggcgtccttcttcgaccccaaccataaacagccaatgacgagtcgggtggtgacactctggtaccgcccaccagagctgctgctgggtgcgacagattatggagttggcgtcgacttgtggagcgcaggatgtatactagctgaattgctggctggaaagcccattatgcctggacggactgaggtggaacagctgcataaaatttttaagctatgtggctctccgacagaagaatattggaaaaaatcaaagttgcctcatgcaactatatttaagccccaacagccatacaaaaggcgaatagcggatacattcaaagatttccctcaatcagcacttcgactgatcgagacactacttgcaattgatccagctgatcggttaacggcaacttctgcattgaacagtgatttctttgcaacagagccttatgcgtgtgaaccatcaagtctgccccaatacccaccaagtaaagagatggatgctaaacgaagagacgaagaagctagacgcttaagggctgctggtggtagaggtaacggagatggaacaaggaagacaaggacacgggatcggcctagggctgttccagcgccagaggcaaacgccgaactgcaagcaaacattgataaaagaaggttgataactcatgcaaatgctaagagcaagagcgaaaagttccctccaccgcatcaggacggcgcgctcggctttcccttgggctgttcgaatcacatggaaccttcattcgagcccccggacccttcttccttcagcactgtatttcctttcgagaaaagcgcggtgccaacctggtccggaccgctggcggactctgcagctggcaaccagaagcggaaacacaagtctgcccgctcctcaaaacaaccagcaactgcccgtgctagatgatacacaccatgccgtgcttagcgcagatcaagtcttcaatacccccaaagaaacacattgtagtggttcctacaaactgggatgtctgattcggaatcaagagctacaacaaggaattgtttacttttttctcggattcaattcatgtatgaaaatttttctgaacaacggtcaatgtataggctggagagggagctcgattagtccattatgtacattaggttctcttttccattcttacaagcaacatgtctgttagattaattcgaagtgaggaatggaactggtaggtcagcttagcaagtcatcactctgcatagattacttccaatcaattgaatatttttttacctgctattttgtcaacaa

SEQ ID NO: 142288 - DNA, 1795 bp, Zea Mays
cttggcacaaccaaccgggggctcggaagaggagaagagccgaccagccgggcatattctctcttcctccctccggtgctctctccagcggtccagccgcagcgccctgaaagagggaggcttccactcttctttctccccgagcacccgccgtacgtctcctgcaccttcttccagtttctcccatttcagtttgtccactccctgtcattcctgccgcctcgacctccccgctctggaaggtcaaatccttcgcccctaagcttttatttctgtttgtatttggttctggaatcgttgcctgctggctgctgctgctgcacattacccccgtattctgtgctccggccgtgggattgccctgctcgctttctttcaaaaaagaaaaggaaaaggagcaattgctctgctcgctttcagtttgtgtggttgacgtctctctctgagtctctgtgcttcagcaggttcagatttagcctgggtgcgtctgcaggttccggttcatggagagatggagcctgggtgccaaagtggtagctctcgcactcctgctgtctgctgcttctcatggaagagagttgcctgtcaagagtagtgaccgcagttttatctacaatcatactcttgcaaagacgcttgtggaatatgcatcagcggtgtatatgacagatttaaccgctctgtttacgtggacatgctcaagatgcaatgacttgactcaagtaagagaccatcaaggattcgagatgagatctctaattgttgatgtggagaactgcttgcaggcatttgttggtgtagatcatagtctgaattcgataattgttgcaatcaggggaactcaagagaacagtgtacagaattggataaaagacttgatatggaagcagcttgatctaagttatccaaacatgccaaatgcaaaggtgcacagtggatttttctcctcgtataacaatacaattttgcgtctagctatcacaagtgctgtgcacaaggcaagaaagtcatatggagatatcaatgtcatagtgacaggccactcgatgggaggagctatggcttctttttgcgcgctcgatcttgctatgaagcttggaggtggcagtgtgcaactcatgacttttgggcagcctcgtgttggcaatgctgcattcgcctcatacttcgccaaatatgtacccaacacaattcgagtgacacacgggcatgatattgtgccacatttgccaccttatttctcctttcttccccagctgacataccaccatttcccaagagaggtatgggtccaggattctgatggcaacacaactgaacggatttgtgacgacagcggtgaagacccagattgttgcaggtgcatctccatgttcggcttgaggattcaggaccatttcacttacctaggagttgatatggaagcggacgactggagcacctgtagaatcatcacagctcaaagggttcagcagttccgactggagctagcgggcaacatcatgatgaccaagcacgatatcgacgtctccatcgttgaacctagtgtacaaaacagattggagcagttctagataggcggaacattcgttttgtccagattcagagaagcaacagcctcttgttaatgcagtggaaattgttcagagacgaaggcgacccttgttttctctattagttcggtcagaatgggatgttctttcagatcaaggaaataaatcgggagtcatctcttgtaacaaagagaatcagagcatgatgtacataaggaaaaatcataggcacggtttatgct

SEQ ID NO: 142289 - DNA, 1601 bp, Zea Mays
cttggcacaaccaaccgggggctcggaagaggagaagagccgaccagccgggcatattctctcttcctccctccggtgctctctccagcggtccagccgcagcgccctgaaagagggaggcttccactcttctttctccccgagcacccgccgttcagatttagcctgggtgcgtctgcaggttccggttcatggagagatggagcctgggtgccaaagtggtagctctcgcactcctgctgtctgctgcttctcatggaagagagttgcctgtcaagagtagtgaccgcagttttatctacaatcatactcttgcaaagacgcttgtggaatatgcatcagcggtgtatatgacagatttaaccgctctgtttacgtggacatgctcaagatgcaatgacttgactcaaggattcgagatgagatctctaattgttgatgtggagaactgcttgcaggcatttgttggtgtagatcatagtctgaattcgataattgttgcaatcaggggaactcaagagaacagtgtacagaattggataaaagacttgatatggaagcagcttgatctaagttatccaaacatgccaaatgcaaaggtgcacagtggatttttctcctcgtataacaatacaattttgcgtctagctatcacaagtgctgtgcacaaggcaagaaagtcatatggagatatcaatgtcatagtgacaggccactcgatgggaggagctatggcttctttttgcgcgctcgatcttgctatgaagcttggaggtggcagtgtgcaactcatgacttttgggcagcctcgtgttggcaatgctgcattcgcctcatacttcgccaaatatgtacccaacacaattcgagtgacacacgggcatgatattgtgccacatttgccaccttatttctcctttcttccccagctgacataccaccatttcccaagagaggtatgggtccaggattctgatggcaacacaactgaacggatttgtgacgacagcggtgaagacccagattgttgcaggtgcatctccatgttcggcttgaggattcaggaccatttcacttacctaggagttgatatggaagcggacgactggagcacctgtagaatcatcacagctcaaagggttcagcagttccgactggagctagcgggcaacatcatgatgaccaagcacgatatcgacgtctccatcgttgaacctagtgtacaaaacagattggagcagttctagataggcggaacattcgttttgtccagattcagagaagcaacagcctcttgttaatgcagtggaaattgttcagagacgaaggcgacccttgttttctctattagttcggtcagaatgggatgttctttcagatcaaggaaataaatcgggagtcatctcttgtaacaaagagaatcagagcatgatgtacataaggaaaaatcataggcacggtttatgctggatatggtagggattgcttctgtgtaaatatatgtatacaatgtaaacttgcaatggctatatttgcagcaacataagcaccaagctaactgaaaaatatcagttaaccgaatgaatgaggcgtatctatat

SEQ ID NO: 142290 - DNA, 1652 bp, Zea Mays
cttggcacaaccaaccgggggctcggaagaggagaagagccgaccagccgggcatattctctcttcctccctccggtgctctctccagcggtccagccgcagcgccctgaaagagggaggcttccactcttctttctccccgagcacccgccgttcagatttagcctgggtgcgtctgcaggttccggttcatggagagatggagcctgggtgccaaagtggtagctctcgcactcctgctgtctgctgcttctcatggaagagagttgcctgtcaagagtagtgaccgcagttttatctacaatcatactcttgcaaagacgcttgtggaatatgcatcagcggtaggctacaactttccctaattatctttttgacaggtgtatatgacagatttaaccgctctgtttacgtggacatgctcaagatgcaatgacttgactcaaggattcgagatgagatctctaattgttgatgtggagaactgcttgcaggcatttgttggtgtagatcatagtctgaattcgataattgttgcaatcaggggaactcaagagaacagtgtacagaattggataaaagacttgatatggaagcagcttgatctaagttatccaaacatgccaaatgcaaaggtgcacagtggatttttctcctcgtataacaatacaattttgcgtctagctatcacaagtgctgtgcacaaggcaagaaagtcatatggagatatcaatgtcatagtgacaggccactcgatgggaggagctatggcttctttttgcgcgctcgatcttgctaatatttctccatagatgaagcttggaggtggcagtgtgcaactcatgacttttgggcagcctcgtgttggcaatgctgcattcgcctcatacttcgccaaatatgtacccaacacaattcgagtgacacacgggcatgatattgtgccacatttgccaccttatttctcctttcttccccagctgacataccaccatttcccaagagaggtatgggtccaggattctgatggcaacacaactgaacggatttgtgacgacagcggtgaagacccagattgttgcaggtgcatctccatgttcggcttgaggattcaggaccatttcacttacctaggagttgatatggaagcggacgactggagcacctgtagaatcatcacagctcaaagggttcagcagttccgactggagctagcgggcaacatcatgatgaccaagcacgatatcgacgtctccatcgttgaacctagtgtacaaaacagattggagcagttctagataggcggaacattcgttttgtccagattcagagaagcaacagcctcttgttaatgcagtggaaattgttcagagacgaaggcgacccttgttttctctattagttcggtcagaatgggatgttctttcagatcaaggaaataaatcgggagtcatctcttgtaacaaagagaatcagagcatgatgtacataaggaaaaatcataggcacggtttatgctggatatggtagggattgcttctgtgtaaatatatgtatacaatgtaaacttgcaatggctatatttgcagcaacataagcaccaagctaactgaaaaatatcagttaaccgaatgaatgaggcgtatctatat

SEQ ID NO: 142291 - DNA, 1650 bp, Zea Mays
gccgggcatattctctcttcctccctccggtgctctctccagcggtccagccgcagcgccctgaaagagggaggcttccactcttctttctccccgagcacccgccgtacgtctcctgcaccttcttccagtttctcccatttcagtttgtccactccctgtcattcctgccgcctcgacctccccgctctggaaggttcagatttagcctgggtgcgtctgcaggttccggttcatggagagatggagcctgggtgccaaagtggtagctctcgcactcctgctgtctgctgcttctcatggaagagagttgcctgtcaagagtagtgaccgcagttttatctacaatcatactcttgcaaagacgcttgtggaatatgcatcagcggtgtatatgacagatttaaccgctctgtttacgtggacatgctcaagatgcaatgacttgactcaagtacctatgcctcggcattttggattaacttatcataatttttcagtgaagttgcatttgttggtgtagatcatagtctgaattcgataattgttgcaatcaggggaactcaagagaacagtgtacagaattggataaaagacttgatatggaagcagcttgatctaagttatccaaacatgccaaatgcaaaggtgcacagtggatttttctcctcgtataacaatacaattttgcgtctagctatcacaagtgctgtgcacaaggcaagaaagtcatatggagatatcaatgtcatagtgacaggccactcgatgggaggagctatggcttctttttgcgcgctcgatcttgctatgaagcttggaggtggcagtgtgcaactcatgacttttgggcagcctcgtgttggcaatgctgcattcgcctcatacttcgccaaatatgtacccaacacaattcgagtgacacacgggcatgatattgtgccacatttgccaccttatttctcctttcttccccagctgacataccaccatttcccaagagaggtatgggtccaggattctgatggcaacacaactgaacggatttgtgacgacagcggtgaagacccagattgttgcaggtgcatctccatgttcggcttgaggattcaggaccatttcacttacctaggagttgatatggaagcggacgactggagcacctgtagaatcatcacagctcaaagggttcagcagttccgactggagctagcgggcaacatcatgatgaccaagcacgatatcgacgtctccatcgttgaacctagtgtacaaaacagattggagcagttctagataggcggaacattcgttttgtccagattcagagaagcaacagcctcttgttaatgcagtggaaattgttcagagacgaaggcgacccttgttttctctattagttcggtcagaatgggatgttctttcagatcaaggaaataaatcgggagtcatctcttgtaacaaagagaatcagagcatgatgtacataaggaaaaatcataggcacggtttatgctggatatggtagggattgcttctgtgtaaatatatgtatacaatgtaaacttgcaatggctatatttgcagcaacataagcaccaagctaactgaaaaatatcagttaaccgaatgaatgaggcgtatctatat

SEQ ID NO: 142292 - DNA, 1245 bp, Zea Mays
ataaaactttatcaagcttttcaagatatattcttcccttcacctactgttctttggatgaataatgtaacaggcatttgttggtgtagatcatagtctgaattcgataattgttgcaatcaggggaactcaagagaacagtgtacagaattggataaaagacttgatatggaagcagcttgatctaagttatccaaacatgccaaatgcaaaggtgcacagtggatttttctcctcgtataacaatacaattttgcgtctagctatcacaagtgctgtgcacaaggcaagaaagtcatatggagatatcaatgtcatagtgacaggccactcgatgggaggagctatggcttctttttgcgcgctcgatcttgctatgaagcttggaggtggcagtgtgcaactcatgacttttgggcagcctcgtgttggcaatgctgcattcgcctcatacttcgccaaatatgtacccaacacaattcgagtgacacacgggcatgatattgtgccacatttgccaccttatttctcctttcttccccagctgacataccaccatttcccaagagaggtatgggtccaggattctgatggcaacacaactgaacggatttgtgacgacagcggtgaagacccagattgttgcaggtgcatctccatgttcggcttgaggattcaggaccatttcacttacctaggagttgatatggaagcggacgactggagcacctgtagaatcatcacagctcaaagggttcagcagttccgactggagctagcgggcaacatcatgatgaccaagcacgatatcgacgtctccatcgttgaacctagtgtacaaaacagattggagcagttctagataggcggaacattcgttttgtccagattcagagaagcaacagcctcttgttaatgcagtggaaattgttcagagacgaaggcgacccttgttttctctattagttcggtcagaatgggatgttctttcagatcaaggaaataaatcgggagtcatctcttgtaacaaagagaatcagagcatgatgtacataaggaaaaatcataggcacggtttatgctggatatggtagggattgcttctgtgtaaatatatgtatacaatgtaaacttgcaatggctatatttgcagcaacataagcaccaagctaactgaaaaatatcagttaaccgaatgaatgaggcgtatctatatatacatgatgtgagcttgcaatagcgtat

SEQ ID NO: 142293 - DNA, 5683 bp, Zea Mays
gaagggggagaccgagggcaaccaagcctgcgaggagcccgcgtccgaatctcgcgatccccaatccgcaggcctcgattcgccgatccggccgcggcagggggagagatcccgcagatcggggacctcgtgctgcttcgattcgagcttcttccagctgacagtcgcccgtccgccccccgtgctggtccgcgagctgctgtgtgctgcctggtggtaggtaggtggttaggcgaagcgggccgtgcccgggtgatgctgtccgtgaggcggcggcaggaggatgcgggcggccgcgtagcggcagcgcagacgcagcagctccggggcggactcggcatggacgacgacgccgagctcgaggagggggaggcctgcggggacgacaccgccttcgtcgaccccgacgtcgcgctctcttacattgacgaaaaacttcaagatgtacttggccattttcagaaggacttcgaaggaggcgtgtctgcagagaatctagggtccaaatttggtggatatggttcatttttacctacgtaccagcgctcccctctcccccaaactagaagtccacttaaggcagcaaatgctacctcaaaatctcccttccaccagtctagcgagggcatgtctcaaaagcctcctgctgtgacagtttcatctaccccccaaagtaatggtcctatggtgcctttttctggcgattcaattaaaaaggaaatacgcccaaccacaaaggctgaagggggttccgtctcccatgattcgtatggaccattgaaatgtcatgaccaaaatagacttaaagtccggataaaagttggctctgataatgttttggcaagaaataatgcggatatctacagtggtctgggccttgatatttcttcaccttcatccatcgaggatagccccgatggccgtgggagcctatcccctgaagttaacaatgtgccacatgaatctccacaaaccatccttcagatcatgacatgcttttcagttcctggaggcttcctgttatcccctctaccagccaatatcttgcaattgacaaaaaaggttgtggcttcgtcaaagaagtgggaatcaaatgtgcacatagaaagtgtacaagaaccatatgaaggccacacgactaaaaaggtaaaatctgatgctaagaaaaagaagctgatagatgcaaaaaattcaaagaacagaaatgatattagtgcagttatgaaaaaggagattgatatagaaacagttgctggtcaaaagatcgtatccgaagctctcaacatatcattgctgtctgatcccagagccatggatgcaaaaggtgagaatcgacttgaagtggaaccagcagaaaacaacttggcgggaactagagatgcccgattgaaagagcggtccactaagaccaactccatgccaatcatagttgaacctgccaaagcagaggcgacggaatgcttagagaacagtagttttggtagttcagaaatggatttttcagcagtaaaagcggaatcaaaatccaaggcagaaaagggagaggcaactttagaagagaggaatacaactaatggcaaagacctaatatcggataggaagcaagaaaagaaaatgaaacctgagagtaaatataacgcctctaactttgaagttagcaatgttataaacgaaagaggtccagctgtttcccggagcatgggcaaagtttctggtaaagaagccttaccttatgacacaaatgaggaaaatagctccaagaatgaggtcaaaaaaatgcagagagaacaaaagaccaatgcttcgagatcttctgatttcctggaggatgagaaacacattcgttcttctgctgcagttaaggagaggaaaagtgacatgcaatccaaatctagccatactggaaagaaacccaaaacaaaatcacatagagatgttagggacaacctgcctgaaggatctcacggaagcaaggaaaaagacacattggagaatgaaagtgcctttggagatctccgaccaaaggaaaagccatggaaatatgacatcgagagggattctgatgcacctgggatctctaggagggagatttcttctagtgtaaagcatgataagcacttggcttctgaggagcagaagatgcatatacctccaccttccactgtatcaactgcaaatgcagctccagttgtgataaaggagcattgggtgagctgtgacatatgtgataaatggcgtctcctaccttatgagatgaatccttcagatcttcctaagaagtggaaatgtagcatgctatattggctacccgggatgaataggtgtgagattagtgaagaggagactacgaatgctctgaatgcactttatgtccctgcccctgcaaatggtattcctgcagttggtcatcctcatgttgcttcaacaggactagtaacatccagcactcccaacatgaatggacatattgagcagaatagaaaaagaaaaaatattccaagtgatggaaattttgtggctgagggttctcacctaacacaggtttcaggtcatccaatgagcaaccaacatgctcctagtaaaactaaaacttatactgatggtatccagtattcggctgagaggcattctgtaagcaaatcagttgacccaataattgaaaagaaaaggtccaagagcaagcatcacagtagctattctgatggaggagatcttgttgaaagacctaagaagcattctaaagtgaaaaacaagagagacttagatcatgatgaatacaaagcttctaagaaaattaggaaagaagagcgacaccattttgatgtagatcggatccttggatctgatttagctagcggagatgttcctgatgaggccaaggctttgcctgcgaagtcagcaacctcaaagggttcaggtgaaaggactgacctttcttcatcaaagcaaaaaagtgcctcacggcataatcgtttggaaacttccaagaaagcaagacaagatgatttagttggtcctgaagacgagagcaagggatattttcaccagtcagatgtacaaagatcagatttgtctagtaagaagaggatagtgaaggaatgggaggagagccagcacaattcagtagctcatgtaagcaaaggagctgtcaaagaaacctatagggaccagaacttaaaggaagcaaagttgaaatcattgaattctgaagagctgttttctatgacgagcaccaaaccaccaaaagttcaacatgctgatcaggttttgtcttatgatggggggcgtatgaacagtgagttagttgaggataacacactctttagtggcaaaagaggtctgcctgaacaagaaaagagcctttctgatcaggctttggacttgggtgaacctgctagtgatgtggcctatattcagacttcagctgtaacttcaagttcttcaaaggcttcggtctcacaaaaaaagaagcagaccactcaagctatgaagacttcaccaattgagcctctttcttcatcaccacggaggaactccaacattgacaaggtctctgtccctcatagtagaatttcaggtaaggatggatctctgaatgctaactcagccactgtgccaatcatggcaaaacaactaaatactgaagttcgcgtagcaagcaatgatcaacggtctagtgaacctgtttcggttggttctccccgaagaaaatctgatagggataatggactggttcagttaactcaaggtcatgcctctgatggttttcatcttgaaaggggtttcaatgaggacctgcagcctgaatctgggagaaaggattccaatgtaaagagctcccatattcctaaagcttctcaccatttgcattctggtgaaaaaaacaactacaatacagatggctctcctatgcaaccaggaaagcatcctgttgatccaaagacatcagtcttggataaatgtgattcaagcatgcatgaaagtaacaaaagcacaaattctcttcaggatagaaatggatcaactcattgcccaccagatggaaatcctctgctcggtttaccatctggaaaagagaaatcatatatcaacagcaacaagcaagattcacagaagcctaaaccccagatggtctgctcacctttgaaagaaaacaaactggattctcactccacaccattaaaacctaatgggtcaaaattgactccacaatcaagacaatacaatgctcaaaatggaggacgacatggcactgcaaagcatgcaattcctagtcctgctgatacttctagtccagctaggaaggacaatacttcaactgcatatgctctcaaagaagcccgggatttaaagcataaggctaatcgtttgaagggagaaggaaaagagcttgaaagtacaagactctactttgagtctgccctaaaatttttgcatgttgcatcacttttggaacctcctagctttgatggattgaaacaaggtgatgcagcccagagcatgtattcagatactgcaaaactttgcaactttgttggtcatgcatatgaaaaatgcaagaagatggctgctgctgctttagcatacaaatgtgttgaagttgcttatctgaaggctgcatactacaaacacccaactgcaagcaaagatagacaagtgttacaggcagttgtacagactgcaccaggtgaatcaccatcatcttcagcctcagacattgataatttaaataacaatggattatccaaggcctcttcaagcaaggatgctaattcaccacaagtggctggaaatcatttgttgctggccgctcgaaatcaaccacacttgatgcggttactagcttatacaaatgatgtcaatagtgcctttgaggctactcggaagtcacacatggcaattgcttctgctgctggcaatcatgaaaatggagtcgatggtcttccttcagtaaaaacagtactggattttaacttccgaagtgtgaatgatctactaaggcttgtgcgaatttcaatggagtccatcagctgctgacgtgttcagaatctgagaaagtgccacccgttggaagttcctgttggatgtttaatccaattaacttttcttgatgaagtagcatgaaactgaatagttcaacagtgaacagtgtaaaagcataggtcttctcatttgagcttgctggtcaatttgtacagagactgatcgtggaattcttccttctttcttattttgatggcacccagttagtatacaaagttgcatatccacttggatgatttagttagtgaggccacaggttaagatgagctttgcactgctcaatgctcgtaatagttttgaggaagaaggatgctcttgcgcatgcagttgatgattcatttgagcagtgcaaaatggtgtgtccctatcttgcgcatgcagttaatgattcatctggaaagcggcttgctactgagcattctcttccgaccgtatcatagtttcctttgagcagtacaagatggtgtgtcgccacttcaattttgatggtaactctagttaaggacaaatgaattctgtgcccttttttaagtgctactccttacgctgctacctttttttaagcagggagaggacagcaaagccaactaattgtgctaaccaagaaatcagctactatgccatgtcttctggatgaagt

SEQ ID NO: 142294 - DNA, 5662 bp, Zea Mays
gaagggggagaccgagggcaaccaagcctgcgaggagcccgcgtccgaatctcgcgatccccaatccgcaggcctcgattcgccgatccggccgcggcagggggagagatcccgcagatcggggacctcgtgctgcttcgattcgagcttcttccagctgacagtcgcccgtccgccccccgtgctggtccgcgagctgctgtgtgctgcctggtggtaggtaggtggttaggcgaagcgggccgtgcccgggtgatgctgtccgtgaggcggcggcaggaggatgcgggcggccgcgtagcggcagcgcagacgcagcagctccggggcggactcggcatggacgacgacgccgagctcgaggagggggaggcctgcggggacgacaccgccttcgtcgaccccgacgtcgcgctctcttacattgacgaaaaacttcaagatgtacttggccattttcagaaggacttcgaaggaggcgtgtctgcagagaatctagggtccaaatttggtggatatggttcatttttacctacgtaccagcgctcccctctcccccaaactagaagtccacttaaggcagcaaatgctacctcaaaatctcccttccaccagtctagcgagggcatgtctcaaaagcctcctgctgtgacagtttcatctaccccccaaagtaatggtcctatggtgcctttttctggcgattcaattaaaaaggaaatacgcccaaccacaaaggctgaagggggttccgtctcccatgattcgtatggaccattgaaatgtcatgaccaaaatagacttaaagtccggataaaagttggctctgataatgttttggcaagaaataatgcggatatctacagtggtctgggccttgatatttcttcaccttcatccatcgaggatagccccgatggccgtgggagcctatcccctgaagttaacaatgtgccacatgaatctccacaaaccatccttcagatcatgacatgcttttcagttcctggaggcttcctgttatcccctctaccagccaatatcttgcaattgacaaaaaaggttgtggcttcgtcaaagaagtgggaatcaaatgtgcacatagaaagtgtacaagaaccatatgaaggccacacgactaaaaaggtaaaatctgatgctaagaaaaagaagctgatagatgcaaaaaattcaaagaacagaaatgatattagtgcagttatgaaaaaggagattgatatagaaacagttgctggtcaaaagatcgtatccgaagctctcaacatatcattgctgtctgatcccagagccatggatgcaaaaggtgagaatcgacttgaagtggaaccagcagaaaacaacttggcgggaactagagatgcccgattgaaagagcggtccactaagaccaactccatgccaatcatagttgaacctgccaaagcagaggcgacggaatgcttagagaacagtagttttggtagttcagaaatggatttttcagcagtaaaagcggaatcaaaatccaaggcagaaaagggagaggcaactttagaagagaggaatacaactaatggcaaagacctaatatcggataggaagcaagaaaagaaaatgaaacctgagagtaaatataacgcctctaactttgaagttagcaatgttataaacgaaagaggtccagctgtttcccggagcatgggcaaagtttctggtaaagaagccttaccttatgacacaaatgaggaaaatagctccaagaatgaggtcaaaaaaatgcagagagaacaaaagaccaatgcttcgagatcttctgatttcctggaggatgagaaacacattcgttcttctgctgcagttaaggagaggaaaagtgacatgcaatccaaatctagccatactggaaagaaacccaaaacaaaatcacatagagatgttagggacaacctgcctgaaggatctcacggaagcaaggaaaaagacacattggagaatgaaagtgcctttggagatctccgaccaaaggaaaagccatggaaatatgacatcgagagggattctgatgcacctgggatctctaggagggagatttcttctagtgtaaagcatgataagcacttggcttctgaggagcagaagatgcatatacctccaccttccactgtatcaactgcaaatgcagctccagttgtgataaaggagcattgggtgagctgtgacatatgtgataaatggcgtctcctaccttatgagatgaatccttcagatcttcctaagaagtggaaatgtagcatgctatattggctacccgggatgaataggtgtgagattagtgaagaggagactacgaatgctctgaatgcactttatgtccctgcccctgcaaatggtattcctgcagttggtcatcctcatgttgcttcaacaggactagtaacatccagcactcccaacatgaatggacatattgagcagaatagaaaaagaaaaaatattccaagtgatggaaattttgtggctgagggttctcacctaacacaggtttcaggtcatccaatgagcaaccaacatgctcctagtaaaactaaaacttatactgatggtatccagtattcggctgagaggcattctgtaagcaaatcagttgacccaataattgaaaagaaaaggtccaagagcaagcatcacagtagctattctgatggaggagatcttgttgaaagacctaagaagcattctaaagtgaaaaacaagagagacttagatcatgatgaatacaaagcttctaagaaaattaggaaagaagagcgacaccattttgatgtagatcggatccttggatctgatttagctagcggagatgttcctgatgaggccaaggctttgcctgcgaagtcagcaacctcaaagggttcaggtgaaaggactgacctttcttcatcaaagcaaaaaagtgcctcacggcataatcgtttggaaacttccaagaaagcaagacaagatgatttagttggtcctgaagacgagagcaagggatattttcaccagtcagatgtacaaagatcagatttgtctagtaagaagaggatagtgaaggaatgggaggagagccagcacaattcagtagctcatgtaagcaaaggagctgtcaaagaaacctatagggaccagaacttaaaggaagcaaagttgaaatcattgaattctgaagagctgttttctatgacgagcaccaaaccaccaaaagttcaacatgctgatcaggttttgtcttatgatggggggcgtatgaacagtgagttagttgaggataacacactctttagtggcaaaagaggtctgcctgaacaagaaaagagcctttctgatcaggctttggacttgggtgaacctgctagtgatgtggcctatattcagacttcagctgtaacttcaagttcttcaaaggcttcggtctcacaaaaaaagaagcagaccactcaagctatgaagacttcaccaattgagcctctttcttcatcaccacggaggaactccaacattgacaaggtctctgtccctcatagtagaatttcaggtaaggatggatctctgaatgctaactcagccactgtgccaatcatggcaaaacaactaaatactgaagttcgcgtagcaagcaatgatcaacggtctagtgaacctgtttcggttggttctccccgaagaaaatctgatagggataatggactggttcagttaactcaaggtcatgcctctgatggttttcatcttgaaaggggtttcaatgaggacctgcagcctgaatctgggagaaaggattccaatgtaaagagctcccatattcctaaagcttctcaccatttgcattctggtgaaaaaaacaactacaatacagatggctctcctatgcaaccaggaaagcatcctgttgatccaaagacatcagtcttggataaatgtgattcaagcatgcatgaaagtaacaaaagcacaaattctcttcaggatagaaatggatcaactcattgcccaccagatggaaatcctctgctcggtttaccatctggaaaagagaaatcatatatcaacagcaacaagcaagattcacagaagcctaaaccccagatggtctgctcacctttgaaagaaaacaaactggattctcactccacaccattaaaacctaatgggtcaaaattgactccacaatcaagacaatacaatgctcaaaatggaggacgacatggcactgcaaagcatgcaattcctagtcctgctgatacttctagtccagctaggaaggacaatacttcaactgcatatgctctcaaagaagcccgggatttaaagcataaggctaatcgtttgaagggagaaggaaaagagcttgaaagtacaagactctactttgagtctgccctaaaatttttgcatgttgcatcacttttggaacctcctagctttgatggattgaaacaaggtgatgcagcccagagcatgtattcagatactgcaaaactttgcaactttgttggtcatgcatatgaaaaatgcaagaagatggctgctgctgctttagcatacaaatgtgttgaagttgcttatctgaaggctgcatactacaaacacccaactgcaagcaaagatagacaagtgttacaggcagttgtacagactgcaccagcctcagacattgataatttaaataacaatggattatccaaggcctcttcaagcaaggatgctaattcaccacaagtggctggaaatcatttgttgctggccgctcgaaatcaaccacacttgatgcggttactagcttatacaaatgatgtcaatagtgcctttgaggctactcggaagtcacacatggcaattgcttctgctgctggcaatcatgaaaatggagtcgatggtcttccttcagtaaaaacagtactggattttaacttccgaagtgtgaatgatctactaaggcttgtgcgaatttcaatggagtccatcagctgctgacgtgttcagaatctgagaaagtgccacccgttggaagttcctgttggatgtttaatccaattaacttttcttgatgaagtagcatgaaactgaatagttcaacagtgaacagtgtaaaagcataggtcttctcatttgagcttgctggtcaatttgtacagagactgatcgtggaattcttccttctttcttattttgatggcacccagttagtatacaaagttgcatatccacttggatgatttagttagtgaggccacaggttaagatgagctttgcactgctcaatgctcgtaatagttttgaggaagaaggatgctcttgcgcatgcagttgatgattcatttgagcagtgcaaaatggtgtgtccctatcttgcgcatgcagttaatgattcatctggaaagcggcttgctactgagcattctcttccgaccgtatcatagtttcctttgagcagtacaagatggtgtgtcgccacttcaattttgatggtaactctagttaaggacaaatgaattctgtgcccttttttaagtgctactccttacgctgctacctttttttaagcagggagaggacagcaaagccaactaattgtgctaaccaagaaatcagctactatgccatgtcttctggatgaagt

SEQ ID NO: 142295 - DNA, 599 bp, Zea Mays
atgatttagttagtgaggccacaggttaagatgagctttgcactgctcaatgctcgtaatagttttgaggaagaaggatgctcttgcgcatgcagttgatgattcatttgagcagtgcaaaatggtgtgtccctatcttgcgcatgcagttaatgattcatctggaaagcggcttgctactgagcattctcttccgaccgtatcatagtttcctttgagcagtacaagatggtgtgtcgccacttcaattttgatgggagaggacagcaaagccaactaattgtgctaaccaagaaatcagctactatgccatgtcttctggatgaagttcacgcaggtttcaaataagaaatcacttggactatcggacttgtatgaatgttgtacaaagatctctaatgtacattaaccttttttttttcagccagcgcatgtacatggtggggcatttgttaccacgtgctggtctctatgtatgacgcctttggttctgccaagcctgtctttcattattcttcaaattttgtgatatttagttgtttattaaggtatataacgtttagtactgggaatttgttgcagaatgcaaaaatgaattc

SEQ ID NO: 142296 - DNA, 524 bp, Zea Mays
atggcgtgtgggtggcttcatcctgtccctgcaggggccgccacggtcgccgccctgtggccgtgcttcctttccccggttcgtcagagcttcaccaaggaggtactggcttctatatacatttacctgtttcgtggttgggcaattcgtcgaacaggttgtaggtggtgtctggctaccgtactgttatttcctatgtctgaattctcaacttctgcctctgatgagcagctaaaccaattccaacgttggaagctacctttgaacgctgccaagtcgcagagggagtcatggaaccttgctgatcgctcaagttcaggatcttctgaaggagttgctgctgctagcagacccgcagacgctcccactgctcagagtgctctgcccatgacacgtagcgtggatgcggtcccaggtgcgcctattgttatttctggatactggactggccccggtgtagatgatggctgtggtagtgttgaggccgtgctccagaggattgcataatgttttcgcttgcggtt

SEQ ID NO: 142297 - DNA, 1121 bp, Zea Mays
cagaatagtcgacaaagcatggtgcacccatcaatcatcacacagagcgcgcgccatggcgtacagggcgttggaggtgactctcctgtcggccaaggacctgaagagggtgaacctgatctcgcgcatggaggtatacgccgtggtgagcatctccggcgaccctctgacgcggcagtgcacccagccggacccctacggcgggcgccacccgtcctggaacacctcgttccggttcaacgtcccgcccaccgccgcgacggccaccggctgcctccacgtgctcctgcgcaccgagcgcgccctgggcgaccgcgacgtcggcgaggtcatcgtgcccctggctgacatcctcgccaccgctggcggcgcgtccgaccctggcccccggcctccgcagctcgcatcgtaccaggtccgcaaggtgcaccgttgcgagcctcgcggcgtgctcaacgtgtcgtaccgcctgggccccatcgtcggccagcaggcggcgcctctggcgagagccgacgaggccgctgccgccttcgtcggctacccagtagtgccgcggcagtactaccccgcgccgtacgcctacctgccctcgccgctgtccctggcgcccgggccctctcctcccgcgcaagctgccggcggacgcgacaccctggccctgcacccgccttcgccgtacagcttgcctgctgctacttacccgccggctgcttctgcttatccgcagcaggcggctgccggtcccgggcgcaatgctctgccggcaccggcgagcgaggagagcaacggaaagctggacttcggggtaggcctcggcgcggggctggtcagcggcgcgatcggcgggatgctggtcgccagcgacgtgatgatgtctgacgcggcggcttacaactccgggtaccgcgctggactggccgacggcggcgcggcagcggtgtacaggagctcttatcgcgttcccgataaggtcgaagcaaaacgggcggcagtgtgagtcacttgaatcgatgcaaactgtgtgatttgacaaaccaagaatagtacctgccgtatatatatggaatataattgcgtatctattgaataataaataataatgagatgagattttacat

SEQ ID NO: 142298 - DNA, 379 bp, Zea Mays
gccggtgtagaggatcaggaggatgtctgggtcgtccggctccggcgtgtgggtgttcaagaacggcgtgatgcagctggagcagccggccgcggcggcgagccggaaggcgctggtgtacgtgccgacgaacgaggtggtgcggtcggtggaggcgctggagcggcggctgggcacgctgggctgggagcgctactacgagaaccgcagcatcgtgcagctccacaagcgcgacggcggcgccgacctcatcaccatcccgcgcgacttcgccagcctccgctccacccacatgtacgacgtcgtcgtcaagaaccgcgaccacttcaaggtcgtcgacgcttagccgccgcatcccgcataagctacgaccagacca

SEQ ID NO: 142299 - DNA, 997 bp, Zea Mays
atcgaagctccgagcaggaaacgccaccgccctccatctcccccgtgtccctagccaggagcaccgtccccctcaccaccccgcctaactttcctatcctcatcccgacgcctggagatccatcctcaaacgccgctgctagggcaccgtcccgcgctaggaccccccgcgcctcgcaatcatgtcaccggcaactctgacgacctagggctcacagaggctagcaccacgatggccgacccgggcgcctccgtcaacatcgctgcgcgccaccacctcgcgtcgcagctcgcgaggcagccgccagtgacgcacacgggctggtggggaggggcgcgttcgtaccaccatgggaggggcgtggggcgtggcatcaagggtgagggaggggcgtcgaggaggcggacggcaacaagcccacacatccaacaccctaccaggtctttgatgctgctgcttcaccaaacaatgaaatgctcttgatgcatgattcaggagctaggaggatatctattgtcgtcgagttacatgaagttgactttcctctgctgctgttgtgctcagtgtggatgacattgtgctgcctcaggtacaactttccttttctgtgcttaagtaaaaaaatgttgttccattcgatacacagtcggattatttgatttaaagccttgctgaagttgacattgtgatatatcgtgaccctggtaaaaaatattttcaagttcagaaagcaggatacttcctttaatatgtctatcacacatgttcacggagataattctacacatggttttttatacctctttttgaccccacttggagatggaagcgagattttgaagttttaaggcctgcagtgccgtggtcttgcgttgatatctgtagttgtacatagaaattttctcatttggtgtatgtctttgctactttttccttaaacataaattatatttttataactatctggcagttattgatctatcactgccttactaca

SEQ ID NO: 142300 - DNA, 935 bp, Zea Mays
atcgaagctccgagcaggaaacgccaccgccctccatctcccccgtgtccctagccaggagcaccgtccccctcaccaccccgcctaactttcctatcctcatcccgacgcctggagatccatcctcaaacgccgctgctagggcaccgtcccgcgctaggaccccccgcgcctcgcaatcatgtcaccggcaactctgacgacctagggctcacagaggctagcaccacgatggccgacccgggcgcctccgtcaacatcgctgcgcgccaccacctcgcgtcgcagctcgcgaggcagccgccagtgacgcacacgggctggtggggaggggcgcgttcgtaccaccatgggaggggcgtggggcgtggcatcaagggtgagggaggggcgtcgaggaggcggacggcaacaagcccacacatccaacaccctaccaggtctttgatgctgctgcttcaccaaacaatgaaatgctcttgatgcatgattcaggagctaggaggatatctattgtcgtcgagttacatgaagttgactttcctctgctgctgttgtgctcagtgtggatgacattgtgctgcctcaggcaatgtcaacctcaacaccttgatgaacatgttcagtgtgcttggtgctggtggtggccttggtggtcgaaatgcttctaatggctctggaccgccatgcttgcgtcggacgcgggacgtccacgccgccatcgcccgtgagcagctccgacagcctcatcgccgcgttgcacctgctcttgtgtcgcaggctcgggttaccgtcggtgctgacaccgaggaaggcatgatccatgcggagcagcccaaggcgcgatgccacctccgctgtcacgcatgatgagctgcttcgcctctggcaccgccttgttccttcgcgatctcacattggtactgatcgcttcg

SEQ ID NO: 142301 - DNA, 1176 bp, Zea Mays
atctacataatccgttttgccactcttcagggttctgcattgtgaatagaggttcatctttgtgattagattgccaccgccgctgctttctactcattcgacgaatgttttgcaaagaagaaatctggtttatcttaccctcgattccttcctatgatacaactaacaaaatgaattggtacattcaggtatctttaaaaccttttcacttccaaattagaatgatatcatgctcaagaggtaacattttctgatgttttttattttaatagtaattattggtcgctgactttttaaaactatttgtgttgtacttcaagcatcttctacactgcatctaagctttgaagagttacggacaattttgtactaattgttttctttattttcccaaatgtgtgccacttcctttagtatttttgcagtgcagacgattgaaaactactgttttacatcacctctctgtcataggaatagtttactactctaatgctcattctattaacactaaaaaaagatatatcgcttgaaaacaggtatgtatttcaatcttctagatttatatttctttctttatatatacaaaacaggtaagtttgtaccatttgttttattttttaaaaaaagaaaaggtatgacacttacattagtattttttcccaccagaaacgattgaaaactattgtttcccgtcacctcctgtcatagtaagtgtttcccgtcacctgaggatttccaattttctacaatggtgggagagatcttcaactattgtttctgacacttgaaaggatggcttggaccctcttattatcctgggagcctcggtggtttggaagcatagaaacagagtggtgttcggtagagtttcttccaacctcactcttattctggagtctgctaatgaggaaagcgagaaatgacaagttgcaggagccaagggttatcctttctggctgctccaagccatataatttagggtggttggatccttcatggatattttaatgtacttctgttgttggcctccgtaagaagtgcatgtatcccgggcgtctttcagctctttgtattcttcgtcttttaatatagtggggcgcagttctcctgtgcttttcgagaaaaaaaaatatgtgcatctatttaagtctcttaccaataagtgtttataaaata

SEQ ID NO: 142302 - DNA, 725 bp, Zea Mays
cttctacactgcatctaagctttgaagagttacggacaattttgtactaattgttttctttattttcccaaatgtgtgccacttcctttagtatttttgcagtgcagacgattgaaaactactgttttacatcacctctctgtcataggaatagtttactactctaatgctcattctattaacactaaaaaaagatatatcgcttgaaaacaggtatgtatttcaatcttctagatttatatttctttctttatatatacaaaacaggtaagtttgtaccatttgttttattttttaaaaaaagaaaaggtatgacacttacattagtattttttcccaccagaaacgattgaaaactattgtttcccgtcacctcctgtcatagatggcttggaccctcttattatcctgggagcctcggtggtttggaagcatagaaacagagtggtgttcggtagagtttcttccaacctcactcttattctggagtctgctaatgaggaaagcgagaaatgacaagttgcaggagccaagggttatcctttctggctgctccaagccatataatttagggtggttggatccttcatggatattttaatgtacttctgttgttggcctccgtaagaagtgcatgtatcccgggcgtctttcagctctttgtattcttcgtcttttaatatagtggggcgcagttctcctgtgcttttcgagaaaaaaaaata

SEQ ID NO: 142303 - DNA, 105 bp, Zea Mays
ctgaatggagatgaaatgcttgtggtttagagtttatttatacataatcgtctcaaggcgaggaaccgtggtactgaaaaggttgactacagatgggtttgtggc

SEQ ID NO: 142304 - DNA, 1373 bp, Zea Mays
agccagctactccatctcccacccaacctccttggcaactggcattgccacccccacagtagagacagacagccacgcgcgcgaggcgctccactcaagctcaggccactctacctcgctctcggccatggcgtcaggggaagcagagccgctgcagtacacgaccaccgcgctgcgggtgtccatccactgcgagggctgcaggaagaaggtcaagaaggtgctccacagcatcgaaggcgtgtacaaggtgacggtggacgcggcgcagcacaaggtgaccgtcacaggcagcgtggaagcggccgcgctcgtccggcggctgcacaaggccggcaagcaggcggcgccgtggccttcgccggcgccggcaaacgtcgaggccaacaaggccgcgcctgctgcacccggggagggcggcgccaaggaggccgcggacacgaaggcggctgaggccgacgccaaggagaagaaaccggccaaggacaagggctcgggcaagaatgccggaacgggcgaggccgccgacgcgaaacccggcaaggacgtggccagcagcgacgccgccgaggtgatcgcggggcccaaggaggcggaaaaggcctcctcccctgagcctgtggccgcgaagccagacgccgccgaggagcccaaggacggcggcgagggcggcaggaagaagggcaagaagagtaagaagaacaagcccaaggacggcggcgagggggatgtcccggccccggccgcaaccccggcggcacctcccgagaagaaggcgccgcagcagccctcggctgtgccagcgccggcgcctggtcccgagcgcccgcacggcggcggcggcgcgttcccgtgctacgctgcgcagccggtgcttagctacaacgtggcgcacccgagctccagcgtgtcgtactgcgcgcccacggcagccgtgcccatgcccccgccgccgccgcagatggtgtcgtactggtacccgccatacccggccatggtgccggtgccggcggagtttgtgtacggcccgccgggcggcgtgcggtcgttcccgccgcacgagtcgtacaacaacatgttcaacgaggacaacgccaactcgtgcagcctcatgtgatgtcacgacgcgccggcgtggtgtccccgggccgtctacggtggctctcgtgaaccacaagcctccccgatggtgtctcgtgccgtcaaattaggcggacagcgctccagattttaattttttttactgtaccctcggctataaattgctcctcggcgcatcgtgtaatcagatggtggtggtattcttccacttgcaagctgcaaacggctttctcttcattgctatgaatgaactcgtggaagaaattctcgtg

SEQ ID NO: 142305 - DNA, 731 bp, Zea Mays
agattatttagatccagcagaggattagtttcagagtagcagaacaacctcagacaccagtagcttcaggatcccgggggctgaagaacgaggcggtggccttggagtcgagcagctccagcgcggcgccgcccggctcgatgcaccgtggcgtcttgtactggttgatggagccgccctggctgaccaacaggtccatgagcgcgtcgaaggcgccggcttccaccagccgtatctccagcggccccacggacctgtcgtgcgccctgcaccgcctgtacacgcagtccagcgactcctccacggcgacgcagcagctctccaggacctgcgcgtccagccgcgcgcccccggagccggaggtgggcgtggccttcacctcccagaacaggacgtagtggcccggcaccgtcgacgtgtcggtgaagctggtgtactccagtaggatgtggcctcggtcctccaggatcttcttggcccgggagacgctgccgtggaggtcttcctcgttcgtcttgtctgcgtccacgctcaggatcacgttcctccggcagatgaatttgaactggggtgcgcggttgtagaagcctgtcacctggagtacatcgcctaccctgtacctgtaaagacctgcaccccaccccaaaaaaaagagagcaatgtattggttgaagtaaaactgttgttgcagatcatagtattcgcaagaggtatggtgttctcaccggcaa

SEQ ID NO: 142306 - DNA, 630 bp, Zea Mays
gccaagcaagagagacggccagcacgcacgtctgcaacgtgcacgaaccatggcacggcacgcgcgcgcccggctcctcctcgccctcgtagccacgctcgcggtggccgcggcgtcgacgtcgtcggcctactcgcgcgccgccgacgccggcacgaagctgctcatcggcggcggcgactacgacgacgccgacctgctcgacggcaggcgtcggctcgacgacgctaacgccacgggcctcgacgacggcaacgccacgagcatcgacgccctcacggtcacgggggccgcggggttcatcagctacgccgcgctgtccagggacagcaccccgtgctcgcagcgcggcgcgtcctactacaactgccgccccggcgcggaggccaacccctacagccgcggctgcgacgcgatcacgcggtgccgcggctgagccagcagctgcgactgcgactgcgactgcgactgccattgccgccgctagctgcttgcgttcgtgaggaaccgagcagagcatcgatctgcgggttctaccacattcgctgcaaatcgtttaataagaatgacgcctgtatctcgtgtgatgtttgtacgaccccatccaatactcacaatattttcaagatt

SEQ ID NO: 142307 - DNA, 1036 bp, Zea Mays
cattcgagtcccgctccctggtcccgcataccagtcccgctcccctatcgcaccgtgaaaccgtctcgacccgaaaccgtcgtgcctcggcctccccttcaccgatttcgtgcaaaagggaactccgcccccaccgcccctaccttgattttgccgccacaccttccttcgacactggagatgagatgagaggattcgttattctggcgctccttgcctccgccgcctcctcctccttcggcgcggcggccacgacttcagagggcggtggaggtggacccgtcgtggcggttcacgagccaacgcctgtgggacgcgccatcttctccgaccccaacaacctcaccgccgattgggtaagcccgagggtgtacaactacacgggcgtctactgtgtgccgctcccctccagccccgaccgccgcggcgcgctcgccgtcgccgaggtcaacctcaaccatggcgacatcgcgggcttcctcccgtcagagctcggcctcctcgccgacctcgccctgctccacctcaactccaaccaattctgcggcgtcctcccccgcgcgctccgccgcctccgcctcctccacgagctcgacctcagcaacaaccacttcgtcggcccgttcccggacgtcgtcctggacctcccggcgctgtgcttcctggacctccgcttcaacgacttcaagggcgtcgtcccgcctcgcctcttcgaccgcccactcgacgccatcttcctcaaccacaaccgcctaatctagaaaaagagttgcatgagaagcagcagcttgagctcgaagtagaacgattgaatggtacactccaagtgatgaaacatttagagggagatgatgatgggggaaatatccatgataagatggagaagttgagcgaaaaattcgagcgtgaaaagaagcgtctggaggatttgagtggggatctcgtgaggaaggagcgtgaaagtaatgatgagctacaagaagcccgaaacgaactgataaagggtttggaggaagagctaaatggaccgacaact

SEQ ID NO: 142308 - DNA, 4228 bp, Zea Mays
gtccacgttgtcgccctcataggctggtgcctgcctggtggtcgccattccgctgcgcacaggcgcacagcccaatccagtacaaacagcagcagcttcgcctccacctccacgcgagccaagcgcccggcccggctcccgcagcgcaaaaccctagcctcgcccgccccaaacccttggcggctacggtctctgatcccggtccaatggcgtcgtcgccggacttgttccctaacgttgccttctccgacgtctctgccgccgcccccgcggccgaggccaccgccgcgttcgggctcggcgccaccaccggggccccgcgcctctgcctcgtcaagtccgggaaggacgaggcggagcccacggtcgacatcgacctcgccgatgcgcaggtatttaagttgggaccgatggagtggctgtgcgtgtgcgacgagtcggaggctaaggctggcgtggaagagaagtcattttcaagagcaattaaggttgttcttaggacagaagctgagagcaaagccttctctttagcttttcaacaatggaaacaccaagttattagtggaaaagctggtgagaggttggagaatggatcaataattgcttcgaaaagcaaatttgatacaaaaattgaggcatcatcagcaaagatgtatttccactactacgggcaattattacatcagcaaaacatgttacaagattttgttcggacaggaacatactatgctgctgtaatggaaaaccgatctgactttgagggtcgagttgtggttgatgttggggctggaagtggtattctgtcgttatttgctgcccaggctggtgccagacatgtctatgcagttgaggcatccgaaatggctgaaaatgctcaacgtctaatgtccgggaatccgtcacttggacagcggatcacggtcatcaggggcaaggtcgaggaagtagagcttccagaaaaagctgacatattgatttctgagcctatgggaacccttttggttaatgaaaggatgctagagtcctatgtcatagctagagacagattccttgctccagatggtaaaatgtttccaacaacaggaaggattcacatggctccattttctgatgaatacctttatgttgaaatagcaaacaaggctctcttttggcagcagcacaatttttttggtgttgatcttacacctttacatggttcagcattccagggatatttttcacagcctgttgtggatgcatttgacccaagattattaatttctccaccaatatatcatacacttgattttactagcatgaaggaagaggagctttacgagattgatatccctctgagttttgtagcatctgttggcactagagtacatggattggcttgttggtttgatgtgttgttcaatgggagcactgtgcaaaggtggcttaccactgctccaggatctcctaccactcactggtaccaactgcgatgtgtgctttcacagccattgtatgtgatggccggccaagaaataactggccgccttcatctcgtagcccatagtgctcaaagctacacaatatacttgacaatgtcagctaaaatgtggggtgtgggtgcggagcaaggcggtatcctacaaacatctacaggaaaacttgaactcaaggagccgtactacaggttgtctcagccgcaatcctacatgttgccacaagatcaacagcagcagcagcaattgtcatctttgcagccacacggatcggagcagcagatgcaggaagggcttagcccaggcatcacgatagaccaagtagacaaagattacggcctcaactagacagacttgagaacctgagttggatgctctgatattccagcaacgagctcaggtctgtacaagtacaacacttcagagtgctccttagcctatgtttgtcaggcgttagctgccaaatgctaacatcacgttcgaggcgtacgagaccattccagagttgtgcagctgcagctaactgctggcgcgcccctgctccgttacttacgagggagtggaaaaaagcaattataaaatgtacggtttcaggtaaagtgaagatcggatgcaactaacaatggcgtgcatgttgtttaatatattattgctagaaattcatttattttccatgttcaaaaaaaagagacacaggccggttacgccgttggcgacgtgcccatcacggagcggctacgtgtcggtcccgctccagagtgttcttgcacagcctggacggtgccgatggagagtgccacaaatcggacggcccgacgatgccgcccgccccctatatagccctctttcccggcccttccgtctcctcgttcttccagcgaagcaagcagcctaaaaaaaccgtatcgtctcgcctgttcagtttccttctcctcttcccgcagcccggtttgccgaccaggttccaccgttccagagtagccaagcgaatcccgtgtctggttcgcgcgatggcggaggagcagtccaacccccagcaccagcaagcggaggagagggaggttatggtggagcagcagcagccgaggagggccccgaagctgaggtacctggacttcgtccaggtggcggctgcccaggccgcggtgtgcctcgctgggctctacggcctcgccaaggaccacgccggcccgctccgccccagcgttgacgccgtcgagtctgccgtcaagggcgtcgttagccccgtctacgaccgcttcggcggcctgccgctcgacgtcctcgccttcgtcgaccgcaaggtgagttgcgtcacgcgccctatgtaccgatctcccccttctcctgctctttgttggccgggtagcgtcgcgtggtagcacggcggcgtggttctgcgcccgtttcgcgggggcggttccacgaacctcgccggcggccggactaacttcaccccgccgtgtggtgcacggcaatcggcgcagcacggtgggttatgctgctgctgcgcctacctatatggatggaggattgttgtggttgtggtcaccccgactagatattttccttctgtggtgtatgattgctatggcgggcccgcgctcgagcggtgtgcggctcatctcagctgcgggggccctacttgggtgggtgtgccgtgtgcggtggtggtgagtggtgacttcgtagtccttgtgcgggccattcgcccgtgtctagtggctcctctatgagtatgccagatttccttagattccggcgcatgtagccgcgcccggcggagactccgatgccactgtcgtgaactaaattaccaagggttgttcgatcgaggaatgcaattagcaagtgttagattttgggcttccttattagtgacgttaataacagcaataacaacaacaccaccacaaaaataacaacaaccggtgttcactgaatcactgtgcgatcaccatgtcgtgtgttcctccgcttattgctgaccgatgcgcaacaacaatgggcgcaggtggacgacacggtgcacgaggtggacaagcacctcccgggcgcgctgaaggcggcgtcggcgcatgtctacgcggtggttcggggcgtgccggaggtggcgcgcgagctggcggccgaggcgcagcggtcgggcgtgaggggcgcagcccgtgcggcgctcgcgatgacggagccggtggcgcgggacgtgtacggccgcgtggagcccgtggccaaggacctctacgtgcggtacgagcccgcggcggagcacctggccgtctccgcctggcgctcgctgaacggcctgccggtgttcccgcacgtcgcggagatcgtcgtgcccaccgccgcgcactgggccgacaagtacaacagggcggtcgcagccgccgcggagcacggctacgcgggggccaagtacctccccgccatccccaccgaacgcatcgccaaggtgttttcgtcggcgccagaggccgagccgctggcagagggccagtagtgtgtgtgtgtgtgcgcgcgcgcgcgagctcgtctttgccggtggtgactctggatttggatcaccttccgaactgaactgaaaataaggaagcgtgaatccgggggccagttaaagatggtggtatggtatggtagcggcgttgtactagatgcgtgatgggacgatggttacggaccatgatgatgacgctgtgttccatttagctctctgctgcgtgcttttgtataaaagaagtggttcgatgtcgcaa

SEQ ID NO: 142309 - DNA, 3759 bp, Zea Mays
gtccacgttgtcgccctcataggctggtgcctgcctggtggtcgccattccgctgcgcacaggcgcacagcccaatccagtacaaacagcagcagcttcgcctccacctccacgcgagccaagcgcccggcccggctcccgcagcgcaaaaccctagcctcgcccgccccaaacccttggcggctacggtctctgatcccggtccaatggcgtcgtcgccggacttgttccctaacgttgccttctccgacgtctctgccgccgcccccgcggccgaggccaccgccgcgttcgggctcggcgccaccaccggggccccgcgcctctgcctcgtcaagtccgggaaggacgaggcggagcccacggtcgacatcgacctcgccgatgcgcaggtatttaagttgggaccgatggagtggctgtgcgtgtgcgacgagtcggaggctaaggctggcgtggaagagaagtcattttcaagagcaattaaggttgttcttaggacagaagctgagagcaaagccttctctttagcttttcaacaatggaaacaccaagttattagtggaaaagctggtgagaggttggagaatggatcaataattgcttcgaaaagcaaatttgatacaaaaattgaggcatcatcagcaaagatgtatttccactactacgggcaattattacatcagcaaaacatgttacaagattttgttcggacaggaacatactatgctgctgtaatggaaaaccgatctgactttgagggtcgagttgtggttgatgttggggctggaagtggtattctgtcgttatttgctgcccaggctggtgccagacatgtctatgcagttgaggcatccgaaatggctgaaaatgctcaacgtctaatgtccgggaatccgtcacttggacagcggatcacggtcatcaggggcaaggtcgaggaagtagagcttccagaaaaagctgacatattgatttctgagcctatgggaacccttttggttaatgaaaggatgctagagtcctatgtcatagctagagacagattccttgctccagatggtaaaatgtttccaacaacaggaaggattcacatggctccattttctgatgaatacctttatgttgaaatagcaaacaaggctctcttttggcagcagcacaatttttttggtgttgatcttacacctttacatggttcagcattccagggatatttttcacagcctgttgtggatgcatttgacccaagattattaatttctccaccaatatatcatacacttgattttactagcatgaaggaagaggagctttacgagattgatatccctctgagttttgtagcatctgttggcactagagtacatggattggcttgttggtttgatgtgttgttcaatgggagcactgtgcaaaggtggcttaccactgctccaggatctcctaccactcactggtaccaactgcgatgtgtgctttcacagccattgtatgtgatggccggccaagaaataactggccgccttcatctcgtagcccatagtgctcaaagctacacaatatacttgacaatgtcagctaaaatgtggggtgtgggtgcggagcaaggcggtatcctacaaacatctacaggaaaacttgaactcaaggagccgtactacaggttgtctcagccgcaatcctacatgttgccacaagatcaacagcagcagcagcaattgtcatctttgcagccacacggatcggagcagcagatgcaggaagggcttagcccaggcatcacgatagaccaagtagacaaagattacggcctcaactagacagacttgagaacctgagttggatgctctgatattccagcaacgagctcaggtctgtacaagtacaacacttcagagtgctccttagcctatgtttgtcaggcgttagctgccaaatgctaacatcacgttcgaggcgtacgagaccattccagagttgtgcagctgcagctaactgctggcgcgcccctgctccgttacttacgagggagtggaaaaaagcaattataaaatgtacggtttcaggtaaagtgaagatcggatgcaactaacaatggcgtgcatgttgtttaatatattattgctagaaattcatttattttccatgttcaaaaaaaagagacacaggccggttacgccgttggcgacgtgcccatcacggagcggctacgtgtcggtcccgctccagagtgttcttgcacagcctggacggtgccgatggagagtgccacaaatcggacggcccgacgatgccgcccgccccctatatagccctctttcccggcccttccgtctcctcgttcttccagcgaagcaagcagcctaaaaaaaccgtatcgtctcgcctgttcagtttccttctcctcttcccgcagcccggtttgccgaccaggttccaccgttccagagtagccaagcgaatcccgtgtctggttcgcgcgatggcggaggagcagtccaacccccagcaccagcaagcggtaagcgtgacccctccctccactcctcgcctcgattcactcctcaatttcgtgcgctgatgattctgtcttggatttggggaagagggttttgtctgatctgatctgttgttggtgcgccatccacaggaggagagggaggttatggtggagcagcagcagccgaggagggccccgaagctgaggtacctggacttcgtccaggtggcggctgcccaggccgcggtgtgcctcgctgggctctacggcctcgccaaggaccacgccggcccgctccgccccagcgttgacgccgtcgagtctgccgtcaagggcgtcgttagccccgtctacgaccgcttcggcggcctgccgctcgacgtcctcgccttcgtcgaccgcaaggtggacgacacggtgcacgaggtggacaagcacctcccgggcgcgctgaaggcggcgtcggcgcatgtctacgcggtggttcggggcgtgccggaggtggcgcgcgagctggcggccgaggcgcagcggtcgggcgtgaggggcgcagcccgtgcggcgctcgcgatgacggagccggtggcgcgggacgtgtacggccgcgtggagcccgtggccaaggacctctacgtgcggtacgagcccgcggcggagcacctggccgtctccgcctggcgctcgctgaacggcctgccggtgttcccgcacgtcgcggagatcgtcgtgcccaccgccgcgcactgggccgacaagtacaacagggcggtcgcagccgccgcggagcacggctacgcgggggccaagtacctccccgccatccccaccgaacgcatcgccaaggtgttttcgtcggcgccagaggccgagccgctggcagagggccagtagtgtgtgtgtgtgtgcgcgcgcgcgcgagctcgtctttgccggtggtgactctggatttggatcaccttccgaactgaactgaaaataaggaagcgtgaatccgggggccagttaaagatggtggtatggtatggtagcggcgttgtactagatgcgtgatgggacgatggttacggaccatgatgatgacgctgtgttccatttagctctctgctgcgtgcttttgtataaaagaagtggttcgatgtcgcaatccctgtgtttatctgacgatgcggttttttggctgttttagtttttgtttggtcagttcaggttagggcgaaaacgataagcttgcgtcaatgctatgcttttagagcatc

SEQ ID NO: 142310 - DNA, 2186 bp, Zea Mays
attccgctgcgcacaggcgcacagcccaatccagtacaaacagcagcagcttcgcctccacctccacgcgagccaagcgcccggcccggctcccgcagcgcaaaaccctagcctcgcccgccccaaacccttggcggctacggtctctgatcccggtccaatggcgtcgtcgccggacttgttccctaacgttgccttctccgacgtctctgccgccgcccccgcggccgaggccaccgccgcgttcgggctcggcgccaccaccggggccccgcgcctctgcctcgtcaagtccgggaaggacgaggcggagcccacggtcgacatcgacctcgccgatgcgcaggtatttaagttgggaccgatggagtggctgtgcgtgtgcgacgagtcggaggctaaggctggcgtggaagagaagtcattttcaagagcaattaaggttgttcttaggacagaagctgagagcaaagccttctctttagcttttcaacaatggaaacaccaagttattagtggaaaagctggtgagaggttggagaatggatcaataattgcttcgaaaagcaaatttgatacaaaaattgaggcatcatcagcaaagatgtatttccactactacgggcaattattacatcagcaaaacatgttacaagattttgttcggacaggaacatactatgctgctgtaatggaaaaccgatctgactttgagggtcgagttgtggttgatgttggggctggaagtggtattctgtcgttatttgctgcccaggctggtgccagacatgtctatgcagttgaggcatccgaaatggctgaaaatgctcaacgtctaatgtccgggaatccgtcacttggacagcggatcacggtcatcaggggcaaggtcgaggaagtagagcttccagaaaaagctgacatattgatttctgagcctatgggaacccttttggttaatgaaaggatgctagagtcctatgtcatagctagagacagattccttgctccagatggtaaaatgtttccaacaacaggaaggattcacatggctccattttctgatgaatacctttatgttgaaatagcaaacaaggctctcttttggcagcagcacaatttttttggtgttgatcttacacctttacatggttcagcattccagggatatttttcacagcctgttgtggatgcatttgacccaagattattaatttctccaccaatatatcatacacttgattttactagcatgaaggaagaggagctttacgagattgatatccctctgagttttgtagcatctgttggcactagagtacatggattggcttgttggtttgatgtgttgttcaatgggagcactgtgcaaaggtggcttaccactgctccaggatctcctaccactcactggtaccaactgcgatgtgtgctttcacagccattgtatgtgatggccggccaagaaataactggccgccttcatctcgtagcccatagtgctcaaagctacacaatatacttgacaatgtcagctaaaatgtggggtgtgggtgcggagcaaggcggtatcctacaaacatctacaggaaaacttgaactcaaggagccgtactacaggttgtctcagccgcaatcctacatgttgccacaagatcaacagcagcagcagcaattgtcatctttgcagccacacggatcggagcagcagatgcaggaagggcttagcccaggcatcacgatagaccaagtagacaaagattacggcctcaactagacagacttgagaacctgagttggatgctctgatattccagcaacgagctcaggtctgtacaagtacaacacttcagagtgctccttagcctatgtttgtcaggcgttagctgccaaatgctaacatcacgttcgaggcgtacgagaccattccagagttgtgcagctgcagctaactgctggcgcgcccctgctccgttacttacgagggagtggaaaaaagcaattataaaatgtacggtttcaggtaaagtgaagatcggatgcaactaacaatggcgtgcatgttgtttaatatattattgctagaaattcatttattttccatgttcagtgaattgtgttcaatttgtgcgtctcgtggcgtatctgcatgcacaaatcttaagcatgtttgattcatgtggctt

SEQ ID NO: 142311 - DNA, 3634 bp, Zea Mays
attccgctgcgcacaggcgcacagcccaatccagtacaaacagcagcagcttcgcctccacctccacgcgagccaagcgcccggcccggctcccgcagcgcaaaaccctagcctcgcccgccccaaacccttggcggctacggtctctgatcccggtccaatggcgtcgtcgccggacttgttccctaacgttgccttctccgacgtctctgccgccgcccccgcggccgaggccaccgccgcgttcgggctcggcgccaccaccggggccccgcgcctctgcctcgtcaagtccgggaaggacgaggcggagcccacggtcgacatcgacctcgccgatgcgcaggtatttaagttgggaccgatggagtggctgtgcgtgtgcgacgagtcggaggctaaggctggcgtggaagagaagtcattttcaagagcaattaaggttgttcttaggacagaagctgagagcaaagccttctctttagcttttcaacaatggaaacaccaagttattagtggaaaagctggtgagaggttggagaatggatcaataattgcttcgaaaagcaaatttgatacaaaaattgaggcatcatcagcaaagatgtatttccactactacgggcaattattacatcagcaaaacatgttacaagattttgttcggacaggaacatactatgctgctgtaatggaaaaccgatctgactttgagggtcgagttgtggttgatgttggggctggaagtggtattctgtcgttatttgctgcccaggctggtgccagacatgtctatgcagttgaggcatccgaaatggctgaaaatgctcaacgtctaatgtccgggaatccgtcacttggacagcggatcacggtcatcaggggcaaggtcgaggaagtagagcttccagaaaaagctgacatattgatttctgagcctatgggaacccttttggttaatgaaaggatgctagagtcctatgtcatagctagagacagattccttgctccagatggtaaaatgtttccaacaacaggaaggattcacatggctccattttctgatgaatacctttatgttgaaatagcaaacaaggctctcttttggcagcagcacaatttttttggtgttgatcttacacctttacatggttcagcattccagggatatttttcacagcctgttgtggatgcatttgacccaagattattaatttctccaccaatatatcatacacttgattttactagcatgaaggaagaggagctttacgagattgatatccctctgagttttgtagcatctgttggcactagagtacatggattggcttgttggtttgatgtgttgttcaatgggagcactgtgcaaaggtggcttaccactgctccaggatctcctaccactcactggtaccaactgcgatgtgtgctttcacagccattgtatgtgatggccggccaagaaataactggccgccttcatctcgtagcccatagtgctcaaagctacacaatatacttgacaatgtcagctaaaatgtggggtgtgggtgcggagcaaggcggtatcctacaaacatctacaggaaaacttgaactcaaggagccgtactacaggttgtctcagccgcaatcctacatgttgccacaagatcaacagcagcagcagcaattgtcatctttgcagccacacggatcggagcagcagatgcaggaagggcttagcccaggcatcacgatagaccaagtagacaaagattacggcctcaactagacagacttgagaacctgagttggatgctctgatattccagcaacgagctcaggtctgtacaagtacaacacttcagagtgctccttagcctatgtttgtcaggcgttagctgccaaatgctaacatcacgttcgaggcgtacgagaccattccagagttgtgcagctgcagctaactgctggcgcgcccctgctccgttacttacgagggagtggaaaaaagcaattataaaatgtacggtttcaggtaaagtgaagatcggatgcaactaacaatggcgtgcatgttgtttaatatattattgctagaaattcatttattttccatgttcaaaaaaaagagacacaggccggttacgccgttggcgacgtgcccatcacggagcggctacgtgtcggtcccgctccagagtgttcttgcacagcctggacggtgccgatggagagtgccacaaatcggacggcccgacgatgccgcccgccccctatatagccctctttcccggcccttccgtctcctcgttcttccagcgaagcaagcagcctaaaaaaaccgtatcgtctcgcctgttcagtttccttctcctcttcccgcagcccggtttgccgaccaggttccaccgttccagagtagccaagcgaatcccgtgtctggttcgcgcgatggcggaggagcagtccaacccccagcaccagcaagcggaggagagggaggttatggtggagcagcagcagccgaggagggccccgaagctgaggtacctggacttcgtccaggtggcggctgcccaggccgcggtgtgcctcgctgggctctacggcctcgccaaggaccacgccggcccgctccgccccagcgttgacgccgtcgagtctgccgtcaagggcgtcgttagccccgtctacgaccgcttcggcggcctgccgctcgacgtcctcgccttcgtcgaccgcaaggtggacgacacggtgcacgaggtggacaagcacctcccgggcgcgctgaaggcggcgtcggcgcatgtctacgcggtggttcggggcgtgccggaggtggcgcgcgagctggcggccgaggcgcagcggtcgggcgtgaggggcgcagcccgtgcggcgctcgcgatgacggagccggtggcgcgggacgtgtacggccgcgtggagcccgtggccaaggacctctacgtgcggtacgagcccgcggcggagcacctggccgtctccgcctggcgctcgctgaacggcctgccggtgttcccgcacgtcgcggagatcgtcgtgcccaccgccgcgcactgggccgacaagtacaacagggcggtcgcagccgccgcggagcacggctacgcgggggccaagtacctccccgccatccccaccgaacgcatcgccaaggtgttttcgtcggcgccagaggccgagccgctggcagagggccagtagtgtgtgtgtgtgtgcgcgcgcgcgcgagctcgtctttgccggtggtgactctggatttggatcaccttccgaactgaactgaaaataaggaagcgtgaatccgggggccagttaaagatggtggtatggtatggtagcggcgttgtactagatgcgtgatgggacgatggttacggaccatgatgatgacgctgtgttccatttagctctctgctgcgtgcttttgtataaaagaagtggttcgatgtcgcaatccctgtgtttatctgacgatgcggttttttggctgttttagtttttgtttggtcagttcaggttagggcgaaaacgataagcttgcgtcaatgctatgcttttagagcatcttttgaagactctttatttttgaccctatttaactctttatttgtcattc

SEQ ID NO: 142312 - DNA, 786 bp, Zea Mays
gatcacgcgcgtcacccgaaagggaatcgggttaagatttcccgagccgggacgtggcggcagacggcgacgttaggaagtccggagacgccggcgggggcctcgggaagagttatcttttctgcttaacggcccgccaaccctggaatcggttcagccggaggtagggtccagcggtcggaagagcaccgcacatcgcgcggtgtccggtgcgcccccggtggcccttgaaaatccggaggaccgaataccgtccacgcccggtcgtactcataaccgcatcaggtctccaaggtgaacagcctctggccaatggaacaatgtaggcaagggaagtcggcaaaacggatccgtaacttcgggaaaaggattggctctgagggttgggctcgggggtcccggccccgaacccgtcggctgctggcggaatgctcgagctgctcgcgcggcgagagcgggccgccgcgtgccggccgggggacggaccgggaacggccccctcgggggccttccccgggcgtcgaacaaccgactcagaactggtacggacaaggggaatccgactgtttaattaaaacaaagcattgcgacggtcctcgaggatgctgacgcaatgtgatttctgcccagtgctctgaatgtcaaagtgaagaaattcaaccaagcgcgggtaaacggcgggagtaactatgactctcttaaggtagccaaatgcctcgtcatctaattagtgacgcgcatgaatggattaacaagattcccactgtccctgtctactatccagcg

SEQ ID NO: 142313 - DNA, 154 bp, Zea Mays
tggatgtaggcgacgatggagagactccgcaagctttgagccaccacggaggtcgtcctgtcccggcccttgctccaaaggtgctggcatgcttcaggctcctgctccgaccgattggagagcggagggatccgtccaggcggatttgaagagc

SEQ ID NO: 142314 - DNA, 459 bp, Zea Mays
ccagccgcatcggcggcccctctcgtgtgtctggaaaccctagccgccatatctcacgatccactcgagcaccaagccgagggaaggtgaggagcgatggcgcgcggcgtggtgtcggcgaagggcggcgcggtcgcgggcaagaagaaggggtcggtttccttcacgatcgactgcaccaagccagtggaggacaagatcatggaggtcgcctcgctcgagaagttcctgcaggagcgcatcaaggtcgccggcggcaaggctggcaacctcggcgactccgtcaccatctctcgcgagaagaccaaggtcaccgtcacctctgacggacccttctccaagaggtataccacgatgacctgcttcaccgtgcttgcgtactgttactgtctgtgtctgcccctaaaggtcgtgaatacactcttgtagatctgtgtagtttgtactgtgttcaactgt

SEQ ID NO: 142315 - DNA, 1031 bp, Zea Mays
ccagccgcatcggcggcccctctcgtgtgtctggaaaccctagccgccatatctcacgatccactcgagcaccaagccgagggaaggtgaggagcgatggcgcgcggcgtggtgtcggcgaagggcggcgcggtcgcgggcaagaagaaggggtcggtttccttcacgatcgactgcaccaagccagtggaggacaagatcatggaggtcgcctcgctcgagaagttcctgcaggagcgcatcaaggtcgccggcggcaaggctggcaacctcggcgactccgtcaccatctctcgcgagaagaccaaggtcaccgtcacctctgacggacccttctccaagaggtacctgaagtacttgaccaagaagtacttgaagaagcacaacgtgcgggattggctacgcgtggttgctgccaacaaggaccgaaacgtctatgagctccgctacttcaacattgctgagaacgagggcgaggaagaagattagattgcactacgcttatattttagtattgaactcgttgcattttgatacctgtacccgtagtttcgcaaatgtcccatgttatggtgtggtatggttaatttgaagaatccttatgtactgaatctctgcaaaaagctatgttgtggacagaagtgtaacgtgccggatttcttgcatttcttagggctattttgagaaccctattttcttaaggggtttttatttttaagtgaaattagtttagtttttctttgagaaaaatagaaatcctttagggctgatttggtggatatggaattggagggaatcagagtccatatttaaatttgaatagggaggtgattcctcctccttcgttccctgtcccatcaaatcagccaggttagtttggaaactccataagcctatatttggataatttacacttcaatcccctcaccctatgcatagggtgaggggattgaagtgtaaattatctaaatataggcttatgaagtttccaaactagcctttaattgttttatgtatgctcgggggccaaa

SEQ ID NO: 142316 - DNA, 1382 bp, Zea Mays
caatcaaatccgtattagtttggtgacatttattcttacaaatttatccgagcaacataaacttctataaggtaagaaatactgaggagctattttaaatgtctagataatttgaaggcctgcaaaacttttttgaataggtcttcactcttcaaggtgccaacatcactgaaggttgattatctgagttcttaaggccatctcccctagttatatcagccttgtcagttactgttccccttgttggattatccatcagacaatttccctgtgctttgattgggttagtattatctggtgcttcatccactgtcatttttttaatcgagtattcgagtatccaacctcctcaggttctgatttactagacatatctggtaactagtcaatctcttcctcagactcagccgtgttattatcctcattagcttcactaaatttttcagatgatggcagcaaaggcatcatatatttagtccagacgagaggctccaccctaccttctttagaagttcgatcgacaccaaacgtttgatgctggttcccctcttgttcttcctcgtcatagtgatgcagtttgctaagaatcctccaagtaacagcatcaggtgctagttcatttcttttcatctccttaactaatatgctaacttattcggtccctgcttgcaggcagcgtctatgagtatgttgtagcacactgcgctgggagcaaccccacaatccaccaattcgtacaagaaatcacatgcctgttctagtttcctctgtttgcagagacctctgaagattgcactgtacacataatcatcatgtatccctgatggccagacgacagtactgtcccagaattcctttgctttctcaagcagccttgcactgcagagccctttgatcaccacagtatgagtcacaggatcagcaccattgctgtatcaacttgtccaatgccaaacaatcccttgaggacacagcacaccgagggcctctgcgtgatcacctgcacacacacacacaggtatccagatatgagtgtggtgaaggtgacaacatcagaagcacaaaacttaacgctgaatatgtcgtccatcgacgtagctagcgcggaggagccccctgccccctggcgaggaacgagcacgcgggggaggcgggcgacaccctgcgggagggaatttcgtcgagcagcctccgcgcgaggtggtgctggtgcggggacggcagtggagggctcgcggcgccaattgccgacgccgagccgacactctactagctccctagtccccaccgctgctgtgtcagtccgatcggtggtcactggtcagtcccagttcgtcgacgagggaaggaagcggcgaccggcgagcagttggtcttcggtt

SEQ ID NO: 142317 - DNA, 845 bp, Zea Mays
atctagaaggcttcacctctaagagatcccaagagggtacctatgtccttcaaagtttcagtgttgatcaatgatcggttccatgttacaagccaaattcgaagcaaaggcaatttggtgtgcaatttcttccgtgactaaagtttagtcagtgtcacatcaaatacttgaatatcaaatatgagtattaaatatagccttaattatgtttaatagattcgtctcgtcttttagccttcttctttgtaatttatttcataattcaactatattaaatatctggtatcgatctcgtagccggcggccgcaacaagaagaccaagcgcacggcgcccaagtccgacgatgtctacctcaagctcctcgtcaagctctaccgcttccttgtgcgcaggacaaagagcaacttcaacgccgtgatcctcaagcgcctcttcatgagcaagaccaaccgcccgccgctctcgatgcgccgcctcgtcaggttcatggaggggaagggtgatcagatcgccgtgattgtgggcaccgtgaccgacgacaagaggatcagcgaggtgccggcgatgaaggtctgcgcgctcaggttcactgagacagcgagggccaggatcatcaatgctggcggagagtgcctcaccttcgaccagctcgcgctccgtgccccacttgggcaaaacacggttctgctgaggggtcctaagaacgctagggaagctgtcaggcacttcgggcctgcaccaggagtgcctcacagccacaccaagccttatgttcgctcgaagggtaggaagtttgagaaggcgagaggaaggaggaacagcaggggcttcaaggtctaagtg

SEQ ID NO: 142318 - DNA, 2224 bp, Zea Mays
cccatcactctctagaaccctagcgccccgcccgtcctgccgccgccgcagccgccatcgcacggccatgggtatcgatctcgtagccggcggccgcaacaagaagaccaagcgcacggcgcccaagtccgacgatgtctacctcaagctcctcgtcaagctctaccgcttccttgtgcgcaggacaaagagcaacttcaacgccgtgatcctcaagcgcctcttcatgagcaagaccaaccgcccgccgctctcgatgcgccgcctcgtcaggttcatggaggggaagggtgatcagatcgccgtgattgtgggcaccgtgaccgacgacaagaggatcagcgaggtgccggcgatgaaggtctgcgcgctcaggttcactgagacagcgagggccaggatcatcaatgctggcggagagtgcctcaccttcgaccagctcgcgctccgtgccccacttgggcaaaacacggttctgctgaggggtcctaagaacgctagggaagctgtcaggcacttcgggcctgcaccaggagtgcctcacagccacaccaagccttatgttcgctcgaagggtaggaagtttgagaaggcgagaggaaggaggaacagcaggggcttcaaggtctaagtggccactgccttgccaatctagtgccgttttgctcgtgtcagctcaatattaccgttttggtgtcatagttgtaatgttttagttgtcggaatctcgtgtcattatcggatatcgaaccaatcaaatttcgctccttttttgtttttgccatgagacttgcccgtcacgaagatgctcacatatcattgtgggccgtaactatgtgaaagtctagctgcccttttgctttgctcgtctatcttcacttgtcagctgttcattttaatccagcgccttcacaattttttaacagtgaggccgcctgaaacgaactatactgatacagtgacattatagtccgttattttggttgcacagcacaataaatgagccggtggtaaaataaaatgggacttaatccacggcaatttattactggagaattcatctttgcgcaagaaccgctagggcaggaagggaaagtgtttgtgagatgctagagttggacttggacccctagtattacatgggcagataaattgctcctatactaatatattgcaggtatagaaagcttgcaacgaatataaataaatattggaaagtagcaacatgttcattcataagaagcacaaagcaggccgcacagcagctagcatatccgcccgttgccctgtcgatcacatcacatgggcacgggcgtgttgatggcgtcgaacgtccacatgtccatcccggcagcgccctgcggttgctgcggcggcggctggtggtgcacgtacgcgaccgtgggcacctgctcctgctgcgccacggcgtcgggcacgtacgcgtggtgctggaagaagccgcccatgcccatgacgtcgacgacgtcgtagtcgactaggtggtcgtccctgcctccgccggcggacatggcgagcatcccctgcgccgcggcggcgtgggcgtgggcgtggccgtcgtcgtcgtcgtcgtactcgggcggcgggtcctcgttggggaagttgaccttggccttggccccgcggatgcggcgcgcggcgcggtcgtaggcgcgcgcggcggcctcggcggtggcgaaggtgccgagccagacgcgcgcgcccttggccgggtcccggatctccgccgcccacttgccccaggggcggcgccggatgccgcggtacatggtcttgcgctcccgcttgcgggccggcggctctgcggtgcagtatgcatgcatgtcagctctagctacgctgcgtgcatggctggtcgtcgtcgttagttgaatttacagaaagcaagcgtacgtgcgtaccttggtcgggatggaaggaggcggcggcggcgaagtcgtcgtcgtcgtggccgtgcgcgtgcgcgtgcgcgtggaggaggtcgtcgaagtcggcggccgcgtgcggccagatgtcctcggcgcagagaccccgcttggcgccgcgatgcgggatgaactcggagatgatcgcgccgccgcacatgtttcctagtcgatctgctgcggctgaggaggaagagctaggatgccaaggaaaagctaggagaggcaaaggtggtgggggtggagtggacagtggagtgggaggttgctgtgtctcg

SEQ ID NO: 142319 - DNA, 2003 bp, Zea Mays
cccatcactctctagaaccctagcgccccgcccgtcctgccgccgccgcagccgccatcgcacggccatgggtatcgatctcgtagccggcggccgcaacaagaagaccaagcgcacggcgcccaagtccggcgatgaaggtctgcgcgctcaggttcactgagacagcgagggccaggatcatcaatgctggcggagagtgcctcaccttcgaccagctcgcgctccgtgccccacttgggcaaaacacggttctgctgaggggtcctaagaacgctagggaagctgtcaggcacttcgggcctgcaccaggagtgcctcacagccacaccaagccttatgttcgctcgaagggtaggaagtttgagaaggcgagaggaaggaggaacagcaggggcttcaaggtctaagtggccactgccttgccaatctagtgccgttttgctcgtgtcagctcaatattaccgttttggtgtcatagttgtaatgttttagttgtcggaatctcgtgtcattatcggatatcgaaccaatcaaatttcgctccttttttgtttttgccatgagacttgcccgtcacgaagatgctcacatatcattgtgggccgtaactatgtgaaagtctagctgcccttttgctttgctcgtctatcttcacttgtcagctgttcattttaatccagcgccttcacaattttttaacagtgaggccgcctgaaacgaactatactgatacagtgacattatagtccgttattttggttgcacagcacaataaatgagccggtggtaaaataaaatgggacttaatccacggcaatttattactggagaattcatctttgcgcaagaaccgctagggcaggaagggaaagtgtttgtgagatgctagagttggacttggacccctagtattacatgggcagataaattgctcctatactaatatattgcaggtatagaaagcttgcaacgaatataaataaatattggaaagtagcaacatgttcattcataagaagcacaaagcaggccgcacagcagctagcatatccgcccgttgccctgtcgatcacatcacatgggcacgggcgtgttgatggcgtcgaacgtccacatgtccatcccggcagcgccctgcggttgctgcggcggcggctggtggtgcacgtacgcgaccgtgggcacctgctcctgctgcgccacggcgtcgggcacgtacgcgtggtgctggaagaagccgcccatgcccatgacgtcgacgacgtcgtagtcgactaggtggtcgtccctgcctccgccggcggacatggcgagcatcccctgcgccgcggcggcgtgggcgtgggcgtggccgtcgtcgtcgtcgtcgtactcgggcggcgggtcctcgttggggaagttgaccttggccttggccccgcggatgcggcgcgcggcgcggtcgtaggcgcgcgcggcggcctcggcggtggcgaaggtgccgagccagacgcgcgcgcccttggccgggtcccggatctccgccgcccacttgccccaggggcggcgccggatgccgcggtacatggtcttgcgctcccgcttgcgggccggcggctctgcggtgcagtatgcatgcatgtcagctctagctacgctgcgtgcatggctggtcgtcgtcgttagttgaatttacagaaagcaagcgtacgtgcgtaccttggtcgggatggaaggaggcggcggcggcgaagtcgtcgtcgtcgtggccgtgcgcgtgcgcgtgcgcgtggaggaggtcgtcgaagtcggcggccgcgtgcggccagatgtcctcggcgcagagaccccgcttggcgccgcgatgcgggatgaactcggagatgatcgcgccgccgcacatgtttcctagtcgatctgctgcggctgaggaggaagagctaggatgccaaggaaaagctaggagaggcaaaggtggtgggggtggagtggacagtggagtgggaggttgctgtgtctcg

SEQ ID NO: 142320 - DNA, 935 bp, Zea Mays
agggggacagggggtgagtttttttgctttgcgtcggcggcagcagggcaaaggcaaaggcaggatcttgttccattcaccggtcgccacgctcgtgctcacctcaaccagcactgcagataactttttactactaggccgggatcacgatgatctaccgctgcgctgcgcgatcggtactagtatttgccatcttggcaatgcatgcgacgacgttttaggcgctgacgtggagagtgtatgtatatcactgacctagcgtggcggagcggaaggtggtggagttgtcgaccacgttccggctggccttgatcaccgtcctccacatgccgtcgccgacgaacatcagttgccgctcccgtccttggccaccaccaggtccggccccgggaccacctgctgctgctgcagccgcctccggtccgcccccgacacccacgacgggaacccgcgccgcacgcgcccgtacccctccagctccagtgcccctctgccctggcgccgccgccggcgctgcgggagacgccgcagcatcgccagggagttggacacgaggtgggccacgtggtacatgcggccctggatgtagggacggacgcggccgtcctccgatgccgacggccccgcgaagccgtccaggcacgtgtactggttggtcagggcggccgacagcacggtctggaccgccgccaaggactcggactccacctccgcctccgccgcggtgaagttccccgccgacagctccgcctccgccgtgcccagctgcgccagcgtgtgccccagcagctccacgcagtcggccagcgccaggcggtcgcgcacccgcagcgcccccgcgggccgccggaggtacgcggagcagttggacgccgacgcgcgcaccgccgacgccgcgcgcgccaccacggccgagatcacctcgcgggccggct

SEQ ID NO: 142321 - DNA, 1093 bp, Zea Mays
tccacggaagactcgtgtcttccacctcattcgcgattctccccggagcccgccacgcgtccaccaccctcccgctccggcacacctctagacgatcttctcgccgccgggcggcggatatgactatatatatacgtatgtaacctatcgccgccgcaggcagggtaatgtagttgtccctagcaccgccgagctgatccatcggaaggaactagtcttgcaacttgcaagcagacaagtcaggtggtcctagactcctagtactaggatggcaacggcacgagcactccgcctggtactcacgagttcgtcggtcccagccgccaaagacggcttcctggttgccgcgcgccgccgcctgctgtccgcctcgacggaagccggcggcgcgggcgacgcggcagtgcagtccggagacgcgccgagtgacgactacacggaccggccgccgcggttctccggcgccgaggaggccaccagcgcggggggtcgcgttggcaagcacccggggggaaaagcggcggagcgcgtcccgccgttcgcgccctcggggaagaagccgccactggccgggtccgaacacgagctcgcggacccggcgggagccgcgtcgttcacgcagaaacggcggttgtcttgctcctcctcctcctcctcgcgggagcgggagccgcgcgaggcggcgacgcccggcgggcccgagtccgcggcgcgcaaggtgagggaggaggacagggagtactaccggacgcacaagccgtcgccgctggcggaggtggagttcgcggacacgaggaagcccatcacgcgcgccaccgacggcagcgccgcggaccggtacgcggacgcgcaggggcggacggtggaggacacggtggacgactcgctcgcgcgcgccgaggccatgttcagggaggccgcggcgcgcggaaatcccgagtggccgcactcccgcgcgctcgccgagatgctggcgcgacgcgagctggggaaggacgctgctgccactgccagcggccacccctgctggggcagctgaatggacacggcccacgcagaagcagtgttgacggttgacgcgcacgtacgtggt

SEQ ID NO: 142322 - DNA, 1384 bp, Zea Mays
gtcaaggaacacttaacctgaagaaaaccactattgcagcagcagtatagtcaacggtgtagcagtagctgcattgcgttattggggtagtagtgtggcagtgttggactgctggtcatcaggtcatggcttcttcttcttttacttccttgtcagtgatggtgctcttgtgcctagcggcggcggcggtggcctcggcgcaactgtcgccgacattctactccaggtcgtgtcccagagctctggccaccatcaaggccgccgtgacggccgcggttgcgcaggaggctcgcatgggggcctccctgctcaggctccacttccatgactgctttgtccaaggttgcgatgggtcggtgctgctgaatgacacggccaccttcaccggcgagcagaccgctaatccgaacgtcggctccatcagaggcttcggcgtcgtcgacaacatcaaggcgcaggtggaggcggtgtgcccgggcgtcgtctcctgcgccgacatcctcgccgtcgccgcccgcgactccgtcgtcgcgctgggagggccttcgtggagggtgcttctcgggcggagggactcgacgacggcgagcctaactctagccaacagcgacctgccagcgccgtccctggacctcgccaacctcaccgctgcgttcgccaagaagcggctcagcaggaccgacctggtcgctctctcaggcgcgcacacgatcgggctggcacagtgcaagaacttccgggcgcacatatacaacgacaccaacgtgaacgcggcgttcgcgacgctgcgcagggccaactgccccgcggcggccggcaacggcgacggcaacctggcgccgctggacaccgccacgcccaccgcgttcgacaacgcctactacaccaacctgctggcgcagagagggctgctacactccgaccagcagctcttcaacggcggcgccacggacggcctggtccgcacgtacgcgtccacgccgaggaggttcagcggggacttcgcggcggccatgatcaggatgggcaacatcagcccgctcaccgggacgcagggccagatcaggcgcgcctgttccagggtcaactagctagctacgtactcgcggctatagctacctgtgcgtacgtcccaagtgatccgacgatccaacggttcccatcagtgattatcactgtaataaggccggttgtgccattgtcagttgcgcctctgttttgcttgtactggttcaagaactcctctttctcgagtcagcaaaggtgggtgtgatatgactcggaaggaaagtggcgactagcctacccatcaccacaccatatttatgccttgttcgtttacgtcggattgcacccggaatcgttccagttgatcaaagtttat

SEQ ID NO: 142323 - DNA, 1487 bp, Zea Mays
gcactttgctgcggccctgccgactttgccatcgttttttggctccatacgtgtgcactcatgtatagaataatccgcagaaaatgcagcatggcaggactgatggagaaaaaaagtgaatcacggcgtgtgcctatatatatctgcatgcaatgcagcgcattccacacccatctcagcaatagagctcgatcggcgatctgtagtagcagcactagcactagctacgtagtacattgcatcgtcgtctctttgctagtagtagctatctcctggccgccatggcgtcttcctcggtctcatcctgcctgctgcttctcctgtgcttggcggcggtggcgtccgcgcagctctcgccgacgttctacgactcgtcgtgccccaacgcgctgtccaccatcaagagcgccgtgaacgccgccgtgcagaaggagaaccgcatgggggcctccttgctcaggctgcacttccatgactgctttgtccaggggtgcgacgcgtcggtgctgcttgccgacaacgccgccacgggcttcaccggcgagcagggtgctgcgcccaacgccgggtcgctgaggggcttcgacgtcatcgccaacatcaaggcacaggtggaggcagtctgcaagcagaccgtctcctgcgccgacatcctcgccgtcgccgcccgtgattccgtcgtcgcgttgggcgggccgtcatggacggttcctctggggcggagggactcgacgacggcgagcctgtccctggcgaacagcgacctgccgcctcccttcttcaacctcggccagctcataacagcgttcggcaacaagggtttcaccgcgaccgagatggccacgctctccggcgcgcacaccatcgggcaggcgcagtgcaagaacttcagggaccacatctacaacgacaccaacatcaaccagggcttcgcgagctcgctcaaggccaactgcccccggcccaccggctccggcgacggcaacctggcgccgctcgacaccaccacgccgtacagcttcgacaacgcctactacagcaacctgctgagccagaaggggctcctgcactcggaccaggagctcttcaacggcggcagcaccgacaacaccgtcaggaacttcgcgtccaactcggccgccttcagcagcgccttcgccgcggccatggtgaagatgggcaacctcagcccgctcaccggatctcagggccagatcaggcttacctgctccacagtgaactaagattaataataatcaccatacgcaaaaaagagtggtatattcacatgcgaataataaggctaagccaccatgtgactagctagtggtatattcaacgaatcgtttgaaagggacgagtgcgactttaattttagatactagctgcaaaagcggcatatatgtatcagcccgatcaattgctcaaagaaaagatgcacgtcatacatttcagagctaggctttatgcaaaggactccctggctt

SEQ ID NO: 142324 - DNA, 1709 bp, Zea Mays
gcacaccacacaacacaacacaataatacagcaaaggaggctagcagaagtgcaggattaataagctaagctagtagaaattaagcaaagcataggcacagccatggctacctcctctggttcttgccttattattagcctgttggtggtggtggtggcggcggcgctgtcggcctcaacggcgtcggcacagctgtcgtcgacgttctacgacacgtcgtgccccagcgcgatgtccaccatcagcagcggcgtgaactccgccgtggcgcagcaggctcgtgtgggggcgtcgctgctccggctccacttccacgactgcttcgtccaagcaagtctagctgtctcagatgcatctatctatctacttatatataagcatgatttcctttctagctagctagcatcgtcgtgcattttaatttgaagataaaagattagcacgtcgtatatgcatgcgattaattaaccaggaggcatcatggtgaaatttctggtggtccaccagggctgcgacgcgtccattctgctgaacgacacgtccggggagcagacccagccgccgaacctaactctgaacccgagggccttcgacgtcgtcaacagcatcaaggcgcaggtggaggcggcgtgcccgggcgtcgtctcctgcgccgacatcctcgccgtcgccgcccgcgacggagttgtcgcggtacgtagctacatcaccgtgcctattaatttgctggctagtagcttgttggtttgcaaactaactaactaattccgatcgtatgcgtggtgcatatgcagctcggcgggccttcgtggaccgtgcttctgggcagaagggactcgaccggttcgttccctagccagacaagcgacctcccacctccgacgtcgagcctccaagcactgttagccgcgtacagcaagaagaacctcgacgcgaccgacatggtcgctctctcaggcgctcacacaatcgggcaggcccagtgctcgagcttcaacggccacatctacaacgacacgaacatcaacgcggccttcgcgacgtcgctcaaggccaactgccccatgtccggcggcagcagcctggcgccgctggacaccatgaccccgaccgtgttcgacaacgactactacaagaacctgctgtcgcagaaggggctgctgcactcggaccaggagctgttcaacaacggcagcaccgacagcacggtcagcaactttgcgtccagctcggccgccttcaccagcgccttcacggcggccatggtgaagatggggaacctcggcccgctcaccgggaccagtgggcagatcaggctcacctgctggaagctcaactcgtcctaataattaaggacggacgtccgatagacgatcctgcgcaatcgtatcgtacgtgcatgatacgcatacatctggaaactactataccaatgcaaacagagatctatacgtacgagtatgtataacgacgagtgatgtttgtatggatctacgtatgtaacaaggacctctcgtagcgcaaaggcgcgcgttgggagattaattaggtacacaagctattaccacattatatatcactctcattgtggctacatatctatatctctgaggccaaatgcttgggtgtccagtactaattaataataattcagtgcgtatgcaagatttgtgggcaaatattggtttacgatttcggaaaaaacaaa

SEQ ID NO: 142325 - DNA, 1554 bp, Zea Mays
gcacaccacacaacacaacacaataatacagcaaaggaggctagcagaagtgcaggattaataagctaagctagtagaaattaagcaaagcataggcacagccatggctacctcctctggttcttgccttattattagcctgttggtggtggtggtggcggcggcgctgtcggcctcaacggcgtcggcacagctgtcgtcgacgttctacgacacgtcgtgccccagcgcgatgtccaccatcagcagcggcgtgaactccgccgtggcgcagcaggctcgtgtgggggcgtcgctgctccggctccacttccacgactgcttcgtccaaggctgcgacgcgtccattctgctgaacgacacgtccggggagcagacccagccgccgaacctaactctgaacccgagggccttcgacgtcgtcaacagcatcaaggcgcaggtggaggcggcgtgcccgggcgtcgtctcctgcgccgacatcctcgccgtcgccgcccgcgacggagttgtcgcgctcggcgggccttcgtggaccgtgcttctgggcagaagggactcgaccggttcgttccctagccagacaagcgacctcccacctccgacgtcgagcctccaagcactgttagccgcgtacagcaagaagaacctcgacgcgaccgacatggtcgctctctcaggcgctcacacaatcgggcaggcccagtgctcgagcttcaacggccacatctacaacgacacgaacatcaacgcggccttcgcgacgtcgctcaaggccaactgccccatgtccggcggcagcagcctggcgccgctggacaccatgaccccgaccgtgttcgacaacgactactacaagaacctgctgtcgcagaaggggctgctgcactcggaccaggagctgttcaacaacggcagcaccgacagcacggtcagcaactttgcgtccagctcggccgccttcaccagcgccttcacggcggccatggtgaagatggggaacctcggcccgctcaccgggaccagtgggcagatcaggctcacctgctggaagctcaactcgtcctaataattaaggacggacgtccgatagacgatcctgcgcaatcgtatcgtacgtgcatgatacgcatacatctggaaactactataccaatgcaaacagagatctatacgtacgagtatgtataacgacgagtgatgtttgtatggatctacgtatgtaacaaggacctctcgtagcgcaaaggcgcgcgttgggagattaattaggtacacaagctattaccacattatatatcactctcattgtggctacatatctatatctctgaggccaaatgcttgggtgtccagtactaattaataataattcagtgcgtatgcaagatttgtgggcaaatattggtttacgatttcggaaaaaacaaatttcggcccccggcgaaaaacaagaaatttccgaattttcggaaattctaggtcaaaatcaaatagattcaatactttttaaaacaaagaatgatataatttatattaaaaataccaattttg

SEQ ID NO: 142326 - DNA, 1559 bp, Zea Mays
acaccacacaacacaacacaataatacagcaaaggaggctagcagaagtgcaggattaataagctaagctagtagaaattaagcaaagcataggcacagccatggctacctcctctggttcttgccttattattagcctgttggtggtggtggtggcggcggcgctgtcggcctcaacggcgtcggcacagctgtcgtcgacgttctacgacacgtcgtgccccagcgcgatgtccaccatcagcagcggcgtgaactccgccgtggcgcagcaggctcgtgtgggggcgtcgctgctccggctccacttccacgactgcttcgtccaagcaagtctagctgtctcagatgcatctatctatctacttatatataagcatgatttcctttctagctagctagcatcgtcgtgcattttaatttgaagataaaagattagcacgtcgtatatgcatgcgattaattaaccaggaggcatcatggtgaaatttctggtggtccaccagggctgcgacgcgtccattctgctgaacgacacgtccggggagcagacccagccgccgaacctaactctgaacccgagggccttcgacgtcgtcaacagcatcaaggcgcaggtggaggcggcgtgcccgggcgtcgtctcctgcgccgacatcctcgccgtcgccgcccgcgacggagttgtcgcgctcggcgggccttcgtggaccgtgcttctgggcagaagggactcgaccggttcgttccctagccagacaagcgacctcccacctccgacgtcgagcctccaagcactgttagccgcgtacagcaagaagaacctcgacgcgaccgacatggtcgctctctcaggcgctcacacaatcgggcaggcccagtgctcgagcttcaacggccacatctacaacgacacgaacatcaacgcggccttcgcgacgtcgctcaaggccaactgccccatgtccggcggcagcagcctggcgccgctggacaccatgaccccgaccgtgttcgacaacgactactacaagaacctgctgtcgcagaaggggctgctgcactcggaccaggagctgttcaacaacggcagcaccgacagcacggtcagcaactttgcgtccagctcggccgccttcaccagcgccttcacggcggccatggtgaagatggggaacctcggcccgctcaccgggaccagtgggcagatcaggctcacctgctggaagctcaactcgtcctaataattaaggacggacgtccgatagacgatcctgcgcaatcgtatcgtacgtgcatgatacgcatacatctggaaactactataccaatgcaaacagagatctatacgtacgagtatgtataacgacgagtgatgtttgtatggatctacgtatgtaacaaggacctctcgtagcgcaaaggcgcgcgttgggagattaattaggtacacaagctattaccacattatatatcactctcattgtggctacatatctatatctctgaggccaaatgcttgggtgtccagtactaattaataataattcagtgcgtat

SEQ ID NO: 142327 - DNA, 1161 bp, Zea Mays
gcaaaggaggctagcagaagtgcaggattaataagctaagctagtagaaattaagcaaagcataggcacagccatggctacctcctctggttcttgccttattattagcctgttggtggtggtggtggcggcggcgctgtcggcctcaacggcgtcggcacagctgtcgtcgacgttctacgacacgtcgtgccccagcgcgatgtccaccatcagcagcggcgtgaactccgccgtggcgcagcaggctcgtgtgggggcgtcgctgctccggctccacttccacgactgcttcgtccaaggctgcgacgcgtccattctgctgaacgacacgtccggggagcagacccagccgccgaacctaactctgaacccgagggccttcgacgtcgtcaacagcatcaaggcgcaggtggaggcggcgtgcccgggcgtcgtctcctgcgccgacatcctcgccgtcgccgcccgcgacggagttgtcgcgctcggcgggccttcgtggaccgtgcttctgggcagaagggactcgaccggttcgttccctagccagacaagcgacctcccacctccgacgtcgagcctccaagcactgttagccgcgtacagcaagaagaacctcgacgcgaccgacatggtcgctctctcaggcgctcacacaatcgggcaggcccagtgctcgagcttcaacggccacatctacaacgacacgaacatcaacgcggccttcgcgacgtcgctcaaggccaactgccccatgtccggcggcagcagcctggcgccgctggacaccatgaccccgaccgtgttcgacaacgactactacaagaacctgctgtcgcagaaggggctgctgcactcggaccaggagctgttcaacaacggcagcaccgacagcacggtcagcaactttgcgtccagctcggccgccttcaccagcgccttcacggcggccatggtgaagatggggaacctcggcccgctcaccgggaccagtgggcagatcaggctcacctgctggaagctcaactcgtcctaataattaaggacggacgtccgatagacgatcctgcgcaatcgtatcgtacgtgcatgatacgcatacatctggaaactactataccaatgcaaacagagatctatacgtacgagtatgtataa

SEQ ID NO: 142328 - DNA, 345 bp, Zea Mays
atgacttcctcgttaattagagctgagaccgaactcactgcagactttggaaacaccagtgaggacagtaggcgagaagtgccgtcaaacattcatctgcaggctcgggcggagagggaagaaatagttgacggtgccactggcaatactgtcagggtgaatggcaaccaacagcagcagaatcttcagaacaacatgcaccgcgtgctaggtatcgctccatcaatttcagaggcatcgagcagctggacgggtagggaaggtggattggtaccctccacttgcaagcagtttagattcaccatccataagcaatctatcagccagagcagtgacaggcgctga

SEQ ID NO: 142329 - DNA, 1686 bp, Zea Mays
gagaatccgacgagtaccacgcagcaccgcgtgatacataaatacgggcacggcaaaccccaaaactcagcaagccgcccagcacgaccgccagccatcaccggccagtgagacggtacagcaaatttcccccgtcgcgcccggtcattacgacggcgccggccgagcagacgccgccgccacgatgccgcccgccaccggcgccgtcgccgacactgcccccgccgcggggaccgtgctcctcggcaggtacgagctcggcggcctcctgggccgcggcgcctccgccaaggtgtacctggcgcgggacctgctcaccggccgctccgtggccatcaagtcgttccccaacccacgcgccggcggcggcgccggcgttggcgtcaacgccgccatcgagcgggaggcgtgcatcctccggcgcctgcggcaccgccacgtggtgcggctccacgagatcctggcgacgcgcaagaaggtccacttcgtgctggacctcgccggcggcggcgagctgttctcgctggtggacgcgtcggggcgcatgacggaggacctggcgcggcactacttccggcagctggtgtccgccgtgcgctactgccacgcgcgcggcgtgtaccaccgcgacatcaagcccgagaacctgctgctggacgagggcggcgcgctgaaggtggccgacttcgggctgggcgccgtgggcggcggcggaggaggaggaggaggagaaggcctccggcacacgatgtgcggcaccccggcgtacgtggcccccgagatcctgtcgcgcaaggggtacgagcccgggaaggtggacatctggtcctgcggcgtggtgctgttcgtgctggcggccgggtacctccccttcaacgacgccagcctggtgaacatgtaccgcaagatctacgcgggcaggttccggtgccccgggtggttctcgccggcgctgcgcgacctgctgcggcgcgtgctggacccggacccgtcggcgcgcattgacgcggacggcatcgtggcgcacccgtggttccgccacggcggcgaggaggaccttggcggcctggtgcacggcgggtacgaggaggtagaggaggaggaggaggaggccaaggcggacgaggacagggagccgaccgcgttcgacatcctcagcttctccccgggctcggacctgtcggcgctgttcgtgggcgcggggggaggcggcaaggagcgcgtgttcgtgggcgagcctgccgcggccgtgctgggccgcgtggaggcggccgcgcggaagggcgggtaccgcgcgcggagggacgggaagagggcgacggtgtacgtggaggaggaggaggaggagggcggcggcggcgtcctggcaaaagtgagcgtgtttaggctcgcggacgccgtgtccgttgtggaggtggtgaagggcgacggcgccgacgccgcgctggtctggaccgagctgctggagccggccgtgaagcccccggcgctgagctgatgaggtggggtggaagccgcgttctggttgcgattcttttgtttcttcttttttgtcgtcgcctgctatatatcattggcgagatcgtcgtgtgtaaattattcactcgctccgtggctatatccaacaaagcaagcaaggaagaagaagaagaatccttgcggtttctgagaaaaaaaaatagaaaa

SEQ ID NO: 142330 - DNA, 117 bp, Zea Mays
ctacattccattccggttcaccgcatgtcaggacccctttggaattcggaaattttactatgggaagtttatatgaaacagtctgattgtttcgtagtacgaagattacaggatgtt

SEQ ID NO: 142331 - DNA, 1067 bp, Zea Mays
acccgcggcaaaattttccgccataaagtgcacgcacggcgccgcagctaatccatcactagtcagtgaccggtagtccacaactccacactcccctgctggcgctcgcaccggcagtgcagatgctagcagaggatgagctcttccgggaccgggacgatcgtgagggccaccgacgccgagcccccggcgccgccccccgcttcccgaacagggcgtcctactacgtgccgagccaggaccgcgccatcccgcgccgcctggccgtcgccagggaggaaaacaccaagctccgggacactcggttcccctcgcacagcccgcagccgagcgacatcatcttcgacgtcgtcgcagcccgccgcgacgaccggttcagcgccgccgcgccggagctcaagctgcggcccatcctcacgaggcggccgcccaggcccgacgccgccggcgacggtggcagcaacgcggccgcgtcgccgacgggaagggcgcgcccaccacggttccgcctccacgccgcgaagggcgggccgccgctgccgccgccggaccagcacaggcggaacatggcggaggggggctgcacccggcggctgcggcgcggcagccggcttcagtggatgtacgagagcctggtggtggtgaaggagtcggcggaccccgaggaggacttcctggagagcatggcggagatggtcacggccaacggcgtgcggtcgccgcggggcctagaagagctccttgcctgctacctcgcgcttaacgctgctgaccaccaccgcgccatcgtcgttgcgttccgccgcgcgtggctgcacctgcacctccacctgcgccgcgtgccgccaccgccgtcgttgtagattagctctagcttctagctagccattttttcttcggtctcgaactcactagcgatcgctgcacggagctagacgcaaagatcgcgatgtgcctgctctgttgtacagtgcgtgtatgtatgatgattcggggacgcgcgcgttcatgtgaattgtggtgtgcgtgctacggttatgaattatgaccacacttgtcgtcgaaaa

SEQ ID NO: 142332 - DNA, 1290 bp, Zea Mays
cagggagaaaataaaccacgaatcggataatgctggtggacccagctgccacctgccatttgggcccccgatgcttgaaacacccgccgcgggccgcgtcggcgtcggcatccgtcgccacaaaactctcctcgcaagcgtcgccgccccgcacagatcaaccgctcgaaatttgggggaagcaagcgagagcagcagcaagcctcatcgggaagtggagagatggaggcggcgggtcgcctccccctcctcatcgtctcctccctcctcctgctcctctcgccggagcggccggcggaggccgcgccgcggcgaatccagccgctcgccaccgccgcgctgagccgcctctacgacacctccaactacggcaggctgcagctcaacaacggcctcgcgctcactccgcagatggggtggaacagctggaatttcttcgcctgcaacatcaacgagacggtcatccgcgagacagctgacgccctggtgtccacgggactggctgcgctgggctacaacttcgtcaatatcgatgattgctggtcatacgtgaaacgtggaaagcaggatcaattgctgcctgatccaaagactttcccttcaggcatcaaagcccttgcagattatgtgcatggaaaaggtctgaaacttggtatatactctgatgctgggaaatttacttgccaagttcgacctggatcactcggtcatgaaaatgacgatgctgcgatctttgcttcatggggtattgattacctgaagtatgataactgctacaatttgggaattaagcctcagaaaagatatcctcctatgcgagatgctcttaattcaactgggcgccaaatattctactctttgtgtgaatggggacagtatgatccagccttatgggctggcaaagtgggcaatagttgacgtgcatgacaccaatatgtacatcttttctcctgcaaccattgtcgcttcggtttgatcaggaccggtggatccaagatgacagcaccgctatgattcaaggatatgtcacgacaacaagggccttcgtttttcctgctgcattctgttccacccgagtgcagaagtccacttcgtgcagaactgtctcagtgatgtttgtatttctcacggaatagctctatttatctcaagattgagcaagctcgaggcttactcggtgtaccggcgttgtatccttggggcatccaagatcttgtacgatttgaaacagtctgaaccaatgatgtaaaacaagatagtgaaaatacaacttcacaaattgcagccgta

SEQ ID NO: 142333 - DNA, 1854 bp, Zea Mays
cagggagaaaataaaccacgaatcggataatgctggtggacccagctgccacctgccatttgggcccccgatgcttgaaacacccgccgcgggccgcgtcggcgtcggcatccgtcgccacaaaactctcctcgcaagcgtcgccgccccgcacagatcaaccgctcgaaatttgggggaagcaagcgagagcagcagcaagcctcatcgggaagtggagagatggaggcggcgggtcgcctccccctcctcatcgtctcctccctcctcctgctcctctcgccggagcggccggcggaggccgcgccgcggcgaatccagccgctcgccaccgccgcgctgagccgcctctacgacacctccaactacggcaggctgcagctcaacaacggcctcgcgctcactccgcagatggggtggaacagctggaatttcttcgcctgcaacatcaacgagacggtcatccgcgagacagctgacgccctggtgtccacgggactggctgcgctgggctacaacttcgtcaatatcgatgattgctggtcatacgtgaaacgtggaaagcaggatcaattgctgcctgatccaaagactttcccttcaggcatcaaagcccttgcagattatgtgcatggaaaaggtctgaaacttggtatatactctgatgctgggaaatttacttgccaagttcgacctggatcactcggtcatgaaaatgacgatgctgcgatctttgcttcatggggtattgattacctgaagtatgataactgctacaatttgggaattaagcctcagaaaagatatcctcctatgcgagatgctcttaattcaactgggcgccaaatattctactctttgtgtgaatggggacagtatgatccagccttatgggctggcaaagtgggcaatagttggcgtacaactgacgacataacggatacatggaaaagcatgacagacattgctgataagaacaacaagtgggcatcatatgctggacctggtggttggaatgacccagatatgctggaagtaggcaatggtggcatgaccttagcagagtatcgctcacattttagcatatgggctctcatgaaggcccctctattaattggctgtgatgtcagaaacatgacttctgaaacaatggaaatactgagcaacaaagaagtaattcaagtaaaccaagatcctcttggagttcaaggaagaaaaattttaggacaaggaaaatatggatgccgtgaggtgtgggctggtcccttgtctgggaatcggcttgttgttgctctgtggaaccgttgttcagatactgctaacgttacaatgaaactgccagcagtaggccttgatgggtatgctgcctattctgttagggatctgtggaagcacgaaactatatcggaaaatgtcgtaggaacttttggcgctcaagttgacgtgcatgacaccaatatgtacatcttttctcctgcaaccattgtcgcttcggtttgatcaggaccggtggatccaagatgacagcaccgctatgattcaaggatatgtcacgacaacaagggccttcgtttttcctgctgcattctgttccacccgagtgcagaagtccacttcgtgcagaactgtctcagtgatgtttgtatttctcacggaatagctctatttatctcaagattgagcaagctcgaggcttactcggtgtaccggcgttgtatccttggggcatccaagatcttgtacgatttgaaacagtctgaaccaatgatgtaaaacaagatagtgaaaatacaacttcacaaattgcagccgtacaagcagcacttgtacaagcactctttttttctgttcaca

SEQ ID NO: 142334 - DNA, 2351 bp, Zea Mays
cttccgctttccccttcctccatccttcctcctccccggcacgccccactccccgccaccattaccaaccaaccaaccaacccgcgcacccccgaaggagaagagctggggtcggaggccccaggtcggagctgaacgcgcccccatctcccgtcggcgagaagagctttgtctgtttcagcttcatgagttctgggaaagcactggcatccaacatctcttattcaacagtgaacagcagcatcatctttctctgccttttcgcgggatacttgggaattcctggtggaagcttcgctggaggaagctaatttagtcttcactgtagtagaagtttggcctaagagtttgtaggctttcaagcttcagaaatggtttcttctcagccatcctctctgactgcaattctcgcacagggccccaaccactgcccagtcaatatactcctcccaacggggcccccagatgtcgtctcctcagataatgttgagtacgatttctctgatgtttttggttctaccccggtccaaacaccaacaaacctttgtggttttggtccggagagtcctgcacctactgttgagtccaatgaagaattttacagtgatcctgttgtcatcatcaaccgatcccattctcttgtcggtccaacatcacttgtcagccgctccttgcgacttagcaagcttagtctaggaaaaaacgagggatcatcggaacttgtcaagtgcctctcagaagaaaaggaaggggaccaagggcagctcagtgatgaagatctgggtaatgcgatgacagaggatgagggcattgggcttgatgacttagaaatcttgaagcttgttggccaaggggcattcggtaaagtatttcaggtgagaaagaaaaacacctcagagatatatgcaatgaaagttatgaggaaggacaggatactagaaaaaaaccattctgaatatatgaaggccgagagagagatattgacaaaagtcgaccaccctttcatagtgcagctgaggtactcatttcagacgaaatatcgactttaccttgtcctggacttcataaacggggggcatcttttctttcagctctacaagcaaggattatttagggaggagcttgcaagaatctatacagctgaaattgtatctgctgtagcgcatcttcatgctaatggaattatgcatagggatctcaagcccgaaaacatccttctggatgctgatggccatgccatgctcacagactttggccttgcgaaggaattctgtgaaaataccagatcaaactcgatgtgtggcactctcgagtacatggccccggaaattgttcttggccgggggcatgataaggctgctgactggtggagcgtgggaatcctgctgtttgaaatgcttacaggcaagcccccatttgttgggaatagggagaaagttcagcagaagattataaaagacaaactgaagcttccttcatttctgtctagtgaagctcattccctcctgagaggcctgctacacaaggaacccaacaagcggctgggcagctgccccggaggcagcaacgagataaaaaaccacaagtggttcaagccaatcaactggaggaagctggaggcccggcagatccagccgagctttcggccgaacgtcgccgggcttacctgtatcgccaacttcgacgagtgctggacgaagacgcccgtgctggactctccggtaagcacccccgctggtggcgggcacagcaacttcgcggggttcacctacgtcaggcccgcgccgatccttgaggaggtgaacgcatccggctctaggctcaaggactaaggatgtttagcccattgaagatgtgcttaaaattttgatcgagtgacatgtatggaaacttagggggtgtttgggaacaaagtttttctgcagttttggaagaatactgcagtattctcaaatactgcagtattatatacataatggtgtttggcaagctgggtaaaatctctgttttcaaaactgaagtattgcaaatactatagttgttttaaggcattctaaacttagctctggaccttagttttcaaaactgcggtattataaactacggtattgttataactaaagtatagtatagtatttcaaaaactgtagttttcaaaaactttgttcccaaacagggccttatgtgcacaagagacgctgattaaacatgtaacgtaccattagccttggtacaggataggaacagtaagctctggttctatcttgtactcttaaaatatgttcataaggtggcatatggtcatggtaaatgttaaggcgatgttggcactgtttggctgggagtttctc

SEQ ID NO: 142335 - DNA, 867 bp, Zea Mays
gcaagcatcgtcatcagcaattcagcatagcgaaggtccgacgacacgacgacgacgatatagcaaatatcgatgacgacgacgacgtccgctcgactccggccgctcgccgtcggcgtcgctctctttgtcttcctaccgtggctgagctacgtgctcgaggctgccgaggagggccgggcggcggcgccgtggttctggccaccacagatcggcggcgacgacccctactactactgcctcagctggcgcctgatggtggaggcgggcaacgccaaggggtggcgcgcggtgccggcgcagtgcgtgggctacgtgcgcgtgtacatggcctggggccagtaccaccgcgacgtgggcgccgtcgcggagctggcggccgccggtgcggacgggctgatcgacgcctgggtgctggacgtcgacgacacctgcctgtccaaccagccctactaccaggtgaagcagttcggggcgtatgatccggtggctttcagggcgtgggcgagctgggcgacctgcccggggatacctgcgatgcaatggctgttccagacgctgagaggcagagggttcagggtgttcctcgtgactgggagggacgaggagaccctgggctcaagcacggccgccaatctcgccgccgccggcttctccgggtacgaccgcctcatcatgagaagcgcggcgtaccgtgggcagagcgcggtggcgttcaagtcggcggtgcggaggaagctggcggaggaggaggggtaccggatccggggcaacgtgggcgaccagtggagcgacctgcagggcgaatgcgccggggaccgcgtcttcaaggtgcccaaccccatgtacctggtcccatgatcgatc

SEQ ID NO: 142336 - DNA, 1585 bp, Zea Mays
atggtaatgaatcacgatccaaaatatttctcttcataataagttaagacccttaattagttttattttaaaaataaatagaaatatagactaatcatattttgattcgatccttaaattttatattgtaaacatctagatcacattacccccatagtcatgactctcgagtctccatcgatttagtagatatatggagttatggacaccttttcccgagcgtccacctctcccatcccatgtggtgtggcctgtctctggtcctgacgcagcttcttgttccactcgtttcctcgccggctcaagcacgggtggaaatgcgacgaaattgccttttgcatatatacatccccctatgtcttctgcatgcgagcaatgatgtcgtgtgtgtctatccatgcacggaaatttcagaacaaaagtttcagttgggctgggctggtactgcggcaaacataaagccagagagagccggggtgcatcaccgcgtcccccggacgcgctcctccaatcatcgccacagggaaaaagaaggtggcatggcatggctataaacagaaaccagcccgccgtgtcgtgcctactctctccttcccccaaaataaaagaagcgattttgaacggctccgctagctaaagcagggcaaggcggccggaaggcaggaaatccgtacgcacgccgaggtcgaggtcgaggtctcagcagggaggatggaaacggagcagcagggcgtggttgcgggggtgaagccgacgctggccaaggggacgccgtcggcgtcgttccggctccgcaacgggagcctaaacgcggtgcgcctccgccgcgtgttcgacctgttcgaccgcaacggggacggcgagatcacggtggacgagctggcgcaggcgctggacgcgctgggcctcgacgcggaccgcggcgggctggccgccaccgttggcacctacgtgcccgacggcgccgcgggcctccgctttgaggacttcgaccggctgcaccgcgcgctcggggacgccttcttcggagcgctggcgggccaggacgacgcggccgcggacggcgccggcgccggggaggacgacgacgagcaggagatgcgggaggcgttcagggtcttcgacgtcgacggcgacggcttcatctctgccgccgagctgcaggaggtgctcaagaagctcggcctccccgaggccagcagcatggccaacgtccgggagatgatctgcaacgtcgaccgcgacagcgacggccgcgtcgacttcgccgagttcaagtgcatgatgcaggggatcaccgtctggggcgcctgatcgatctcatcgtcgtgggatcggacgagtgtgtgtgtgtcaagcaaattgaacccacaaagctccgcaggacccgtatttccttcctcgagacagcgatgcgaccttcattcttgtcttgtcttgtggtggcaccggtgtgtctctacttgtgtgtgctcttcttttaaattcattaattaatcttgtcgtctttcgctggtcaagcagaggcgatgagaatggttcatgcatgcccggtgcatgttggtggatttgcaattttgcatta

SEQ ID NO: 142337 - DNA, 4351 bp, Zea Mays
gaggcgcccgcacgcaaaatccaaacccaaaccctcggcgaggacgccaccgtggcgaccgcggtggatgcagcgggtctggtgcccgccgacctggagcggcgggtgatggcggcggtgaaggcgtcggaggcgcgcggggacccgccgcttctgcaggtggtggagctatcccgcatcgtcgccgtggagggcgcggggaccctctccagcgccgaccttgccaggatcctcgtctccaacctatgcttcgcgcacaactcgccctcgctctggaagctcctgggccaggccgtcgtgtcccgcctcctctgcccgctccacgttctcgcactcctcacccctagggtgctgccgcagcggcgagcgcagcctgaggcgtaccgcctgtacctggaactcctcaagtgtcatgtcacgtcgtccttactgtcgatggaggctgggcctaatcgtgacaagatagggaagtccattgctgaagctttgcaactatcaaaggtttatggattttctggaacagagtttggacatgttgtcattatgtttgtgttggctgttgtcagtaaactgattgatagtatatttgaggattgtggctttccatctgcgatggtagaggggcaagagagtgtcaatgccatcgatgggccacagcctatggacttagacgttaaaatgggatctactgagaaccaaaatgagcatcgcgaacagttacgtcggaagaacactctcatcgctttggacgtgttgcatatgatgactgctgatagaaagattcaatcatttctgcgcttgatattcctgaacatgcctgaaaggttcagttctctacgccagaggttgagttctattgaagcacagaaggtgtccttggagactctactgccttctggacacaaaattaatgaattgttaataaatttctggagagtttgcaaaacagactatcaaccgaataacaaacacattcttggtgttcttggtaatatgggatctggtggatcccttctgggccaacttactggagctgggaggcctgcctgctggataatatttgatatatatgtggagaatgcaattgatgggaggcatctaagtgttatatcagctatccgaattataaaagaaatgaccaagacaatgcaagtgcttaacgaagcaagctggcaggaaacatttaaagctctttggatttctgcccttcgtcttgtacaacgggctagagaacctcttgaaggaccaattcctcatctagatgcaaggttatgcatgttgttagctcttataccattatcagttgctgcgattcttcaagaagaaagcgatatgcttggagctgaaggaaacaaaattcttccacaaagacaagggcttatatcgtctctccaggatctgatccagtattcaggacttcttgtgccaccttcatcagtggtgaatgcagctaatgctgcagcctcaaaagcggcaatatttaaggccaactatgaggctggggttggcaactctagcatgatggaccagactgactcttcaatgaaagctgctgggaacatgctccatcttattattgaagcctgtatctcgagaaagttgatcgatacatctgcttatttatggcctggttatgttgtaccatctgggactttaaaagatacagctttgccccaagaatccccttggttaaactttatgaaagggtctcgactttcaggaccccttattgatgctctggtcgcatctcctgcttcaagtgttgcggaattggacaaattatacagtatagcattaaatggttcagaagaagaaaaaacagctgctgcaaagattctttgtggtgcatcacttgttcgtggctggaacattcaggaacatgtggtcggtatggtggtcaagctattatcagcttctttaccctcagattctgcaacttcaactcctgggagcatgagcaactaccttgctcatatgtctacattaaacgaaatcttactcggtgtgtcttatggtgatgccatccacattctttcattgtatggaatggttccagatgttgctgtggcgttaatgccaatatgtgaggcttttgggtcaataccaccgccacctaatcacaagtctaccattcttggtgaaatatctgtttatacagtcttctcttgtgcattcctttgtcttcttcgtttgtggaagttttatagacctcctcaagagtattgtcttgctggtcgtggaggctcagtaaagctggaactgactctggactatctgttgttgatgcacaataatcacattgagttctcaaattcatctgcctctaatagggattcttgcaatgatatgggctcagtaaatgaggttcctgctcagctgatttatattgattcttttcccaagctaagggcttggtatttccagaatcaagcttgcattgcttctccactttctggtctttgcaacaaaaaccctgttcatcaagttgcgaacaaaattttgaatatgatttgccgaaaaatgaataaaggtgtggtatcgtcaagtactctttcatccacttctagtagtagtgtcagtggttcctctgtaagtgcatcagatgatccttgccaaaggcctgctgtttctggttgggaatttttagaagctgttccttttgttcttgaagctgttctgacagcatgtgctcatgggcagctttccagccgagacttgactacaagcttaagggatcttgtggactttttgcctgcttctcttgctgcaattgtgagctacttctcagcagaaattacacgaggaatctggaaacctgtcccaatgaatggaattgaatggcctagtcccggtgcttctcttcattccattgaagctgaagtaaaggaaattcttgcctctgctggtgttcagattaacagctgctatccacgtggtgtgccaccaatgcttcctttacctatggctgcacttgtcagcttgacgattacatttaagctagataggagtttggagtacattcaaggggtcattggacaggcgctagagaactgtgcaggggggagttcctggccaagcatgcccattattggggcattgtggacacagaaagtgcgaagatggcatgacttcatcgtcctctcttgtatgcgttctccattcggcagagacaaagatgcagttgcgcagctcatccaaagttgcttctcgtcctttctgcagtcttcatccagtggttctgatataattgcaaaccgtggagttggggctttactaggggactcaatcacgaatcaaggtcttaggctcccaatggcacctggtttcatctacttgagaacatgtcgaactttccatgacacttactttgttagtgaagtgatccttaagcaagtgattgagtgggctcacaaacttgcaaacggatggtgtttcaatggtcctccgcagttgaaatcagggcggacaccactatcttgtgcagcatccatggtgcagcaggtcgcgttgcttggtggaggtctcctatgcatagcaggtggaccacttgtggtccaggtgttgtatgaggaaacactgccaacactgctgctatcagccagagatcagagtttgaaaggccctgggccagtttctagcacactccaaggttacgccatggccaacatgctcttctactgtggtagcctgctttggggagcggataggacttctcctgtcatgaaattgtccttcctctcgaggcggccacgggtggtgagaacccacatggatttcatagctggtgtgttggacggacacattcttctgggctgtgacccgggtacgtggaaagcgtatgtgtcgcaatttatgttcctggtggtgaaatttgttccgtcatggttgcgggacataaagctggacacgctaaagaagatagcagctggacttcggagctggcacgaacacgaccttgctctgtctcttcttgaacgaggaggaccacaagcaatctctgttgtagtcgagacctttctgtaatccttccgtttggacattttgcccccacctgacatagcagccgccgttaagggtttgtagttggtgatctgaggtctagctgaagtaatccggatgacccttttgatccagaattacacttgtgctacccgggtaactgatgtttatctcatgtatggcgagctcatcggggttttcgtgaatccaatacggaagaacatgcaacctactagggtgtacttcagccctaacatgtataacatgtgggaagttcatgcaacctactagagtgaactttctgtatattttgttgcaatgcatcgtgtttcctatctgcggtaaaaggaga

SEQ ID NO: 142338 - DNA, 471 bp, Zea Mays
ggcgggaacatcgataatatgccgccgttttccttccccgaaccctccaccttcgccggcccgtcagccacgaccgccaccattcaatccttccacttccatccctactccgtctcctctaccgtccacccattccggcggagctccccgccagaatggaggcggcgctgaagggctatttcgggtactcaacgttccggccgtaccagagggagatcatacagaaggtcctggatgggcgggattgcctcgtcgtcatggccaccggaagcggcaagtccatctgctatcagattcccccactggttacgaagaaaacagctgtcgttgtaagccctcttctgtccctgatgcaagaccaggtaggattgaaatgttcaatatattcttagtgctttactcacatttttaaatttcttttgccaaaatacttggtgaggatttcattttcttaaaacaggttatgagttt

SEQ ID NO: 142339 - DNA, 3263 bp, Zea Mays
ggcgggaacatcgataatatgccgccgttttccttccccgaaccctccaccttcgccggcccgtcagccacgaccgccaccattcaatccttccacttccatccctactccgtctcctctaccgtccacccattccggcggagctccccgccagaatggaggcggcgctgaagggctatttcgggtactcaacgttccggccgtaccagagggagatcatacagaaggtcctggatgggcgggattgcctcgtcgtcatggccaccggaagcggcaagtccatctgctatcagattcccccactggttacgaagaaaacagctgtcgttgtaagccctcttctgtccctgatgcaagaccaggttatgagtttaaaacaaaaaggtgtgaaatctgagtaccttggcagcacccaaacgaatagctccgtcagtaatgaggcagaaaaaggcacgtttgatgtgctttacatgacaccggagaaagccatttcacttccttcaagattttggagtaacttgcaggcttctggaatctgcttgttagctgttgacgaagctcattgcatatcagaatggggccatgatttcaggacagagtacaagcagctgcattcattgcgcaaccttcttgtgggtgttccctttgttgctttaactgctacagccacagaaagggtacgccaagatatttctacttccttggttctttgcagtcctcacgtggtggttggttcatttgatcgtcataaccttttctatggtgtgaaaacatgcaaccgatctatgtcctttataagtgaacttgtgaaagatgtttcaaagaggagtgatgtgggtgagtcaacaataatatattgtacgaccatccgggacacagaacaggttcatgaggctttagttacttctggaatcaagactggaatctatcatggtcaaatgggcagcagagctagagaggaatcccatagatccttcattagggatgaagttcttgtaatggtggcaactatagcttttgggatgggtattgataagcctgatgttagatgtgtaatacactatggatgtccaaagagcctagagtcttactaccaggaaagtgggcgttgtggaagagatggactgccttcaatctgctggctatattaccaaagaagtgatattacaaaagctgatttctattgttctgaggcaaaaaatgaaacccagaggaaagcaatcatggattccttcatggcagcacaaaaatattgcttgcttgctacatgccgtaggaggttcttattgcaatattttggtgaagaatggaacattgactgtggtaattgtgataattgcacagcagtgaaaaatgagagggatttgtcaaaagaagtctttttgttgctgtcctgcatcaaatcttgtggaggacgctggggcctcaatttacctattgatgttctccgtggctcacgagccaagaagattgttgacaacaattatgataaactacaaatgcatgggcgtggtaaagattattcgtcaaactggtggaaagcacttggtggtcttcttatagcacatgattatttgaaggagactgttcgtgatacatttagatttgtcagtgtcagtccaaaaggggtcaagtttctctctactgctgataaaatagatggagcaccactggtatttcagctgactgcagagatgattgaactagaggagcacggtagttcacatcataaagaaggtggtttgaatcttgtgccaacattagaatctgaaaaattttctgaggatgaatcaaaactctatcaaaggctcctgaatgttaggatgaagattgctcaagatattggcactgctccgtatgctgtatgtggcgatcagacaataagaaactttgcaaagatgagaccttctactggagctagacttgctaatatcgatggtgtcaaccagcattttatttcacgtttcagtaacattttcatccaaaatattgcggaattgtcgaaggagttaaacctcccgttggataattcaccatttccaccaccaccaccaacaaatccagctgcagaaaatattgctggtataccaaaacctgtacaaaacaatcttcctgggatcttgggtgatgcaaagctgactgcatgggaattgtggcataagcaggagtactcattcctgaaaattgcttatttccgcagagcagtgccaataaaagagcaaacagttattgcgtacattcttgatgctgctcgagaaggatgtgagatggactggagtaggttttgcagggaagtagggctgacacctgatatagccaccgcaattcgtcttgcaatctcaaaggttggatcacgtgagaaaatgaagccaatcaaagaggagctcccagagaatgtaacttatgacatgatcaagacattcctgactattgaggggtgtggattgtcagagcaagtctttggtaacggtaccgctgacggtgtctctagtagaatagcagagtcaccaatatcttcctgccatgcaagtgaagcaggcggaaatggtgtcccagcagcggcagaggccagtgatgcaaacccttcagcaaagagaggtcaaactgtttgtgctgaggagccagcaacaaaactgcaaaggacatacgagcatggagctgagttaactggcacggcgactgctactgtagattctgtgctagatctggttgcgagctgcaatggggtatcgctggaggatgttgccaagcacttcaagggatccaagagagaatcggtcctggagatattggagggccttgaatctgaattcacaatttacaagaaaaacgggaactacatggtcctgtgacaaacttgcccgcgtagtctgggaaggggatatgcctcagctgtgtgtgtatatatatatatctatacgatggtgggtgacttactgactttggactatggtagcaaggttgttggctggtgtgcatgtgctcattttggggattgggcagaactagcagatgtacgaacgtgtgtgtttggagctgggatcctttctgtcatctcgcatatgagtatcttggactaattgaccccgcgtattttcgttgggttttgatgcgttcaccctactcgttcaacagcttaagatcaggtttgactcctattgcaattttcctacgtgtccatttggagcaaattatcaaaggttttagaaccacacagaattcctatagaatgccttaacaattcgtaagaatttcggaggaaa

SEQ ID NO: 142340 - DNA, 3060 bp, Zea Mays
atgaaggcgcagccgctgctactgccggcgctcaagaggcggagaggccctcgcgtggcggtgctggcgctcgtcctctgctccctgctcgtgcccttggccttcctcttcgaccgcgccccctccggatacgtgacgacggaggagcggcaccgacaggaggtcgttctgcctttgttggatcacgtggcggagaagagacgtccgagtggtagtggcgctgacacgcgacaggatgcgctggagaagaaggtccccggtagtagtgcaggagtcattcatcaacaaacaccggataagaacatctccaaagtcattcgtcaacaaacaccggagaagaccatctccaaaggcagtgcaggtgtcgttcatcagtataagcaaattggtagccactccacaagtgatggtgctaaaccaaaagtttccccagcaccaaaagttgaaccatcagatgctgtttcagattcaactaaagtcgcaagagatactagccaagaaggtgaaaaggctgatgaagtggaaaagtcaaagtcttgtcaacttgaatttgggagttattgtctctggtccattgagcacaaagaagtaatgaaagattatacagtgaaaaggctaaaagatcaactcttcgtagcacgctcatactatccaagcattgcaaaacttcaaggacaggaagctctgactcaggaaatgaagcaaaacatacaagaccatgagaagattcttagtgtatcaacagttgatgctgatctaccatcctctatcaacagaaggatgaagcagatggagcaaacaatagtgagagccaaatcttgcacagtagattgtagaagtgttgacaggaagcttcgccagattctttatatgactgaggatgaagctcattttcatatgcagcagagtgcattcctctacaatctcggtgcccagacattgccgaaaagtcatcattgcctttctatgaggttgacactagaatatttcaaatcatcttcattggattctgatgattctcctggcaggttcagtagtccagaatacaggcacttcgttatactatcaaggaacgttcttgcggcttctgtagcaatcaactcaactgtgagcagttgtaaggagccaggctactttgcttttcatatcctaactgacgctcagaacttctatgccatgaaacactgccactcacatttcgttattccagaaatattcaagtatctaaacaaggtggtcgtgttggatgacgatgtagttgttcaacgtgatctgtctttcttgtggaatattgatatgggagacaaggtaaatggcgctgtcgaactttgtggtctgaaactgggtgagatgaaaaatgtcttgggtaaaacagcatatgatccaaagtcgtgtgcgtggatgtcgggggtgaatttgattaatctggataaatggagggagcataatgtcacagagaactatctgcggctcatgaaaaagttcgaagtcaaggatgagctgtccctgcgagcagcagcatttcctctaagcttgctatccttccaacatctaatataccccctagatgaaaaattgacgctggctggacttggatatgattacggaatcgatgaagaggttgcgcggagatctgcatcattgcactacaatggcaacatgaaaccttggcttgaattaggtataccggagtacaagaagtactggaagaggtttcttgtccgaggagatcgatttatggacgagtgcaacgattccaccttgatccttgaagtggacctccagtgcgagaaatgttacaagaagatccagaaagttctctgcaagctccagtccaaggagaagatcaacaagatcgactacgagaacaccaagaacaaggtcaccgtcgtcggcgccttcgaccccaagaagctttccaagacgctgagatgcaaggcctgtgatgtcatcagggacatcaccatcgtcaagcctcccgaggtgaagaaaccggccgcggaggagaagaagaagccggaggaagaggagaagaagaagaagccggaggaagaggagaagaagaagcccgcagaggagaagaacaagggcggcgaggagaaggccgccaagccagcggcggcggcgccaccgtcgacgacggtgaacctgcagttcaccaacatatgcgggatctgctacccgtggccgtgcagcgacccggcgcaccggggcggtttccaccacccgcagcagctgccgcagccgtggctgccgtgcggagggatggctccagctccagctcccgcgcctgcaccgccggttcacacccacccgcaaccgccctgcggcggtgcccctcagaaatgggcgccgtgcggcggccctccgctgtgcggaggctgcgcgtggtgcctcggcggcggcatcggctgctggtcgccgccgccgcagcagccgatgtgctgccccgggccgtcgctgtgcagagggtgcaacgggtgcaagatcgtgcgcgagaccaagttcagctacgaggagtacccttccagtgcatgtgccatcatgtgatctttgctcctacttgtgttcttcgattgctcagtcctgaattctggtcaaacgagtagcggtctcaaagaaacattgtttttcctgcaaagaaaaaaaaagctccttttctgctgtggcaattttgattcttttcaaatctccgtgactccagatatgtttaattatgtattattgtccaccaacaatacatgtatctgttcacgactcgagtatatgaaacagtagccagtacaactaacaaagtagcggtatacaacaattttgttttaaaaaaaaaacaggaccacgcagtcacactctaaaattagggcattggcagaatcacccccaaaccactaaaatgacttaaattacaagaacgagggagtttttttttctttattccgttagttttcgcacaaataaggacatcgtttttatataataaaaaatatggacgacttgcatgtgtcgtttcatgaataggtttggtatgtgggccgagaattgatctgctctttgagggag

SEQ ID NO: 142341 - DNA, 405 bp, Zea Mays
atgaggtcggcggccaaggcctccgccggcgcgccattgctgacgacgctgttggtcctggagaagtggggcggcggcgcccacgacgagggcgacgacaccgagagcggcgacggcgcggtgccggcgccgcagcgcccggagttctggcgcgagaggaggaacggcgagtgcgttgcggcggcggtgacggatgtgggcgtccccgggcctggcgacgggagcaggcccaggtccttgcgcgccttggccatgacggtgtgcagcagcgcctcggggccgaaggcgaggcgtatcatctccttctcgccgtggtcctggatgagcaggaagcccatgatcttggcggcgtggtccgggtccagcgcctggatccgcgagaacaccaccttggtggcttcgtag

SEQ ID NO: 142342 - DNA, 149 bp, Zea Mays
cgccgatataagagaggtcgataaaactaagcttttcaaaattacagtttatgatataacagtttatctggtgccaaaacataactataatatactaccccttcccgaatatttatcgcacgttagtttattttgaactaaaatacgac

SEQ ID NO: 142343 - DNA, 98 bp, Zea Mays
ctcatggaaaaatgaacaaatttccttagggggtgtttggttgcccctgctaaagtttagtccgggtcacatcaaacgtttgacttttaaataagagt

SEQ ID NO: 142344 - DNA, 1733 bp, Zea Mays
cgccgccgtagaaagcaacccgaagtccccaacgccaccggcaccggcacggcgaactcgggcacgcaccgcagccagccggccggttcggcaggcaggcaggcagagaggattgcattgcactgcttccatctcccctgcccgccccgccgcggcagatcccgaggcggctcgcacttccaggtcaactcaaagtacgcccgcgcagcaggaggcggccaaccagtcgccgtcgcccccggcccccaccccgcattggcagcgagatcgagctcttcgtccagataaaaccggggcttagccactatgccaacgacccccgggaggctgccgagtcgctcgtctctctccttgacgatgccaagcgagtggtgcccgccgaattgcgcgaccaaacgcctgtcagggtcggggccaccgcagggctgagaaatttgggtgcacaaaaatccgaggcaatactgcaagcggttagggaccttcttcgcgaaaagagttcctttaaaaaccaaccggattgggttacagttcttgatggaacacaggaaggtgcatacgagtgggttactatcaattatctgttggggaacttgggaaagacttatgcagacacagttggagtagtcgatcttggtggtggatctgtccaaatggcatatgctattgcggagaaggatgcagaaaaggctcctaagccatccgatggggaagatgcatatgtgaagaaactgtttctcaaaggaaccacatattatctttatgttcatagttatttgcattatgggttgctggcagctagagcagaggtcttaaaagctggcaatggcaatggttacagcaactgtatgttagagggatttcaagggcaatacaaatatggcgacaattcatttgaagcatctgcttcaccttctggtgctagttattcaaaatgcaaggatgatgcagtgaaagctcttaaggttgatgaagcatgcacccacatgaagtgttcttttggtggcatttggaatggtggtggtggtgctggacagaataatctctttgtagcatcctttttcttcgatagggctgctgaggctggatttgtgaacgccaatgcacctgttgctaaggttaaaccctcagacttcagacaagctgctgagcgcgcttgctctttgagtgtgaagaacgccgaggctacctttcctggtgtccaaaaggataacattccatatatctgcatggaccttgtttatcagtacacattacttgtgcacggattcggcgttgatccagaccatgagatgaccttggtaaagaaggtcccctacagtggtgcatatgtcgaagccgcatggcctcttggcagtgccatcgaggtggcatcttcatcatagcaaggagacacagtttagcaaggtaacatcggacggcattgttgtcatgaagttttagcgttgggagtcccccccccccctgaccgcttactgaattcacaccattttgtcactcaatccatccatcctccccatacggtaacgggtagctttacacaccaagggaagcctcggctgtacttggttctagcggccattgtaagccctattactattattgttattaatatctgtatactactaatgcaagtaagatgagagcctcaggcattctttttgacctctgtatactgggatgtgcatgatataaagtgccatcattcgctcactcaaatgcgtacatgtttggtc

SEQ ID NO: 142345 - DNA, 2208 bp, Zea Mays
cgccgccgtagaaagcaacccgaagtccccaacgccaccggcaccggcacggcgaactcgggcacgcaccgcagccagccggccggttcggcaggcaggcaggcagagaggattgcattgcactgcttccatctcccctgcccgccccgccgcggcagatcccgaggcggctcgcacttccaggtcaactcaaagtacgcccgcgcccgcctagacgttgtcttccctccctgcactccccgccacgacgccgcagcagatccaccatcgacgcgcgcgccgcgcgccccgacgcggaacgctggatcccgcgcagcaggaggcggccaaccagtcgccgtcgcccccggcccccaccccgcctgccgcagcaagcggcgtccgctaccgcacgccctcgtccccggacctcctcctccccgccgacgccgccaagatgcgccgctactccgcgctgcccaacggcggccgccaggagacgctggccgaccgcgcgcaccgctaccggggcgtcgtgctcgtcatcctcgccccgctcgcgctcgtctctctcgtcctcctcctcatgccacgctcacccgctggcaccatgggcggcgcccggaggtccgggccggccggggcagacaggtacgccgtcatcttcgacgccggtagctccggcagccgcgtccacgtcttccgcttcgacgccaacctggatctcgtccgcattggcagcgagatcgagctcttcgtccagataaaaccggggcttagccactatgccaacgacccccgggaggctgccgagtcgctcgtctctctccttgacgatgccaagcgagtggtgcccgccgaattgcgcgaccaaacgcctgtcagggtcggggccaccgcagggctgagaaatttgggtgcacaaaaatccgaggcaatactgcaagcggttagggaccttcttcgcgaaaagagttcctttaaaaaccaaccggattgggttacagttcttgatggaacacaggaaggtgcatacgagtgggttactatcaattatctgttggggaacttgggaaagacttatgcagacacagttggagtagtcgatcttggtggtggatctgtccaaatggcatatgctattgcggagaaggatgcagaaaaggctcctaagccatccgatggggaagatgcatatgtgaagaaactgtttctcaaaggaaccacatattatctttatgttcatagttatttgcattatgggttgctggcagctagagcagaggtcttaaaagctggcaatggcaatggttacagcaactgtatgttagagggatttcaagggcaatacaaatatggcgacaattcatttgaagcatctgcttcaccttctggtgctagttattcaaaatgcaaggatgatgcagtgaaagctcttaaggttgatgaagcatgcacccacatgaagtgttcttttggtggcatttggaatggtggtggtggtgctggacagaataatctctttgtagcatcctttttcttcgatagggctgctgaggctggatttgtgaacgccaatgcacctgttgctaaggttaaaccctcagacttcagacaagctgctgagcgcgcttgctctttgagtgtgaagaacgccgaggctacctttcctggtgtccaaaaggataacattccatatatctgcatggaccttgtttatcagtacacattacttgtgcacggattcggcgttgatccagaccatgagatgaccttggtaaagaaggtcccctacagtggtgcatatgtcgaagccgcatggcctcttggcagtgccatcgaggtggcatcttcatcatagcaaggagacacagtttagcaaggtaacatcggacggcattgttgtcatgaagttttagcgttgggagtcccccccccccctgaccgcttactgaattcacaccattttgtcactcaatccatccatcctccccatacggtaacgggtagctttacacaccaagggaagcctcggctgtacttggttctagcggccattgtaagccctattactattattgttattaatatctgtatactactaatgcaagtaagatgagagcctcaggcattctttttgacctctgtatactgggatgtgcatgatataaagtgccatcattcgctcactcaaatgcgtacatgtttggtcattgtgtttactggcag

SEQ ID NO: 142346 - DNA, 1259 bp, Zea Mays
cgggcacgcaccgcagccagccggccggttcggcaggcaggcaggcagagaggattgcattgcactgcttccatctcccctgcccgccccgccgcggcagatcccgaggcggctcgcacttccaggtcaactcaaagtacgcccgcgcccgcctagacgttgtcttccctccctgcactccccgccacgacgccgcagcagatccaccatcgacgcgcgcgccgcgcgccccgacgcggaacgctggatcccgcgcagcaggaggcggccaaccagtcgccgtcgcccccggcccccaccccgcctgccgcagcaagcggcgtccgctaccgcacgccctcgtccccggacctcctcctccccgccgacgccgccaagatgcgccgctactccgcgctgcccaacggcggccgccaggagacgctggccgaccgcgcgcaccgctaccggggcgtcgtgctcgtcatcctcgccccgctcgcgctcgtctctctcgtcctcctcctcatgccacgctcacccgctggcaccatgggcggcgcccggaggtccgggccggccggggcagacaggtacgccgtcatcttcgacgccggtagctccggcagccgcgtccacgtcttccgcttcgacgccaacctggatctcgtccgcattggcagcgagatcgagctcttcgtccagataaaaccggggcttagccactatgccaacgacccccgggaggctgccgagtcgctcgtctctctccttgacgatgccaagcgagtggtgcccgccgaattgcgcgaccaaacgcctgtcagggtcggggccaccgcagggctgagaaatttgggtgcacaaaaatccgaggcaatactgcaagcggtaaatggttcttctctattataacctttcaatgacgcggtcactgagttcatcgaatgtagcatggtttcactaagtgatttcttttctttttgtttgatcatttaacggtgatcatagcttccgattaactcaatttggctgctggcatatccacaaatggtgcaggttagggaccttcttcgcgaaaagagttcctttaaaaaccaaccggattgggttacagttcttgatggaacacaggaaggtgcatacgagtgggtatgatgctgttattatccatttgtaaagagtgagcattctgtaaatctgcatgatatggtatcatataaacaataacgaatgtggattcatcgaatctattaagttttaatccatccaaatctatt

SEQ ID NO: 142347 - DNA, 1567 bp, Zea Mays
agcaagacaatataatatatacttcatattgaataataaataagagtactagtgtagtagtacatggacccatcaagctccagctaccttcgcactgcgcctgaaatgaatatagagtacctgtactctacaacggagggaaaaaaatgggatacataccatggttacgcctaacgttgatcaacactggctccagtacaaatagtgctacgtactgctacaattgttcttcaccgcacgacccatctttattaatggcctccaatccacgagctcgatccttgctttccatgtcgccgcaggttgctagctattccgcgtagacgatccaccatattgatcagttgatgacgcagtacatgcacggaagatgtgcccccaacaaagtcagctaccagaagtcgtctatctagaactgtgggagcatgtggtggttgaggccgccgccaagcacggacgacatcgtcgccggcaagccgctggccggctgcggcgcgtcgtcgaagcaggagccaccgttgagccgcttggccgccggagactggtgctggtgggcagtggcggcgcactcgtcagctgggctcatgttcatcgccaccatcgccttgcgcttcccgcctgctgcggcggccgggggcggcgagaacatcatgagatcggagccgtcgtcgccgacggccaggagctggttgagggacgggtgcacggcgaacgaggcgtggtcggcggccacgtcggccggggggtccaagatctgcgcgagcgcgtactcgtcccacagcagctcggagatggaggggatcttggggagcctcggcagcgccgccggctgctggtgctgctgcatgacgacggccggcgtcgtagtagtgtttgtagtaccagcagcagcagcaccgccgccgatggccggcgcggcggcggcgtacaagctggtgctgccgcagaagtagtcgtcgaagaagccgccgggagaaggtccgtcgcggtcgaggtgctcgtagtcggcgagcggcggcaccatcggcgacgcgtggccggacttcttgtagatccggcacagcacccagtcgtccagcctcatggagacgttcctgaacttggagggcgggcggtaggcggcgagggggctggtgcagccggcgacggcggcgaggcggtactcgtgcatgatccagttggtcttggagcccctgggcgggcggcccttgtagaagacgagcgccttcttgacgccgacgccctcgccggtggcggcgtcgtggatgggcttgtcggtgccggtggccttccagtagccggagccggcggcgcggttggggcggatgccgttggggtacttgcggtcccgcgggctgaagaagtagtactcgccgtcgccgtacagcgccttggccggcaggtcccatgggtcgaacttgtagatgtcgacgtcggcgatgatgggcacggggcacggcgccgacgcggcgcggttgcggaggtagtgcaggatgagctcctcgtccgtcgggtggaaccggaaccccggcggcagctgcgacgtcgccgcctgcgctgctgctga

SEQ ID NO: 142348 - DNA, 179 bp, Zea Mays
cttattcttcttttatttttctctcctcatcttcatatggcatatatagtaggattagtaggattaatttcttcttctttttttgtctccccctagctcctcttggttcaggagtaacacaacagcactgtacaccattttcgacggccgctgttattttcggcggccaggggttggcc

SEQ ID NO: 142349 - DNA, 877 bp, Zea Mays
agttatcagcttgttttaggttttggatgcttcctggtacatgccggtagagaacagggaatcatggaaagaatatcaggtggcacacatccccggtgcgctattcttcgacttagatggcatagttgatcggacaactgatgctaggcaaatagttggttcagctgtacttgtgaaagctcgagatagaccagaaattgaggatgatgaattctattcacttgacctttattgtcaaggatacaggcaagctcgtaggaacagttggtcagggtttcaatttcggaggtggagatcttctacaggtgataatgggctcttctgagggtactactgttgatccagattcagaaaatcaagattcaatctcatcacgtgagcatgtgtggactccatttgctgaagatattgtacctgatgttgatatgggaagcagagaaatgcggattacacctccgaaggggttacttgagctcaattctcgttctgacaagagatcgaagaaagaaaggcatgcgatggttaggtctgcatcatccttttctagcatccatgctcgcatctacagccatgatttgcatcttaaaagaaataaagaatgtgtcaggtccatagtactgaaatgttgatagcagcagatgtcctggctgaagattgtagatattatcttgcatgtattataacaaatgactcctcccctcacgatgactttgcggacagatgtctcaattctagtggtggagctacgaacaacaatctgatgtcctgatcgagagcgatggagctaatatttgaacttgtgtgtttgaacttgtgaactaaaaatgtgaactatggatgtgaacttgtgtgaatttgtgaacttatttatttggac

SEQ ID NO: 142350 - DNA, 1457 bp, Zea Mays
gcccatgcgcgcacaaccatccatccactgacgatgcgatgcctacccaccacctcgcgcagcgtgatgctaacgccaccacgtacatgcaccaccagtggggcagctggggacgccgggagcaaccggcagcgccctataaatctgccggcccggccgttgcattgtctgcgtcagggcctctcgatcgctcatcagtcgccagaggagtagttgatcgaggtgagtgaggttgaaaagcaggcggcgaacaaaggcaccatcgtcatggacggcggatactacggcggccgcgatcagcgctacagcggcgggtactacggcggcggtggcatcgcgacgccggggtacgctccggcggtcccgtacgggatgtcgcaggtgaacatcgagggcaacgggtgcgggcgggcgctgccgccgcagccgaccgtgaaggtgtactgccgcgccaaccccaactacgccatgagcgtccgcgacgggaaggtggtgctggcgccggcgaaccccaaggacgagtaccagcactggatcaaggacatgcggtggagcacgagcatcaaggacgaggaaggttacccggcgttcgcgctggtgaacaaggcgaccggggaggccatcaagcactcgctggggcagtcccacccggtgcgcctggtgccctacaacccggactttttggacgagtcggtgctgtggacggagagccgcgacgtcggcaacggcttccgctgcgtccgcatggtcaacaacatctacctcaacttcgacgccctccacggcgacaagtggcacggcggcgtccgtgacggcaccgacgtcgtgctctggaagtggtgcgagggcgacaaccagcgctggaagatccagccctactactgaaccaacggatgatatgaccatcgcgcccatcgatcgtgcacatgcatgcatacgtactagcagaataacaggggtcttatctcccgaggcgtcttttgcatgcatgccagcagttgcatagataaagcaggagcgagacaaagggtgttcatgtatattgcagctgtatcactgtatgtatgtgccattgtgccttgtaataatacatataataataaagttgctcggagtgtattaattataacatacatatatccccattctaaagtaaggagagattggtaatataattgattgattattagacccccatttggcacagcttaactttactattgaagttttttttagaaaataactttatgagtagctttctaaaggcaattttttagaaaaatatttggcaaaacagtttcatacatatagctgagagagaatcgagagagatgtgaaaaaggtacttttttagcctcgtctctctcaatttctttgtgagcataaaaagctccacgcctatcaagttgtgaaaaagttgttttaagaaaaaaaaaagttgaaagtcgtttgattca

SEQ ID NO: 142351 - DNA, 1295 bp, Zea Mays
caagaacgactagaaaccgaatcgctttttccctcggctagtttcgcatggcatcgtccttcctgcccatgcgcgcacaaccatccatccactgacgatgcgatgcctacccaccacctcgcgcagcgtgatgctaacgccaccacatgcaccaccagtggggcagctggggacgccgggagcaaccggcagcgccctataaatctgccggcccggccgttgcattgtctgcgtcagggcctcttgatcatcagtcgccagaggagctgttgatcgaggtgagtgaggttgaaaagcaggcggcgaacaaaggcaccatcgtcatggacggcggatactacggcggccgcgatcagcgctacagcggcgggtactacggcggcggtggcatcgcgacgccggggtacgctccggcggtcccgtacgggatgtcgcaggtgaacatcgagggcaacgggtgcgggcgggcgctgccgccgcagccgaccgtgaaggtgtactgccgcgccaaccccaactacgccatgagcgtccgcgacgggaaggtggtgctggcgccggcgaaccccaaggacgagtaccagcactggatcaaggacatgcggtggagcacgagcatcaaggacgaggaaggttacccggcgttcgcgctggtgaacaaggcgaccggggaggccatcaagcactcgctggggcagtcccacccggtgcgcctggtgccctacaacccggacttcctggacgagtcggtgctgtggacggagagccgcgacgtcggcaacggcttccgctgcgtccgcatggtcaacaacatctacctcaacttcgatgccctccacggcgacaagtggcacggcggcgtccgtgacggcaccaacgtcgtgctctggaagtggtgcgagggcgacaaccagcgctggaagatccagccctactactgaaccaacggatgatatgaccatcgcgcccatcgatcgtgcacatgcatgcatacgtactagcagaataacaggggtcttatctcccgaggcgtcttttgcatgcatgccagcagttgcatagataaacaggagcgagacaaagggtgttcatgtatacgttattgcagctgtatgtatgtgccttgtaataatacatataataaagttgctcggggtgtattaattagaacatacatatatctattatactccctccattctaaagtaactcacgttttagtttgtaacatgggaatttaaaaagaaataaacgttgttggattgatgacaatatagctagttcttttgtaaact

SEQ ID NO: 142352 - DNA, 1629 bp, Zea Mays
ggctcctcccactttcgcttctcctaaacccaatccccttccaccattcacacgtaccgccggcggagaaggaaggaattggtcgccgccgcctgcctctctcctcctcctcctccgtcagtggctgtggccacgccgtgctaagctaagctaagctaagctaagcttgcgcaagtgacaagttctttggttggttggaggcagagccagatggcatcgtcgtcgcggctggatctcccgccggggttccgcttccaccccaccgacgaggaggtggtgtcgcactacctgacccacaaggcgctggacagccgcttctcctgcgtcgtcatcgccgacgccgacctcaacaagatcgagccgtgggatctcccaagcaaggctaagatgggcgagaaggagtggttcttcttctgccacaaggaccgcaagtacccgacggggatgcgcaccaaccgcgccaccgccagcgggtactggaaggccacggggaaggacaaggagatcttccgcggcagtagcagtagtccccgccgcgtgctcgtcggcatgaagaagacgctcgtcttctacacgggccgcgcgccgcgcggaggcaagacgccgtgggtcatgcacgagtaccgcctcgagggcagcctgccgcacaacctccaccgcggggccaaggacgaatgggctgtgtgtaaggtgatcaacaaagacttggcgggcaaggctgggcaacaacaaatggcgccgccgccgcacgccgtgtccgtgggcatggagcgcagcgactcgctggccttcctcgacgacctggtgctcgacaacgccgacgacctgcccccgctcgtcgactcgacaacgtacgccgccggctccctcttcgccgcggcggggacgaccacgacgacgaacgacgacagcggcgggtaccaacaagccaccaaggcggagccgcagccgcagctgcccgcgccgagcaacagcccgtaccagcaccagcagcaggccatacggaggcactgcaaggcggaggcgccggcgccggcgatggtgctgagcccgtcgcgcgagacgccgggcgcggacatgttccagctccagcatgtggacgagctgctccagctggacggcggcttcatggaggactactacaacatgaacatgtggaaggtctagttaggctgggatcgaccggccggccggacactagtactatacgtaattagttccatttagtccctatttaatttgggtccatcggtttgccgggcggatggattgattagttggttgattggatatattaacctgttattagacgcagaagagtggaaggaaaggccggccgcgccgattggcatggacgaggtctgtctgacgaagatgtgtcgagacctcgccggcggtgtggtttgtgatgattggttagttggctaatcttcagtagctagctacgtactgagtaattagaacagctagcagtagtgtgtaaccgcgcgcgtgtcgttgcctctggtcgacaggattgaagcacgcattgtgtacataataataggtaggagtcgtcgtcgtcgtcgttgagtgatgagaaaaatggatgaaacatactatatatgctgttgattaattggttggtta

SEQ ID NO: 142353 - DNA, 1480 bp, Zea Mays
gccctctctttctgtcttgtgccctaaaaaaagggcccgctgctctgcttttctccccctcgtctccgcatccgcagtcgcacacccgccattgcattcgcagcaccagcgccgcttctccttcctcgagctcacccccctctcttctcctattcgctcgcgtgctctctctctctctctctccgctgcctcagccgccctcgctgtcgctgacccgagagattcatttggccggtcatggctgacgcgttgtgcaacggcgtcgtggcgtccccgtgcggccgggacgtcgccggccgggccaggggcgccgccagggccgcgctcgcggagtccctgcaggtcgccgggcacgccagcaagacctccttctccgccgggaggatgtcggtcaaggacagcaagccgaggcccctgtcgcgtagcctcgaggccgccgcgccaggacagatgaacctgtcgttccccaaagccatgcggtggtggaagaaggggctgcaccccaacatgcgcgaggtcgagtccgcgcaggacctggccgactcgctgctcagcgccggcgacaagctcgtggtcgtcgacttcttctccccaggctgcggcggctgccgcgccctccaccccaagatcgcccagttcgccgagaagaacccgggcgtgcagttcttgcaggtgaactacgagacgcacaagtccatgtgctacagcctccgcgtccacgtcctccctttcttcaggttctaccggggagccgagggccgggtcagcagcttcagctgcaccaacgcaacggtaagaatcggccacatcctctccagcgatgggaggcattggatgaatgaatgaattgtaacgtgtttgctaacatcacgccgccccgtgcggccccgttcgttttcagatcaacaagttcaaggacgcgctcgccaagcacggggctgagaggtgtagcctcgggcctgcgcgggggctggacgagtcggagctcatggccttggctgagaacagggacctgcacttcacctacgacaagccgggcggcctcgtccccctcgccgaagctattgccaaggaggctgccgcaccgggaggcccgtggcttcctctgcctgcgtccctgctcggccagggatccgacaactcattgctgccctctggaagatagaccgtgctccgtgctcggttggtgtcattcattggaggtggctcctccgtcttgtacagatttgattcgttcgtagtggtctgatgatgctggagtgacagaaatattcagatgcgggatgcgcaggctttaagcttttagtttgtaaagtctgactattgcgcctgtattgttgcatctagacctttgctgaaacatgaaaaatccattgcttggcgaacctgtctggatcgttctcattcctctatgcaatgcagccgaggagggctcgttcctgcatggttgataatatgtattcatgcagcttcagctgcc

SEQ ID NO: 142354 - DNA, 1448 bp, Zea Mays
gccctctctttctgtcttgtgccctaaaaaaagggcccgctgctctgcttttctccccctcgtctccgcatccgcagtcgcacacccgccattgcattcgcagcaccagcgccgcttctccttcctcgagctcacccccctctcttctcctattcgctcgcgtgctctctctctctctctctccgctgcctcagccgccctcgctgtcgctgacccgagagattcatttggccggtcatggctgacgcgttgtgcaacggcgtcgtggcgtccccgtgcggccgggacgtcgccggccgggccaggggcgccgccagggccgcgctcgcggagtccctgcaggtcgccgggcacgccagcaagacctccttctccgccgggaggatgtcggtcaaggacagcaagccgaggcccctgtcgcgtagcctcgaggccgccgcgccaggacagatgaacctgtcgttccccaaagccatgcggtggtggaagaaggggctgcaccccaacatgcgcgaggtcgagtccgcgcaggacctggccgactcgctgctcagcgccggcgacaagctcgtggtcgtcgacttcttctccccaggctgcggcggctgccgcgccctccaccccaagatcgcccagttcgccgagaagaacccgggcgtgcagttcttgcaggtgaactacgagacgcacaagtccatgtgctacagcctccgcgtccacgtcctccctttcttcaggttctaccggggagccgagggccgggtcagcagcttcagctgcaccaacgcaacgatcaacaagttcaaggacgcgctcgccaagcacggggctgagaggtgtagcctcgggcctgcgcgggggctggacgagtcggagctcatggccttggctgagaacagggacctgcacttcacctacgacaagccgggcggcctcgtccccctcgccgaagctattgccaaggaggctgccgcaccgggaggcccgtggcttcctctgcctgcgtccctgctcggccagggatccgacaactcattgctgccctctggaagatagaccgtgctccgtgctcggttggtgtcattcattggaggtggctcctccgtcttgtacagatttgattcgttcgtagtggtctgatgatgctggagtgacagaaatattcagatgcgggatgcgcaggctttaagcttttagtttgtaaagtctgactattgcgcctgtattgttgcatctagacctttgctgaaacatgaaaaatccattgcttggcgaacctgtctggatcgttctcattcctctatgcaatgcagccgaggagggctcgttcctgcatggttgataatatgtattcatgcagcttcagctgccttttttttctttccagtttgtcttgctgctgcaagacccctgcctgcatcaacttatctgtttgttactttatccgc

SEQ ID NO: 142355 - DNA, 1697 bp, Zea Mays
ctgctctgcttttctccccctcgtctccgcatccgcagtcgcacacccgccattgcattcgcagcaccagcgccgcttctccttcctcgagctcacccccctctcttctcctattcgctcgcgtgctctctctctctctctctccgctgcctcagccgccctcgctgtcgctgacccgagagattcatttggccggtcatggctgacgcgttgtgcaacggcgtcgtggcgtccccgtgcggccgggacgtcgccggccgggccaggggcgccgccagggccgcgctcgcggagtccctgcaggtcgccgggcacgccagcaagacctccttctccgccgggaggatgtcggtcaaggacagcaagccgaggcccctgtcgcgtagcctcgaggccgccgcgccaggacaggtcggtttcggttcgccgctgcaactcttcgtctgtctgtcctgttgcttgctcctgggaatctttttagtgtttgctcatgcggttcctgtgttcttgtttcacttgcaagattcccccattttttttagattcagttcccgccgtgagaataatttggcgctcacaattttttcactctctctttctctcttgtttgctcaacctttgaatttatttcttctggctgctgcagatgaacctgtcgttccccaaagccatgcggtggtggaagaaggggctgcaccccaacatgcgcgaggtcgagtccgcgcaggacctggccgactcgctgctcagcgccggcgacaagctcgtggtcgtcgacttcttctccccaggctgcggcggctgccgcgccctccaccccaaggtaccttttttacgtcggattccgacagcacatgcacaacaccccccagcgacgattccggtcgtttctcttctctgatgctatgctaacgcggggaccggtggattccgccgcgcagatcgcccagttcgccgagaagaacccgggcgtgcagttcttgcaggtgaactacgagacgcacaagtccatgtgctacagcctccgcgtccacgtcctccctttcttcaggttctaccggggagccgagggccgggtcagcagcttcagctgcaccaacgcaacggtaagaatcggccacatcctctccagcgatgggaggcattggatgaatgaatgaattgtaacgtgtttgctaacatcacgccgccccgtgcggccccgttcgttttcagatcaacaagttcaaggacgcgctcgccaagcacggggctgagaggtgtagcctcgggcctgcgcgggggctggacgagtcggagctcatggccttggctgagaacagggacctgcacttcacctacgacaagccgggcggcctcgtccccctcgccgaagctattgccaaggaggctgccgcaccgggaggcccgtggcttcctctgcctgcgtccctgctcggccagggatccgacaactcattgctgccctctggaagatagaccgtgctccgtgctcggttggtgtcattcattggaggtggctcctccgtcttgtacagatttgattcgttcgtagtggtctgatgatgctggagtgacagaaatattcagatgcgggatgcgcaggctttaagcttttagtttgtaaagtctgactattgcgcctgtattgttgcatctagacctttgctgaaacatgaaaaatccattgcttggcg

SEQ ID NO: 142356 - DNA, 195 bp, Zea Mays
ccggtgcggtcgcggtggacgcccaagccggagcagatactcatcctcgagtccatcttcaacagcggcatggtgaacccgcccaaggacgagacggtccgcatccgcaagctgctggagcgcttcggcgccgtgggcgacgccaacgtcttctactggttccagaaccgccgctcccgctcccgccggcgccag

SEQ ID NO: 142357 - DNA, 424 bp, Zea Mays
atgccgacgttcccgcgcgccggccggtggtccacctccagcacatggccacggaaaaccgccggcgcggcgtccacggcgctggccgccgtcgtcttcgcggtcctggacgtcgccgacgtgatcctctgcttcgcgtacgccctcctcgacggcgtgctcgaggacagccccgtgcgctgctactgccacaggagctacgacgacggcatccgcgaggcggccgcgggggcatcagtggatggcggcggccacgaggaggtctccgacacgctgtacgcgtgcggccggaggagcaccgtcagggacgcgctgctggggctcgtgcgacgcgtcgtgccgaggactaggaggacacgggcgccgccagatgagacggtggcgccgtgcaagtggcgcagccccaggtggtctgactgcgcgt

SEQ ID NO: 142358 - DNA, 930 bp, Zea Mays
ttgttcgcggtggatctcctcggcttcggccggagccccaagcctgccaactgcatgtacagggtgagagaccacgtggaggcgatcgagagaaccctcatcctcgccggcgacggtgaatcgcagagtctgatgagctccttccacctggtcagccactccatgggctgcaccatcgccctcgccttggctgccaagcacccgacgcgagtcaaatccatcacgctggttgcaccgagagcgagccaggtggcgctcaacaggctggccgagaagaagctgtggccaccgctgctgttcggttccgcggtgatgtcgtggtacgagcacgtcgggaggaccgtctgcttcctcgtctgcaagaaccacctgctctgggagtggctcttcagcctcctcaacctcaacaggggcgtggatttcagggtgagggatctgacgaagcacactcaccactcggcgtggcacaccatgcacaacgtcatctgcggcggggcggcgctgcaggacgcgaacctggaggccgtcgcggcggccggcatcccggtgcaggtgctccacggcgccgacgaccaggtggttccggtcgagtgcggccgccatgtcaaggcgaagatcccgcgcgccaagctccgtgtcatggagaggcgcgaccactctacggtggttctcggcagggagagaggcttcgccgaggagctcaaggcgttctggtgcgcttcaaggtccccggttcacgtccaggatgcggagcaacaggaaacactagacatcagcagcccctcaaaagattcaaagatcatccaacatgacaacacctcagtgcccaccatcctcgctcggcgtctgcggattgatctttgcattagcagccttcaacaggagcttcgcgccatcatgcagcaagtcctggagttcccttttgcttaa

SEQ ID NO: 142359 - DNA, 119 bp, Zea Mays
cgattccccctgcgcgcacagtccattccctgtttccttttctcagtctctcctccccacaaaacccattcctattcccacgtacatctcacgcctagctaaaattaaattaaaaaata

SEQ ID NO: 142360 - DNA, 96 bp, Zea Mays
gagaaaccagatcacctgctcggggccttggggcgcttcttgggccgagccctaggtagcccggaactccgatctcggccaccaccaccctcgcct

SEQ ID NO: 142361 - DNA, 2551 bp, Zea Mays
gaatccctgccatttttgggcaatgttctgattttgccattgccatatctgactgatagatcccagaagttcagctgctagtctatcaggatggccgtggaaactgccagtgacgctcaggtggcacaagataacgagatttcccccagcaatgaggcaatccaaggtgatgagttggctcatggcgaagagctgttccaaggtgatgatcttgttcaaggaaatgagttggttgtttctgaggtaacaacacctcctactactggaatcagacgtaggaggaagaagaagtccttggtatgggagcacttcactattgaagccgtcgcgggcggggccacaagggcctgctgcaatctctgcaagcaaacctttgcttacagctctggctcaaagattgctgggactagtcatctcaagaggcacatcaccttgggctcttgtcccaagataaaggaccaagatcagaggctggcactgccttcaactggtgggactgacaactatggcgaggcaacttcggagcggccaaccaagagacgctacagatataccggttatgcaaatgctgtttttgatcaggaccgcagttgctcatacttggcaaggatgatcattcagcatgactacccacttcacattgtccaacagcaggcattttccgtctttatcgaaagtctgcagccacgtttcaagattgtggatgttgatacgatggaaggagaggtgtatgctgtttatcagaaagaaaaggagaacctgcttcgatcattcaacactatgcctggaaggatcagtctcactataggactgtggacaactagtcagactctcgggtacgtttcacttgcagggcagtttatcgactctgagtggaaagtacgccgaagaatgcttaacttcatgatggtgtcatctcctcactcagagaatgcacttagtgaggcaattagcctgagcctctctgactggagtatgaaggacaagctattcaccatcacattggataatgaatgctcctcacacgatatctacagtgcaaatttgagggatcatctctccaacaagaacagtctcatgcttaagggacagctctttgttgtgaggtgctatgcccatatccttaatgctgttgcacaagatgtcattgcttcggttcatggtgttgtatacaatatccgtgaaagcataaagttcataaaagcttcttctgcccgtgaagagaagtttgccgagattgctctgcagctggagattcccagtaccaggaccctctgtctggatgttacaacccagtggaacaccacttatctgatgttgctagctgccttggattataagcaggctttcactgcactagaaacatgtgatgatagctacaatgaagctccatcatcagaggactggaggaaagttgaggccgcctgtaattacctgaaactgctctacgactccgcacatagcatcatggcagcagcaaacccaactgcaaacatctttttccacgaagcatggaaacttcagctagagctagcaaatggcacaggacatgaagaccccactttcagaagcatcgccaaggatatgcatgagaggtttgacaagtactggaaagattgcagcctcgtgttggccgttgccgttgtcatggatccacgtttcaagatgaagcttgttgagttcagttacacaaaaatttatggggctgaagcagcaaagcatgttaaggtggttaatgatgctgtacatgagctgtacgaggagtatgtggctcatccactcccactgaccccagcctatgtggagcaaggtgaaggggggaataatggagcagcaaatgcgaatagcagtcaagggcctcctgcttccgctggcgatgggcttctagacttcgatatgtacctttctgagatccagagtagccagccctcgaaacctgagctggaacagtacctggatgagtccctcaccccacgtacccaggagtttgatatcctgaactggtggaagctaaacagagtgaagtttccaaccctctctagaatggcctgtgatatcttggccattccgatgtccatggtaagcagtggcagctccatattcactgctggaacaggaagccgcatgctcgatgactacagaagctctctccgacctgagacggtggaagcacttgtctgtgcaaaagactggctgcagtactctacgaaggctgaaggatcgtaggtttatcgtcgtcgctggtcactgctcctgccttgtggaagcaagaatctgtgtatccatctgttgtacctataagtgtagtttaactgtaggctgagattgtgatctgttctggtgtttgtctcgtaaaggtgtgtagactctgatgtactcgttgttgtcatgtaatagcttatgtatcatgttctagtatcgtctgatgttggagtttgcatgcttgggctatgtgcatgtactggccgtgggatgcatcagctgcttgctgtaatgctgtttgaactccggttttgtatttaatttgttttgtaccgtggattggtgtcca

SEQ ID NO: 142362 - DNA, 2223 bp, Zea Mays
gaattgaagtgctaaagtttagtttcaattatcaccattagctctcatgtttagattataaatggctaaaagtagctaaaaaatagctgctaaagtttatctcgcgagattggaacagggcctaactattagttttagtgtattcaaacaccccctgagagtcgtaatctggcaaggatgaaaataacgtgaacaaattctaccaactacgctgtgcttatcgcctctggcggcggcgagttcgctcacgtcccggcgacccctcgccggtggccacgggccgtgacactccggcatgccgcgcgccccacgccggcagtccgacgaggcgcgccgtggcgcctacaagccgcgcgtcgacttcagccgctcgcgccgccgccgcgaggacggcctcctcgccctccgccgcctcaaccgcgacacgggactcttcaagcgccgccgcgacgagcccgctcccgccgtccctgcctccgatctgactcctacacgcgccgaagcagccccattcgcaggaatcacccgtccggcattcactccctcctcaccgcccgacgtagcggctccccgggatgctgctgagtcagagcttgaaggcctgtcagagctggtcgacaaactatgttcagatgacaccaccagtcagctcgaagccacaatccagttcaggaaacttctttcagatgagaagaactcaactgtgataaaaatcatccgagcggatgtcctgcccagatttgccgagtttctttcaagacatgggcttccccagctccaaatggaggcagcctgggttcttaccaacatagctgcatctgattatacactgctggttgcagaatgcggtgctgttccaaggttggtggaactattaggatcactaaatgcaaacatcaggcatcaggctatctggtgtcttgggaatatagctgcagacttacctagctgcagaggcattctcttcgatcatggtgctcttacacctttactttctcaatttagagaaggcatgaagattccagttctgagaactgctatgtgggcactgtcaaatctttgttttggaaaattgccagccgaagtgcaagtgaaaccaatactagaaattatcagccagcttattcactctgctgacgagaagatactggcagatgcatgctggactgtttactacatatgtggcgataaaggtgatgctgtccaagatgtattagatgctggggtctgccctcaacttgtaaatcttttgatgcatgcatcagctaatgttcttctccctgtcattatggcactcgcaagaatttctgcgggagatgataagcaagttgaggtcttaatagagaatgacattctcaattgcttaggacagttggtagcacgaaattacccaaagaacatcaagaaacaagcgtgtctaattgtttctaatatcgctgctggtagcaaggatcagattcaggctgtaatcgatgcagacattataacctctctcattgtcttgctaagaacgtcagagccggatgttaaaaaggaggctgcttgggctatatcaactgctgcgtccggtggttcaagtgatcaaattcagtatttggtcagccggggatgtttagagcccctctgcagcgtcctcacccacaacgatcctgaccttgtatacacgtgtcttgaaggtcttgagaacatactccacgcaggtgaggcggggaagaagggcgaggaatcagggacgaacccatacgccgagtttattctagagtgcggaggtctggagaaactggaggatctgcaggacgtggacagcgacaggatctacgagctagccatgaagctgctacagagctactgggaggaggaagtaagcgagagtgatgatccgaacatcccaggttcgaatgactcgtcagatactgtggaagcaacgtccgaagatgctgctgctgctgtgcagccaccaccagtaccgccgccgccgtccgccgcagatgaagccgagtgatggtagatgttgtattgtagattgtatttcaggagaggaaagcctggttccttttcttagtggcactggcatattgtatgatacttactatgatcaggtcgatgtagagaggaacgtgtgaaggtgtggtagccgttatgtgcagaattttcgcatcacgtttctgtaggcgacattggagcattttgaatggaggatttgggccaagagaaaaagaggta

SEQ ID NO: 142363 - DNA, 2236 bp, Zea Mays
gaattgaagtgctaaagtttagtttcaattatcaccattagctctcatgtttagattataaatggctaaaagtagctaaaaaatagctgctaaagtttatctcgcgagattggaacagggcctaactattagttttagtgtattcaaacaccccctgagagtcgtaatctggcaaggatgaaaataacgtgaacaaattctaccaactacgctgtgcttatcgcctctggcggcggcgagttcgctcacgtcccggcgacccctcgccggtggccacgggccgtgacactccggcatgccgcgcgccccacgccggcagtccgacgaggcgcgccgtggcgcctacaagccgcgcgtcgacttcagccgctcgcgccgccgccgcgaggacggcctcctcgccctccgccgcctcaaccgcgacacgggactcttcaagcgccgccgcgacgagcccgctcccgccgtccctgcctccgatctgactcctacacgcgccgaagcagccccattcgcaggaatcacccgtccggcattcactccctcctcaccgcccgacgtagcggctccccgggatgctgctgagtcagagttagcttgaaggcctgtcagagctggtcgacaaactatgttcagatgacaccaccagtcagctcgaagccacaatccagttcaggaaacttctttcagatgagaagaactcaactgtgataaaaatcatccgagcggatgtcctgcccagatttgccgagtttctttcaagacatgggcttccccagctccaaatggaggcagcctgggttcttaccaacatagctgcatctgattatacactgctggttgcagaatgcggtgctgttccaaggttggtggaactattaggatcactaaatgcaaacatcaggcatcaggctatctggtgtcttgggaatatagctgcagacttacctagctgcagaggcattctcttcgatcatggtgctcttacacctttactttctcaatttagagaaggcatgaagattccagttctgagaactgctatgtgggcactgtcaaatctttgttttggaaaattgccagccgaagtgcaagtgaaaccaatactagaaattatcagccagcttattcactctgctgacgagaagatactggcagatgcatgctggactgtttactacatatgtggcgataaaggtgatgctgtccaagatgtattagatgctggggtctgccctcaacttgtaaatcttttgatgcatgcatcagctaatgttcttctccctgtcattatggcactcgcaagaatttctgcgggagatgataagcaagttgaggtcttaatagagaatgacattctcaattgcttaggacagttggtagcacgaaattacccaaagaacatcaagaaacaagcgtgtctaattgtttctaatatcgctgctggtagcaaggatcagattcaggctgtaatcgatgcagacattataacctctctcattgtcttgctaagaacgtcagagccggatgttaaaaaggaggctgcttgggctatatcaactgctgcgtccggtggttcaagtgatcaaattcagtatttggtcagccggggatgtttagagcccctctgcagcgtcctcacccacaacgatcctgaccttgtatacacgtgtcttgaaggtcttgagaacatactccacgcaggtgaggcggggaagaagggcgaggaatcagggacgaacccatacgccgagtttattctagagtgcggaggtctggagaaactggaggatctgcaggacgtggacagcgacaggatctacgagctagccatgaagctgctacagagctactgggaggaggaagtaagcgagagtgatgatccgaacatcccaggttcgaatgactcgtcagatactgtggaagcaacgtccgaagatgctgctgctgctgtgcagccaccaccagtaccgccgccgccgtccgccgcagatgaagccgagtgatggtagatgttgtattgtagattgtatttcaggagaggaaagcctggttccttttcttagtggcactggcatattgtatgatacttactatgatcaggtcgatgtagagaggaacgtgtgaaggtgtggtagccgttatgtgcagaattttcgcatcacgtttctgtaggcgacattggagcattttgaatggaggatttgggccaagagaaaaagaggtatgggggtta

SEQ ID NO: 142364 - DNA, 2142 bp, Zea Mays
atgttcttggccaaacgaccgccttggtcgtctcagattagcaggttctgcatccttcccttccacgctgttccctggatcgttttgtggacaaggcgggtgcgatacagtggcggcagcggcgataatgccactccagtggcctctgggcggctgtccaagctgttttggccggctcggatgcacgtggctgacgttattgggcgagttctggaacgggggcagtcgttggattcggtggagctggagctggagaggctccatgtcgacctggacccctttgttgtcaaccgggtgctccggagcatctcggactcggagatggcagtgcggttctactggtgggcagagtccaggcctgggtttgatcacacccagttcgcgatagcgtatgttgtcagcctgctctttgtagacagcaactttttcctgctgtcggagttcctcgagagagtgaggagtcagggggttgcattgcatcgctctctctatcggatcctcttgtcgggctatgtaagggcaggcaagttcgattctgtcatccatacatttgatgagatggttacatctggatgccgtgagtttggtgtggactacaacaggttcattggtgttctagttaagaattgctgctttgatttggtcgagaagtattatagtgtggcacttgataaaggtttttgcttgacttcattcacttattcgaggtggatatctgcactgtgccaatcagaaaggattgagctcgtagagagactccttgccgatatggataagtttggctgttttccagatatttgggcatgtaacatatatgtggactgtttgtgtaaacataacaggttgcatgatgccttgaagacgcttgagaatatgtggatcagaggaaccaatccagatgttgtcacttacacaacagttgttggatgtttatgtgataacaagcagtttgcagaagcggtcgagctttgggaagaaatggtgaggaggggcctcaaacctgatatcgttgcctgtggcgtattgatatttgggctgtgcaagagtgacaaggttgatgaggcttttgagctggcattgaggatgctgagtcttaatttagaactcaatgtctgtatttacaatgccctgataagtggcttcttgagatccggaagcattaataaagcattcaaaatcatatccgtcatgcggacaaatggttgtgagccagacgttgtcacatataatatccgtttgaaccattactgcaacacaggtatgataaaggaagctgaaaagttgatcgaggagatggaaatgagtgggattgtaaatcctgatcggtacagctataatcaaatgttaaagggattgtgcaaagctcatcaattggacagggcatttggttttgtttcagatcatatggaggttggtgggttctgtgatattgtatcttgtaacatactgattgatgcattctgtaaggcaaagaaagtaagttctgctttgaagctgttcaaagaaatgggttataagggaatacaagcagatgctgtgacatatggaactctaattaatggtctttacggtgtaggatactactacctagctgaggaaatttttgagcagatgctgaaagctcgggttgttccaaatgttaatctgtacaatattatgctccataacctgtgcaaagctggtcagtttgaacaggctcagaaaattttcttgcagatgattcagaaggaagtgtcgccagatattattacttttaacacgctcatatattggcttggtaaatgctcaagggcaattgaagctattgatctgttcagggatatgacagctagagggatagaacctgatagcttgacatttaggtatctgatcagtggcctcctagaggaggggaaagctacacaggcttatgaggtatgggaatatatgttggagaatggcataattctcgacagagatgtttctgacaggctgataagtatgtttaaatcaaacaacaagtaacaactgactgggtttcttgagagtttcagcctctaggacattttaatcatgtcactagaactcaaaggtccgagcttgtttagttgcttctaagctcatcgctgtgccggtgccgcggaacacatctttgctgattaa

SEQ ID NO: 142365 - DNA, 688 bp, Zea Mays
gctgatttcatgaagcgattctctaaaatgaactagggtgccgggagctgaataaaggtacgcatccaagattcttggttgacaaatttgatgttgctaagaaagcatgtctcaattttctcgataagtttaaggcgtcagtcgttactggtgaacaactcttaggacaaagttgtataaaggattggctgatcagatgatggatattgttgtgaatgcagtacgtttgatttctgttgtagtttttttttgtgaaaggtttctatacctgtccatttcgaagcatatttgaagtatgaaactgttataggcttataggttctgtgcatctgcaattcagatgactcagttgatctttttatgtccaacggagacctccagaagcaccaatgcgttgtggggtcctatggcgcagtagcaatgggaagagaggcaggagaaggccaaatttgatatggggagaggtagtaaaaggagacttgaaacttgaaaggatggaatatattcaaatatttagccttaaataggactataggagtgcatacaccataggaaacagttatacatgtgcctgaatcttgacttgtgatttatgttgggtttcaactctaacctacctgaactttcttgtgactaaaagacactgttgttgatggtggtggataatgcacatgtgccatttatggtg

SEQ ID NO: 142366 - DNA, 677 bp, Zea Mays
ttcataagatgcggtattcttgtagtggttctcgagggcaaagggggggatttgggtaaagccagtggtggtgattgtgtcatccgttctcttcttaataactcccatctcccgaggcctagcttcgtattattttcttcattcaaagcaacccattacttttgctactactaccactagtctagctggtgcaaccatataatttttctaagagtacatgagatcgtattgtattttgggtttgcactagcgataaggtaaatcaaaattctggctgggggctggtttgagagaagtttgctactccggcagccttccaatgaccttaatgaaacgggacgagtcgcaatgaatcactacgaaaatagaaatatatgcactaataaaatatagtcaagcgaggagcctacgagttgattgaagaaaggcacgaggcgcagagcgtcaggcttttgagaagtagtggaattgcttacctaggaagaagtagtagtaggagaagtcagatctctttgaataggtggtccgcttgcttggaaagaaaagcaaagtaagacgccctacttgtactaataactagaagaaatcaatggattgaagaacaaagcaaaacactgatagtagaactatgggagaaagaaaagaagcttggttcacatctggtaagcgaaagagtg

SEQ ID NO: 142367 - DNA, 204 bp, Zea Mays
ctgtactgtaaagaagagcccagcggatggaagctgttgagtggagcttcacctggctggataaaagcactctacctaggcttgtaataactagtactttctataatgcttggttccaactaataatacatcatggtaccttatattctttaactactaatggaactgagataggcctgcctgggtaaagaataagaaaaaacg

SEQ ID NO: 142368 - DNA, 813 bp, Zea Mays
ataaaatccgtatatacggcttggtgagtgttactgtgtagcccaagattcaaactctcccgtgcacaattttactgagaaactcctcgggggtaaagacttccccttcgctctgctgtcccgtctctttgattcctgaaccccacccaggcattccgcagtggctggccgtcgctggctcgccgctacttcggccctttcgccggtgacgataacccaccagttatccgagggaaaattttctatgtgctgattggaatggcgagtacagcatgctttgtaataattgtcagtaagaatgatatcccaatctacgaggcagaagttggatctgcacccaaaaaagaggatttgtcttatcaccatcagtttatcctgcatgctgcgttagatgttgttcaggacctagcatggaccacaaatgcaatgtccctgaagtcagttgatagattcaatgaccttgtggtgtctgtttatgtaactgctggtcataccagattcatgttgcttcatgactcacgcagtgaagatggaataaaaagcttttttcaagaggtccatgagctttacatcaagatattcctgaacccgctttacctgcccggctctcgcatcacatcatcccattttgataccaaggtcagggccctcgcaaggaagtacctgtaatacacgggcatgcatgaagggtttcctaagctttgcatctcgtaagcacaaggctgagctagtttcgcttcgatctttttaggctttctttttgtttgatatattccgcgcataaaatgcccctttgctccagattatccttgc

SEQ ID NO: 142369 - DNA, 1063 bp, Zea Mays
actgtgtagcccaagattcaaactctcccgtgcacaattttactgagaaactcctcgggggtaaagacttccccttcgctctgctgtcccgtctctttgattcctgaaccccacccaggcattccgcagtggctggccgtcgctggctcgccgctacttcggccctttcgccggtgacgataacccaccagttatccgagggaaaattttctatgtgctgattggaatggcgagtacagcatgctttgtaataattgtcagtaagaatgatatcccaatctacgaggcagaagttggatctgcacccaaaaaagaggatttgtcttatcaccatcagtttatcctgcatgctgcgttagatgttgttcaggacctagcatggaccacaaatgcaatattcatgttgcttcatgactcacgcagtgaagatggaataaaaagcttttttcaagaggtccatgagctttacatcaagatattcctgaacccgctttacctgcccggctctcgcatcacatcatcccattttgataccaaggtcagggccctcgcaaggaagtacctgtaatacacgggcatgcatgaagggtttcctaagctttgcatctcgtaagcacaaggctgagctagtttcgcttcgatctttttaggctttctttttgtttgatatattccgcgcataaaatgcccctttgctccagattatccttgcataaatgcctgtccctgttatgcataataaacaaagcgtgttccgtcaaagaacagcatgctgacacacacgacacgacgagccaccacccatgagccggtaccggtacgatagctagcctccaagctagggcgtcggcttgctgtggtcgtgcttgcgtggagactgaccattggcacgccggtctctcggatgtatacctgcgtgtcacggcatccacgtcttgtattgtttggtgcagactgtaggttaggtcctctattgcatgacaccgtctttacgtgtcaatgtagttacgtatctatctatgaccctgtttggcacagcagctgcttgttaaaaaagcagctt

SEQ ID NO: 142370 - DNA, 270 bp, Zea Mays
atggaggccgaagcacccatggaggaagagcgctgccacggccttgctagctcctgcggggaacaagtctgggcgaggaggaagaggatgcctaccgcggacggacaaggacaagggcaggcgttagataaatacatccactccagtatatatgacagccgcaacgcctacaaagtttcacctcgagcagagtctataagagaaaagatgaacaagctattggtcatcccagaaccagaaggcaacgaggaagttgagttgctcccttga

SEQ ID NO: 142371 - DNA, 888 bp, Zea Mays
atggatcaatcagagaacagggggggattggcacagccgcaagaggttgaagagaggaggagggtccaaaaagggaagaagggcggtgaagggaaggaagcagaggaggaggagagagactcactggccgactgggagtgcgagtctgcgagatgcaagcgaaggaaggcagtgaacctgggtggagcaagagacattaatcatgaatcgatctcaggagctcagttcacttgtccatcttggttttctgctggagcaaagaggctgatcaacagaattctggatcctaatccctccactcggattacgattcctcaagtactaaaagatccatggtttagaaaaggctacaagccgcctgttttcgatgaaaaatgccaaactagtctagatgatgtcgacgctgcctttggagacgaagaggaacatcatgtggtagaggaaacggaagggcagcccgcatcgatgaatgcattcgaattgatttcaatgaacaaggggctgaatctagataacttttttgaatctgataagaagtacaggcgagaaacgcgattcacatcccaatgtcatccgaaagagatcatcaatagaatagaagaagctgctaagccacttgggttctatatccaaaagaaaaactacaagatgctaatggagaactcaaaagcaggaaggaaaggaaacctaaatgttgagactgaggttttccaagtggctccatcgctccatgtggttgagctgaagaaggcaaagggagatactctggaattccaaaacttctacaaaactctgtccacggagctgaaggacgtcgtttgggcgcgtgatgatgaggtccaggacagaagctcctcgccatgaaacagttgcgagatgaggaataca

SEQ ID NO: 142372 - DNA, 3720 bp, Zea Mays
tcggtaggttcgttccctcgccttctccctttcttcctctccaaacaagacattgcagaagaaaaaggcaaaaacaatccgccgacttggagaaaccctagaatcaagcgcggaaccgccctcatccaccatgctgcgtgcggcggcggctgcagccgccatcttcccggcgcggttcgccgccgcgccggctgtggcggcggcggaggagctcaggtctccgctgctcagggtcattgggacgctgagggacggccgcggctcggtgctgctgggtaggagggtgcgtttctgctccaactcttccgcgagcgacaccgaggcggcggtggcagaggcggaggcgaaggccgaggatgcgtccgctgcggagggtgaggcggacagcaaggcgtcttccgccatcgtgccgaccagcaccaatatcgatgattgcctctcggttatagcgttacctcttccacatcggccactctttcctggattctacatgccgatcaatgtgaaggaccaaaagctgctgcaagccctaatagaaaatcgcaaaagatcagctccgtatgctggtgcctttcttgtgaaagatgaagaaggtactgaccctaacatcgtgactggttcagattcagcgaaaagcattgatgatctcaaagggaaagacttgctgaagcgtcttcatgaagttgggacgcttgctcagattacaagcattcaaggggatcatgtagttctacttggtcaccgacgtttacggataactgagatggtcgaagaggatccacttacagttaaagttgaccatctaaaggaaaagccctacaacaaggacgatgatgttatgaaagctacatcattcgaagttatatcaactttaagggaagttctaaggacaagttccctttggaaggatcatgtgcaaacctacacacagcacattggtgactttaactaccaacggttagcagactttggtgctgctatctctggtgccaacaagttgctttgccaggaagttcttgaggaattggatgtatacaagcgtttgaagttgacccttgagttagtaaaaaaggagatggagattagtaagctacagcaatccatagcaaaagcaattgaagaaaagattagtggagatcagcgacgttatttattgaacgagcaacttaaggcaatcaagaaggagttgggtttggagactgatgacaaaacagcattgtctgcaaaatttagagaacgtatagaatcaaagaaggacaaatgtcctcctcatgttttacaagtcattgaagaagagcttaccaagcttcagcttttagaagccagctctagtgagttcagtgtaactcgtaattatttggactggctgacagtgttgccatggggaaattatagtgatgaaaacttcgatgtccaccatgctcagaaaattctcgatgaagaccattatggtttgagtgatgtgaaagagaggatactggaattcatagcagttgggaagttaagagggacttcacaaggcaagatcatatgtctttctgggccaccgggagttggaaaaaccagtattggtcgttcaattgcacgtgcactgaaccgtcagttctacaggttttctgttggaggtttggctgatgtggctgaaatcaagggccatcgacgcacatatgttggtgcaatgccagggaagatggtgcagtgtcttaaatcagttggtacagcaaatcctctagtgttgatagatgagattgacaagcttgggaagggtcattctggcgatccagctagtgcattgttggaactccttgaccctgagcagaatgttaatttcttagatcactaccttgatgttcctattgacctatccaaggttctatttgtttgcacagcaaacgtaatagagatgataccaaatccattactggataggatggagatcattgctatagctgggtatataactgatgagaagatgcatattgctcgggactatctagagaagaatacaagacaggcttgtggcattaagcctgagcaggttgaagttacagatactgctcttcttgctctcattgaaaactactgtcgagaagctggagtgaggaaccttcaaaagcagattgagaaaatttaccgtaagatagctctgcagcttgttcgccaaggagtatcgaatgagccagaccatgagtctgtcagtgcctctgtaactgaggaatctggtaatggtgataacaccacaacaaaagatgagattttgaaggatcctgctgtagaagatgcttcagtcaccaacaatgttacaaatcctgcctccgaggaagctaatgaagaaaatttgacaagtgaagcagcaaaagaagacagcacatctaagggcaacaagggcactgatggagcagcggacaaggcaattgagaaggttgtggtcgattcatcaaaccttggtgattttgttgggaaacctgtgttccaggctgagcgtatatatgagcatactccagttggagtggtcatgggtttagcttggactgctatgggtggttctactttgtacatcgaaacaaaaaaagtggaggaaagggaagggaaaggtgcacttgtgcttacaggacagcttggagatgtcatgaaagagagtgctcagattgcgcacacagttggcagagctgtattactggagaaagagccagataaccatttttttgcaaactcgaaggtgcacttgcatgttcctgcagggtccacccctaaggatggccctagtgctggatgcaccatgataacatctatgctgtccttagctatgggaaagcctgtcaagaaggacctcgcaatgacgggtgaagtaacactaaccggaagaatcctcccaatcggcggggtaaaagagaaaacaattgcggcaaggagaagtgcgataaagacactcatatttccggcagcgaataaaagggatttcgatgagcttgcttctaatgtgaaggaaggcctcgaagttcattttgttgacacatacagtgaaatatatgatttagctttccagagtgacgccgggacagaaacaagctgagatgatttagctttatgggattgagattttttccccctagacccacgacagaaacaagtccgtcaagaggcaggcaaaccagaccattgtaaccaagatgggtggagttaattgatattcacgagaaaaatgaaatcctttttttttgcccccaatataacatcattgaatttaagagatttttggctaggttgtacgtactagtgtggttgcccatctaggtggtatagcctatattattagtaggaataagaaaagcagcatggatgcaccatctgttatttatatttattgatttaagagtgttctctaaaagcagcaggtatgccccagttgttattcattaaatttgtttcagtgagtgttagttacctttggatactgtactgtgcgtcatcaatttataggatgttttgattttttttggatacacaaacttctatcattatgcatctaatttgtggccgattttgattttgtagtccttcctctgtttcaatttattggatgttttgagtttttttttatacataaatttttattgttatgtatccaatttatggatggttttagacatataacgtttattatgtatctagtaaaaatggcgatctgtaatttagaagagggtggtaaaaacagttggg

SEQ ID NO: 142373 - DNA, 3595 bp, Zea Mays
tccgccgacttggagaaaccctagaatcaagcgcggaaccgccctcatccaccatgctgcgtgcggctgtggcggcggcggaggagctcaggtctccgctgctcagggtcattgggacgctgagggacggccgcggctcggtgctgctgggtaggagggtgcgtttctgctccaactcttccgcgagcgacaccgaggcggcggtggcagaggcggaggcgaaggccgaggatgcgtccgctgcggagggtgaggcggacagcaaggcgtcttccgccatcgtgccgaccagcaccaatatcgatgattgcctctcggttatagcgttacctcttccacatcggccactctttcctggattctacatgccgatcaatgtgaaggaccaaaagctgctgcaagccctaatagaaaatcgcaaaagatcagctccgtatgctggtgcctttcttgtgaaagatgaagaaggtactgaccctaacatcgtgactggttcagattcagcgaaaagcattgatgatctcaaagggaaagacttgctgaagcgtcttcatgaagttgggacgcttgctcagattacaagcattcaaggggatcatgtagttctacttggtcaccgacgtttacggataactgagatggtcgaagaggatccacttacagttaaagttgaccatctaaaggaaaagccctacaacaaggacgatgatgttatgaaagctacatcattcgaagttatatcaactttaagggaagttctaaggacaagttccctttggaaggatcatgtgcaaacctacacacagcacattggtgactttaactaccaacggttagcagactttggtgctgctatctctggtgccaacaagttgctttgccaggaagttcttgaggaattggatgtatacaagcgtttgaagttgacccttgagttagtaaaaaaggagatggagattagtaagctacagcaatccatagcaaaagcaattgaagaaaagattagtggagatcagcgacgttatttattgaacgagcaacttaaggcaatcaagaaggagttgggtttggagactgatgacaaaacagcattgtctgcaaaatttagagaacgtatagaatcaaagaaggacaaatgtcctcctcatgttttacaagtcattgaagaagagcttaccaagcttcagcttttagaagccagctctagtgagttcagtgtaactcgtaattatttggactggctgacagtgttgccatggggaaattatagtgatgaaaacttcgatgtccaccatgctcagaaaattctcgatgaagaccattatggtttgagtgatgtgaaagagaggatactggaattcatagcagttgggaagttaagagggacttcacaaggcaagatcatatgtctttctgggccaccgggagttggaaaaaccagtattggtcgttcaattgcacgtgcactgaaccgtcagttctacaggttttctgttggaggtttggctgatgtggctgaaatcaagggccatcgacgcacatatgttggtgcaatgccagggaagatggtgcagtgtcttaaatcagttggtacagcaaatcctctagtgttgatagatgagattgacaagcttgggaagggtcattctggcgatccagctagtgcattgttggaactccttgaccctgagcagaatgttaatttcttagatcactaccttgatgttcctattgacctatccaaggttctatttgtttgcacagcaaacgtaatagagatgataccaaatccattactggataggatggagatcattgctatagctgggtatataactgatgagaagatgcatattgctcgggactatctagagaagaatacaagacaggcttgtggcattaagcctgagcaggttgaagttacagatactgctcttcttgctctcattgaaaactactgtcgagaagctggagtgaggaaccttcaaaagcagattgagaaaatttaccgtaagatagctctgcagcttgttcgccaaggagtatcgaatgagccagaccatgagtctgtcagtgcctctgtaactgaggaatctggtaatggtgataacaccacaacaaaagatgagattttgaaggatcctgctgtagaagatgcttcagtcaccaacaatgttacaaatcctgcctccgaggaagctaatgaagaaaatttgacaagtgaagcagcaaaagaagacagcacatctaagggcaacaagggcactgatggagcagcggacaaggcaattgagaaggttgtggtcgattcatcaaaccttggtgattttgttgggaaacctgtgttccaggctgagcgtatatatgagcatactccagttggagtggtcatgggtttagcttggactgctatgggtggttctactttgtacatcgaaacaaaaaaagtggaggaaagggaagggaaaggtgcacttgtgcttacaggacagcttggagatgtcatgaaagagagtgctcagattgcgcacacagttggcagagctgtattactggagaaagagccagataaccatttttttgcaaactcgaaggtgcacttgcatgttcctgcagggtccacccctaaggatggccctagtgctggatgcaccatgataacatctatgctgtccttagctatgggaaagcctgtcaagaaggacctcgcaatgacgggtgaagtaacactaaccggaagaatcctcccaatcggcggggtaaaagagaaaacaattgcggcaaggagaagtgcgataaagacactcatatttccggcagcgaataaaagggatttcgatgagcttgcttctaatgtgaaggaaggcctcgaagttcattttgttgacacatacagtgaaatatatgatttagctttccagagtgacgccgggacagaaacaagctgagatgatttagctttatgggattgagattttttccccctagacccacgacagaaacaagtccgtcaagaggcaggcaaaccagaccattgtaaccaagatgggtggagttaattgatattcacgagaaaaatgaaatcctttttttttgcccccaatataacatcattgaatttaagagatttttggctaggttgtacgtactagtgtggttgcccatctaggtggtatagcctatattattagtaggaataagaaaagcagcatggatgcaccatctgttatttatatttattgatttaagagtgttctctaaaagcagcaggtatgccccagttgttattcattaaatttgtttcagtgagtgttagttacctttggatactgtactgtgcgtcatcaatttataggatgttttgattttttttggatacacaaacttctatcattatgcatctaatttgtggccgattttgattttgtagtccttcctctgtttcaatttattggatgttttgagtttttttttatacataaatttttattgttatgtatccaatttatggatggttttagacatataacgtttattatgtatctagtaaaaatggcgatctgtaatttagaagagggtggtaaaaacagttggg

SEQ ID NO: 142374 - DNA, 719 bp, Zea Mays
agcaggagccgaggaggacggcggcggcggcggcgagaagagatggccgacggcagcagcaactcatcggcgtcggtggccatgggacaggaggtgcaggctttcgttgagaacaagtatggtggaatggtgcctaagaagcctctgatttcaaaggatcaggagcgcgcctattttgattctgcagactgggtccttggcaagcaagctgcaaacagcggcaccgcacgggctgcgactgctatcgaattcttgaagccaaagctaaagaggacgccccatcaccagcttccccctcgcaagccgacctgtgcgtccagctgagctcaagacagtgcgaaaatccaaagggccaggcttacaaaagctccctggctgggagagacgatgaagagcgttatcaagttttttttagttggttgcattggttaggaaggcaaattcaggattgatgagccctgcatttggctttgttcgcagcactcgctgaattattaatttaagcatgtgggggacatagataaaactagactcctgctattatatgcttaattgtggaagtggtagatgacacccatctgtttcaatgtatctttggtcggcagatgaaatgtatcctctctatctacttggcttctccctttctttactagacctcatatataatattcaccgaaaagagaatgaacgaatggatattccaatttgggatgaaaatg

SEQ ID NO: 142375 - DNA, 1709 bp, Zea Mays
ccttcttcccttttttttgatccgctgttgatgcctggcgggacgcaatggcgccgccgtccccttcctccgctccggccaagaaacgcattaactggctgagaggcaacaacaaggtgttcgacacgtacctcagcgaggcgcgggcggctctcgctgcggccgcgcaggacaccgacgacgcggcggcggcggcggcggcgctcggcctggtcacggccgccctggagatgtcgccgcgggccgaggcggcgctggagctccgggcgcgcgcgctcctcgcgctcaggcgctaccgcgacgtcgccgacatgctccgcgactacatccccagttacgccaggtcgtgctcgggcgacgatgacgccacctgcgcctcgtcatcctcgtcctgctcgtctgcctccggggaccgcgaccgttccgacgcctgcgccggcgccgcccgcttcctctgctgcctccacgtgtccgacctcaagcgccgcctcgtcgccagcttctgcaggagctcgagcaccgaggcgcagtggaggtacctggtcctgggcagagcctgcttccacctcggcctgatggaagacgcggtggtgctcctccaaaccgcccgccgcctcgccaccgcggcgttccggcgcgagagcgtgtgctggtcggaggacagcttctcgccgtcgaacccgctgacggccaacagcgccgcagcgtccgaggcggagtccgtgtcgcagctgctcgcgcacgtgaagctcctcctccggcggcgcgcggcggcggtggcggcgctggacgccgggctccccggcgaggcagtgcggcatttcaacaaggtgctggacacgcgccgcagcgtgctgccgcaccccttcgccacggcctgcctggtgggccgcgccgccgcgttccggtcggcggggcgccccgcggacgccatcgcggactgcaaccgcgcgctggcgctggacccggcctccatcccggcgctgcgagcgcgcgccgacctgctggagtcggtcggggcgctcccggactgcctccgggacctggaccacctcaagctcctgtacgacgccgcgctccggggcggcaagctgcggccgcagggcggcgtccagttcggggagatcgccggcgcgcaccgcacgctcacggcgcgcatccagctgctccgcggccgcgtcgccgccggcgaggggtgcggcgtcgactactacgccctcctcggggtgcggcgcgggtgcacgcggtcggagctggagcgcgcgcacctggtgctgacgctgaagctgaagcccgagcggtcggcgtcgttcgcggagaggcttgagctcgtggacgaacaccgcgacctggaggccgtgcgcgaccaggcgcgcatgtcggcgctgttcctgtaccggatgctgcagaagggctactcgtgcatcatgtcggcggtgctggacgcggagaggcagagggccaaggacgcggcggctgccattgcagagcaagaagaagaagtggcaacagtgcaagagaatgccactcgaaaagacggtggcaacgttgtggtcaccacgaagccggaagcgattccaatgcctagaacggcagtggctgcagcgacaccattgagccaaccgttcgtgttctgccgcgacaccctgctgtcccgaggggggttcgaccggccgattccggtgaagtgcgaggcgatgagctgctga

SEQ ID NO: 142376 - DNA, 2358 bp, Zea Mays
ccttcttcccttttttttgatccgctgttgatgcctggcgggacgcaatggcgccgccgtccccttcctccgctccggccaagaaacgcattaactggctgagaggcaacaacaaggtgttcgacacgtacctcagcgaggcgcgggcggctctcgctgcggccgcgcaggacaccgacgacgcggcggcggcggcggcggcgctcggcctggtcacggccgccctggagatgtcgccgcgggccgaggcggcgctggagctccgggcgcgcgcgctcctcgcgctcaggcgctaccgcgacgtcgccgacatgctccgcgactacatccccagttacgccaggtcgtgctcgggcgacgatgacgccacctgcgcctcgtcatcctcgtcctgctcgtctgcctccggggaccgcgaccgttccgacgcctgcgccggcgccgcccgcttcctctgctgcctccacgtgtccgacctcaagcgccgcctcgtcgccagcttctgcaggagctcgagcaccgaggcgcagtggaggtacctggtcctgggcagagcctgcttccacctcggcctgatggaagacgcggtggtgctcctccaaaccgcccgccgcctcgccaccgcggcgttccggcgcgagagcgtgtgctggtcggaggacagcttctcgccgtcgaacccgctgacggccaacagcgccgcagcgtccgaggcggagtccgtgtcgcagctgctcgcgcacgtgaagctcctcctccggcggcgcgcggcggcggtggcggcgctggacgccgggctccccggcgaggcagtgcggcatttcaacaaggtgctggacacgcgccgcagcgtgctgccgcaccccttcgccacggcctgcctggtgggccgcgccgccgcgttccggtcggcggggcgccccgcggacgccatcgcggactgcaaccgcgcgctggcgctggacccggcctccatcccggcgctgcgagcgcgcgccgacctgctggagtcggtcggggcgctcccggactgcctccgggacctggaccacctcaagctcctgtacgacgccgcgctccggggcggcaagctgcggccgcagggcggcgtccagttcggggagatcgccggcgcgcaccgcacgctcacggcgcgcatccagctgctccgcggccgcgtcgccgccggcgaggggtgcggcgtcgactactacgccctcctcggggtgcggcgcgggtgcacgcggtcggagctggagcgcgcgcacctggtgctgacgctgaagctgaagcccgagcggtcggcgtcgttcgcggagaggcttgagctcgtggacgaacaccgcgacctggaggccgtgcgcgaccaggcgcgcatgtcggcgctgttcctgtaccggatgctgcagaagggctactcgtgcatcatgtcggcggtgctggacgcggagaggcagagggccaaggacgcggcggctgccattgcagagcaagaagaagaagtggcaacagtgcaagagaatgccactcgaaaagacggtggcaacgttgtggtcaccacgaagccggaagcgattccaatgcctagaacggcagtggctgcagcgacaccattgagccaaccgttcgtgttctgccgcgacaccctgctgtcccgaggggggttcgaccggccgattccggtgaagtgcgaggcgatgagctgctgatgtcgcgaggcgggtccaatggaaggtgaagcagcagcagcagaacctggagttggcgggactggagtggaggttcgaatttgcttgtagtagtagcaagcgctgtacagtttgggaataagagatgcatgagcacaaaataggaatgaacgcgagtgcaagaagcgtcagggagattgcagttttttttgtatttgcagcttgttcgctgcggcttgctgcggctgcaatccggctgcggctgcggcttctacagtatttttctctctatggattgcagctgcagcagtccaaacagctgcaacagtgtcggcttgtagccagccgaacacgcccttggtttccgagttcgtttttagtgcagtactgggtcagcttctcgtcatctcttggccatgtactctagatgctccttggtagtgcaaattttgtacagttgtccttgtatagtgaagttttcctcgttgtttggactgcatccgttcatattcaagtcggtcacaatgggagaatgcaagagaaagggaggtggcaatggcagcattcagatctaaccagggaggtttcttgtgcaaaaaaaaaaaatcgatgagagaggcaaaggcaaaggcaatggcaacgaaaggctgtaaaggtaaaaggcggatgg

SEQ ID NO: 142377 - DNA, 146 bp, Zea Mays
cggctgcggcttctacagtatttttctctctatggattgcagctgcagcagtccaaacagctgcaacagtgtcggcttgtagccagccgaacacgcccttggtttccgagttcgtttttagtgcagtactgggtcagcttctcgtc

SEQ ID NO: 142378 - DNA, 2098 bp, Zea Mays
ctccactgccgtctcttctgcttcttctaatcctcttgtcccgcgaaccccagtcgctaccgagagcacaccaatcctcatcacctccgagattttcatcgcctgccgcgcaatctcgggatcctagccgtccgcacatcgccgcggccttcctccgcgccacgaatggtgttctctggccgctgtcttttcccgaggacctaacccaaggcggtaggtaccagctaaaagtctaaaggcgaccaccggaccgggcggcaatgacgaccgccgcgagggagaggcgcctgccgccgacgctgcccctggccacgcttatcggtcgcgagctccgtgcggggggctccgagcgcccggccctgcgctacggccacgccggcttcgccaagcgcggcgaggactacttcctcgtcaagcccgactgcgtccgcgtccccggggaccccgcatcggcgttctcagttttcgccgtgttcgacggccacaacggcgtgtcggcggcggtctatagcaaagagcatctgctcgagcacgtcatgagcgcgctgccgccggacatcgggcgcgacgactggctgcaggcgctgccgcgcgctctcgtcgccggctttgtcaaggccgacattgatttccagcgcaagggggaggtgtcaggaaccacggcgacactggtggtcatcgatgggttcacggtcacagtggcgtcggtgggagactcgcgctgcatcctggacacgcagggcggcgagttgcagctgctaaccgtggaccaccgcctggaggagaatgcagaggagcgggagcgcgtcacggccagcggtggggaagtaggccggctcaatctcttcggtggtcaggaggttggtcctctccggtgctggcctggtggcttgtgcctttcaagatccattggggacatggatgttggggagtacattgtgcccattccacatgtcaagcaagtcaagctatcaaacgctggaggaaggctgataatagcatccgatggcatatgggatgcattatccaatgaagcagctgcaaaagcatgcagaggattgcctgcagaactggcagcgaagcttgtcgttaagcaagctctgaaaacaagcgggctaaaggatgacaccacctgtgttgtagttgacattatcccatccgatcatttgacatcaccacaattgtctccaaagaaaaatcataacaagttgaagtcactttttcgtagaaggtcgcatagttctgttggaaagctcgggggcaagtctgcctccattggttctgtggaggagttatttgaagaaggctctgcaatgttagaagaaaggttgggcaggaatttgtctttgaaagcagtttcagcaccttttcgctgtgcaatctgccaagtggaccaagagcccttcgaagatttgatgagagataatggaggtggttactgctcttccccatgcgctccatggggtggtccatatctctgtttggactgtcggaaaaagaaagatgcaatggaaggtaaaagatctagctgctccacagcatgcaggtgaaacagtccttgcctcaagcagaaaagaaccgatgagagaggataataagttgctggacccaagtataattgtttgctgaaactaactgtattgccagcccggtaaaagacatatttggctggtagtaagacctaactagtctgttacctgcgcacaatccgaatggaaaagtttgttgtcgttgaggacatagctcaaataacttgagcttgtagttttgatgtaccctgtagcgtgccttgtgcagggaaaaattgacctgcctattgctgtttttttttataaaatagctatcgagggtgattaatcgtggacatgtttttatttttttggtgggattgaaagaagtacatgcctggtgcaggaacgagagtgaatcgtattactaggtttgttcttttttttttttggttattgaagtacgtactaaagatgtacttatgtgtaaaatgttccttgtgtaatggctgttattgctgaattggttgccatatacgctacttctttaatatctgatattaatgagacaattgcatatttaggactct

SEQ ID NO: 142379 - DNA, 2144 bp, Zea Mays
ctcggtccaggtccatgcatgcatcggccggtcgatagatcgatccacgtacgcgcgtacacatgcaccacctctagctagtttcgttttgatttcattccatttcttctttccatccatccacccaatccaatcaaattagtaatgagcaaaggtgctatcatcggcgcgtcgaccgtccttgtggtggcggtggtcgcggccgtgtgcgtggtgtccttcaagggcaactccggcaagggcgatggcgacgagaacctgtccatgtcggtgaagtcggtgaaggccttctgccagcccgcggactacaaggagacgtgcgaggcggagctgtccaaggcggcgggcaacgccagctcgccgtcggacctggccaaggtcatcttcaaggtcacctccgacaagatccacaaggccatcagcgagtcggcgacgctggaagagctcaagaacgacccgcgcacgtcgggcgcgctccacgactgcaaggagatgctggggtacgccatcgacgagctcaagtcgtccttcgacaagctgggcggcttcgagatgaccaacttcaacaaggccgtggacgacctcaagacgtggctcagcgccgcgctcacgtaccaggacacctgcctggacggcttcgcgaacgccaccaccaccgaggcctccgccaagatgcagaaggcgctcaacgcgtcgcaggagctgacggaggacatcctggcggtggtggaccagttctccgacacgctgggagggctcagtatcggccgccgcctgctgctcacgcctagctgggtgtcggagccagccgaccccgccaggcagcggctcctggccgccgacagccccgcgggctccccggacttcaagcccaacgtcacggtggcggcggacggcagcggcgacgtcaagacgatcatggaggcgctggagaaggtgcctgtcaagaacgcggacctatacgtggtgtacgtgaaggccggcacgtacaaggagtacgtcaccgtgggccgtccccagacgaacgtggccttcatcggcgacggcgccgagaagaccatcatcacggggaacaagaacttcaagatgaacctgaccaccaaggacacggccaccatgcaggcgatcggcaacggcttcttcatgcgggacatccgggtggagaacacggcggggcccgagaaccaccaggccgtggcgctgcgtgtgcagagcgacctggccgtgttctaccagtgcaccttcgacggctaccaggacacgctgtacacgcacgcgcagcggcagttcttccgcgactgccgggtgaccggcaccatcgacttcatcttcggcaactcccaggtggtgctgcagaactgcctgatccagccccggaagcccatggagaaccaggccaacatcatcacggcgcaggggcggcgggacaagcgctccgtgggcggcaccgtgctgcacaactgcaccatcgagccccacccggacttcaaggaggaagccggcgggaagatccgcacgtacctggcgcggccctggaaggagtactcccggacgatctacatccagaacgacattggtggcttcatcgaccccaagggatggctcgagtggaacggcgacttcggcctcgagacactcttctacgcggaggtggacaaccgcggcgacggcgccgacatgagcaagcgcgccaagtggggaggcatcaagaccgtcacctacgaggaggcacagaaggagttcaccgtagagaccttcatccaggggcagcagttcatccccaagttcggggtgccgttcatcccgggattgctgccgcaggagcaaaaaggcaggacacactgatcatccagccttcacttcccttcactcactcactagtcactactaccacctaacatcagttggactggacctgcactgcagcgagtcacccccggcccagcccactaatatgtccactgtactctagtattcgatttcccaatcttttttctcttctcttttgtcaattattaattatatacatcttttattattagtcctatatatatatatatatatatatatatatacacacacacacacacacacatatatacgttggcccaattcatcgactttatcacatacgatacgatagt

SEQ ID NO: 142380 - DNA, 89 bp, Zea Mays
ctttcctgtaaaaacgaactaacacttcatgaaaattcctgcattccagatgtccttattaagcttagtggaagagaggtagaacatca

SEQ ID NO: 142381 - DNA, 808 bp, Zea Mays
gggttgtggttgtggcctcctatccttgcacgcacacgcaaacgcatcccatcctgtcctcgcgttactactagttagttagagagagacagagaggatcgatctgctggcggcgtctaagctggagaaaggcggcgccaccgccgagggcgacgagataggcatcgacccagcggcggagactccggagcagcgcaacaagttcctggtcctccgcctgtacgaggcgctcaacgcccgggaccacgccgccgtgcagtcgctgctggcgcccgacctggagtggtggttccatggcccgcccaagcaccagcagcacatgatgcgcctcctgaccaccaccaccaccaccaccaccaccggcagcttccgcttcgtgccccgctccgtggacgccctcgccgcctcgtccggcaccgtgatcgccgagggccacgagaggggttgctactgggtgcacgcctggaccgtgggacccgatggggtgatcacccagctccgtgagtacttcaacaccgacctcaccgtcacccgcctcgccgccgccgtcgccgccaagtgcgtctggcagagccgccgccccgacagcgccaccaactccctgccgggactcctgctcgccctctgatcactctgagggataaattaaataccatctctatctatatactacgtatcatccttgtcgtcgtcagtcagtcagtgcaaccgtgtgtatgtatgtatctacgtacgtattgtatttgtatcccatccatggccgtatgtcactattatatatatacagtatatctcatcaactttgacc

SEQ ID NO: 142382 - DNA, 846 bp, Zea Mays
gctatctagcagccgggagcagctatcggtacagtacgtgagcgagcggcggcggcaatgacaaggtgcggacgatgccgccagtgtgaatgcgccggcgcctccaccaccacctcccacggcgacgcgcgcaaccgcgacaacgatgcccccgacgcggtcctcgagggcctcgccatggcaggcctcgtcgacatcctccgccagctcggagacctcgcagagcttgccgcggaggtgttcgacgacatgcaagaccaagtgatggccgcgtccgcgcgagggcgacgactggccgcgagagccaggaagctgctggcggccgacctcgacctcgtcctcgacctcgacctgccgccgccgtccacccaagaacaccgctgcctcagctctgccgccgctgctactgctctcgccacctccggtggtgcaggccgtctgggctgccgctcctatctcggaggcgcgccgccgatgccgcgtgtcgtcgtccaacgtatcgagcgctgccgcgggcctcccaggctgtcactccttgacaagtatatatggccgctgatatacgatacgatgacgtgcagtgcagctgcctgtttgatttctgctcccaagtcccaactccaatgtccaatccatgctggtacggtggtgttgcgttgcaggtttgatgctgctggcgatggagcgtgcctcaagaggtacaccgacccctccttcttcttcagggcccactctgccaagattgatgagcaaggcacgctgaagcagcatcgtcggcaggcagaagcagcagcagcagcaggtgccgccgggtctatgttcctgctgatgcagcaaacagctgct

SEQ ID NO: 142383 - DNA, 2167 bp, Zea Mays
gctatctagcagccgggagcagctatcggtacagtacgtgagcgagcggcggcggcaatgacaaggtgcggacgatgccgccagtgtgaatgcgccggcgcctccaccaccacctcccacggcgacgcgcgcaaccgcgacaacgatgcccccgacgcggtcctcgagggcctcgccatggcaggcctcgtcgacatcctccgccagctcggagacctcgcagagcttgccgcggaggtgttcgacgacatgcaagaccaagtgatggccgcgtccgcgcgagggcgacgactggccgcgagagccaggaagctgctggcggccgacctcgacctcgtcctcgacctcgacctgccgccgccgtccacccaagaacaccgctgcctcagctctgccgccgctgctactgctctcgccacctccggtggtgcaggccgtctgggctgccgctcctatctcggaggcgcgccgccgatgccgcgtgtcgtcgtccaacgtatcgagcgctgccgcgggcctcccaggctgtcactccttgacaagtttgatgctgctggcgatggagcgtgcctcaagaggtacaccgacccctccttcttcttcagggcccactctgccaagattgatgagcaaggcacgctgaagcagcatcgtcggcaggcagaagcagcagcagcagcaggtgccgccgggtctatgttcctgctgatgcagcaaacagctgctcacagggtcgaacagcccaacatggaacagaagctgcaagaaggtagtacagcgcagcccagcccaagtgagctcgagagaacgagctctttcgaggcatggctctctccacaagctcgccgctttcctaccgctactgctgctactactcatcaccatcttcaggaaccacctgatgatgatgatggtggtggtggtggtggtgctactacctgtagtggatccatcagtagtcaggttgataccacatcgaatgctgcggctgttagcagcagttccacggtgaaggcggtcaggctgaactcagcatcattggtgaaaggtggtgagagtaatacgacgaggtcgaggtacaaaggcaagatcgcctcaagagtcagcagcttgccgaggaagctcttcatgaacaccaccaagcatcacaacgaccactcgcgctcttttcgtgcaggtagtagcagcctccgggtgacccaagccacagacatcggggattgcagccctgaacttgaagccatcgccgtcgccatccccaccccagatgcagatcgatgcagtaacagtaacagcagcactcctgaaacatgtacagcagctgactccaagaacctgctgctgctgctgccaggaagtggtcctgttctggagccacctgacaattcttctgctgctgctgctgaagacgccaaacaacaatttggtagcagtgggcaatctgatgagaagccaagccaagagcacgaggcttcagaccacagcagcaatctgctgcaggagagcgtgttcttctctgcggcacaagagctagcgaagatgtcccctcctcctccttgggtgccaaggcccaaatatccactgcttgatgttaaggcagttaagctacggaatggtccaagcccgatccatccttcaagaaacattttggacagcaggagtgcacagataaaagacattgcaatttcttccaagctgaaaccagcttctagagcgagctctcatgtgactgggactgggagtcctaccaacgccaccattctgaacagagcagatggcattcggcaggtgcacgatgatgaaactgatcaaatctggagcgatgacactcaatgaataatgatcatgtactaactgatggaagtagagtcattcaagttgagatggccgagttggtctaaggcgccagattaaggttctggtccgaaagggcgtgggttcaaatcccactctcaacaaatatttttttatttttcctgttactcttgtaattgtttgtagagaattcattagctttttttttcaaatccaactctcaacaaacatgtttttcattgtattgtttttctttttcctgtttcaaactactcttctaattgtaattgtttgtagagaattcattagccctttttttactttatcatgcagttcttgtttttggattgtt

SEQ ID NO: 142384 - DNA, 2179 bp, Zea Mays
ctgccattgcctttgggtcgtggaccaacggtcgggtcgggtccgcacgggacgcggctgctgtcagccagcgaggccatccaaccgccgcaaaaagcgcgttccctcgggccatctcctccttccatcattccatgggattccccaaagcaactgtccgatcccatcgcgatggcaccgccgccgcaggagccaatccaccgccactgacgtaacccgatccatggaagcactaggatcttccgattacccccctcctcctcccaccttcctccgctccacccgccatatcctcgcctccctcgtcggcgcaaaccacacctccgcccgcttctgctcccgctagcaccaccaccagcaccggaccccttcccttcgcttcgcctccctcaccaggggtgacgggggcatggacccctcctccccgccgcggcgctgctccctcctcctccgcctgctcctcctcgccgtcgccgccctcgcgctccgtctcctctacggcgccttcctctccgtctccgccgggcccgcaggctggccgctctaccgccccgccgccaccgccacaaccaccacgcggaggaggacccacgtcgtccaggccgacgtcccgtcgccggaggtctggcgcacccgccactggcgcagggccgtcgactaccacgcggccatcctcgcgccgcacatcgccgccggcgccctcgcgcccgcgtcccgcgccgtctgcctgggcggcccgcaggaggcgctcgcgatgcgggagctcggcgtcgccaaagccgtcgccgtcggcaggaggcgtgcgccaccgctcgtcgtcgcggggggcgaccggagactgccgttcgactcgtcgtccgccgacttcgtcttcgcggggcgcgccctcgacgccgccaagcgcccggccgacctcgccgccgaggccgcgcggatcctcaagcccgacggccatctcgtcgtgctcacgtccagcgccgccgacgcctacagcctccgctcgatccaggcgctcctaccgacgctccgcctcgtccaatctcgcgagatcgacgcccaggacgacggcgactcctccacactcagggaacttgtcttccagaagaatccccatcctacgggcacgggcgcgggcaattcatcagtgaacaactgctcggttggggatcacaggcgccagctcctcgcgcacgccgagccactcatccaggaggagccgctcaagccgtggatcacgctaaagagaaacatcaagaacatcaagtacctcccggcgctggccgatatcagcttcaagcgccggtacctgtatgtcgacgttggcgcgcgcagctacggctccagtatcggcagctggttccgcaagcagtaccctaagcagaaccacaccttccaggtgttcgccatcgaagctgatccggcgttccactctgagtacgcggcaaagaagggtgtcacgttgcttccttacgcagcctgggtcaagaacgagacactcagattcgagatcaatggcgatcctggaaaggaggacgaggccaaggccaatggccgtggcatggggcgcatccgccctgctaccgggaagaagatgaacggcgaggtcaggagtgtccctgcgtttgactttgccgagtggttgaggcagaccgtgacggagcaggactacgtggtgatgaagatggatgtggaggggaccgagttcgatttgatcccgaggctgttcgacacgggcgcaatctgcttggtcgacgagcttttcctggagtgccattacaatcggtggcagaagtgctgccctggtgagcggtcgcccaagtatgagaacacctacgaggagtgcttggaccttttcagctcgctgcgggagagtggcgttctcgtgcatcagtggtggtaaaggcttcactggtaatttctccggtacagccgtttggaaatactatattgcagcgcagatagagtccaaagacaggtgacaaaaggttttgatttccacactgtattcatttttttatgctgtttagattgtgttggttaattttaaaggagtaaggtgaagtggagtgaacgaaatgtacttagggggtagttgcattcccagtaaaaaatcaatgtgccttgcaaacaattggaatgaatgaatgatacacacatgattcaaagtatcagtgtgaac

SEQ ID NO: 142385 - DNA, 3469 bp, Zea Mays
ctgtcctagtgtactcttgccttgacacgaatactcagagagctcactctctccagcccatcccaaacctagccgccacgccaagcaccttccctcgcctccgatcctttcctttcccccaccggcgaggtcgccgcccgcccgccgcccaggggtttcctcgccatgcttccgtccaagaggtctgcaagcgccgacggcggcgagcccaagcgggctaagctgggggaatcgccatccgccgcccgcgtgggtaccagcaacggcacccggaatggggcggcgccggagattgacgaggacctgcacagcaggcagctcgccgtgtacggcagggagacaatgcgccgcctctttgccgccgatgttctcgtctctggcctcgatggcctcggtgctgagattgcaaagaatcttgctcttgctggagtcaaatctgtcaccatacatgatgtcaaaatggtggaaatgtgggacttgtctggcaatttcttcttgtcagagcaagacatcggaaagaacagggctctagcttgtgtctctaagctgcaagagctgaataacgctgttctggtctctgctctgacagaggaattgacgatagagcacctgtctaagttccaggctgttgttttcactgatataagtttggagaaggcttatgaatttgacgactattgtcacagccaccagcctccaatctcttttatcaaagctcaagtctgtggccttttcggtagtgtcttctgtgattttggacctgagtttactgtccttgacgttgatggtgaagatccacatactggtataattgcatccatcagcaacgacactcctgcaattgtatcctgtgttgatgatgagaggcttgagtttcaggacggtgatcttgttgttttctctgaggtccaaggcatgacagaactgaatgatggaaaaccaaggaaggtaaaaaatgctaggccgttttcatttagcgtcgaggaggacacaagtagctatggtgtttacacaaaaggtggtatcgttacacaagtcaaagaaccgaaggttctacgtttcaaggcactaagagatgcaatgagagatcctggtgatttccttctgagcgacttttcgaagtttgaacattcacctgtgcttcatctagcctttgaagctctggataagtttaagaaggagcatgtgcgctatcctaccgccggctgtgagcaggatgctcaaagtttcctgaagtttgctgctgatattaatgaagcatctgttggttctaagctggaaaacattgatgaaaagttgctccgtcatttcgcaagtggttctcgagctgttttgaacccaatggccgcaatgtttggtggtattgttggccaggaagttgtgaaggcatgttcagggaaattccatccgctttaccagttcttctacttcgattcagttgaatctcttcctacatatcagttggatccccaggacttgaagccttcaaatagccgctatgatgcccagatctctgtatttggttccaagcttcagaaaaaactgctagatgcaaatgttttcattgtgggttctggcgctcttggatgcgagttcttgaagaatcttgccttaatgggtgtctcctgcagctccaagggaaaggtaactataacagatgacgatgtcatcgagaaaagcaatctgagccgccaatttctattccgtgactggaacattgggcaagcaaagtctactgtagctgcagccgctgccattgctatcaatcccagcttacaaattgacgctcttcaaaaccgtgcttctccagataccgaaaatgtgttccatgacacattctgggatggtttggatgttgtcatcaatgcccttgataatgtgaatgctaggatgtatatggacatgaggtgcctgtacttccagaagccactactggagtcagggacattgggcgcaaagtgcaatacacaaatggtcattcctcaccttactgaaaattatggagcttcaagagacccacctgagaagcaggcacccatgtgcacagtccattcttttccacacaacattgaccattgcttgacatgggcccgttcagagtttgagggtttgctagagaaaacaccaaatgaagtaaactcttttctgtctaatcctgctcaatatgctgctgtcatgaggaaggcaggtgatgcccaagcaagggaattacttgaacgcgtctccgaatgtcttgacaaggagcgatgcaatacatttgaggactgtataacttgggctcgattgagatttgaggattatttctcaaaccgcgtgaagcagcttacattcacttttcctgaagatgctgctactagcacaggcactcctttctggtcggccccaaagcgctttccccgccctctgcaattttcagccactgattcatctcacatcaacttcctcatggctgcttcaatactgagggcggagtcatttgggattgctatacctgagtgggcaaagaacactagcaagctggccgatgcggtcaataaggttgcagttcctaaatttgagccaaagaaaggggtgaatattgtgacagatgagaaggctactaacctttctagcgcctcagttgatgatgttgctgttattaatgatcttttggcgaaactggaagaatatgccaagggcctgccaccagggttccaaatgaaacctatccaatttgagaaggatgatgatactaattttcacatggatttaatagctgggcttgcaaacatgcgcgcaaggaattacagcattcctgaggttgacaagttgaaggctaagttcatcgccggaaggatcatcccggccatcgcaacttcaacagccatggccacaggtctagtgtgcctggagctgtacaaggtcattgctggggagcaccccatggaggactaccgcaacacattcgccaacctagctatacctctgctgtctatggcggagccggttggggccaagctgatgaagcatcaagatatgaggtggaccgtatgggaccggtggactatcaggggcaacctgactgtggcggaactgctgcagtggttcagtgacaagggcctcagcgcctacagcatgtcctgcggcacctgtctgctgtacaacagcatgttcgcgaggcacaaggagaggctgcagaggaaggtggttgatgtcgccagggaggtggccaaggtggaggttcctgaataccggaggcacatagatgtggtggtagcatgcgaggatgacgatgggaatgacattgacattcctctagtctcggtgtacttccgatagtctccctctatctgcacatacaaagtcaagtctattatgtcgtccaagagaacacattcggtcatctggaacgataaacagacgatggactgcattcaatcaaattcccatgccaagggctaatttgggaacctattttttaaggcatttc

SEQ ID NO: 142386 - DNA, 2226 bp, Zea Mays
catggagggagtttcaggaggtcaccatgtccatgtggttctccgtcggtcttaaaatggtggtgttttgtcacgtacaaaataagggagttatttgtagttcaatagacaaacgttcatgacttggtccccaatcccattttaattaaagcgtcgtgttacacaagtcaaccaaagtcaatcgccgcgcttaatttgctctcgcccgcccgcccgctacgtctcccatttccttattaaaaagaaccaaatctatccatgcatgaaagcatctcgtctccatggacaccagcggcatcgtcgggtccgtggacgggcacaggcccgcggcgagcggcgcggtggcctgccctgcatccggcgtttcaggcttcatcacgtccaccggcggcggcggggagcctcctcctagggacgcgaccctgggccggcacctggcgcggcggctggtgcaggtgggcgtgagcgacgtgttcgccgtgccgggggacttcaacctgacgctgctggaccacctgatcgcggagcccggcctccgcgtggtcggctgctgcaacgagctcaacgccgggtacgccgccgacgggtacgcgcgcgcgcggggcgtgggcgcctgcgttgtcaccttcaccgtgggcgggctcagcgtgctcaacgccatcgccggcgcctacagcgagaacctgcccgtggtgtgcgtggtgggcgggcccaactccaacgactacggcaccaaccgcgtcctccaccacaccatcggcctcccggacttctcgcaggagctgcggtgcttccagcccgtcacctgccaccaggccgtcgtcaacaacctggaggacgcgcacgagcagatcgacggggccatctccacggcgctcagggagagcaagcccgtctacatgagcgtcagctgcaacctgccggggctgccgcatccgacgttcgccacggaccctgtgccatacttgctggcgccaaggcctagcaacctgacgggtctcgccgccgccgtcgaggccaccgtgtcgttcctcgacaaggccgtgaagccggtggtggtggccggccccaagatccgcgtggccaaggccgccgccgccttcgtggagctggcggaggcgagcgggtacgcggtggcggccatgccgtcggccaagggcctggtgccggagacgctgccgcggttcctgggcacctactggggcgccgtgagcacggcgttctgcgccgagatcgtggagtccgccgacgcctacctcttggcgggccccatcttcaacgactacagctccgtgggctactccatcctgctcaggaaggacaaggcggtggtggtgcagccggaccgcgtcaccgtcggcaacggccccaccttcggctgcgtcatgatgagggacttcctgtcggcgctggccaagcgcgtgcgccccaacaccaccgcctacgacaactaccggaggatcttcgtccccggcgggcagccgcccgagtgcgaggccggcgagcccctccgcgtcaacgtcctcttcaagcacatccagaggatgctcagcggcggcagcgccgtcatcgcggagacgggagactcgtggttcaactgccagaagctgcggctacccgacggctgcgggtacgagttccagatgcagtacgggtccatcggctggtcggttggcgcgctgctcggctacgcccagggcgcccccgacaagcgcgtcatcgcctgcatcggcgacggcagcttccaggtgacggcgcaggacgtgtcgacgatgctccggtgcgagcagaggagcatcatcttcctcatcaacaacggcggctacaccatcgaggtggagatccacgacgggccctacaacgtcatcaagaactgggactacacgggcctcgtcgacgccatccacaacggccaggggaggtgctggaccgctagggtggccacggaggaggagctcacggcggccatcgccacggccaccggcgacgacagaaaggactgcctctgcttcatcgaggtggtggtgcacaaggatgacaccagcaaggagctcctggaatggggctccagggtctccgccgcaaactccaggccacccaacccgcagtagcttccttgtgtcatcatgaaataaatgaatgaataatagatcaaagtggatggcgaagtactagtatattgttaacagggaaaaccaaatattgctaggagcaaagtaaaaaaaa

SEQ ID NO: 142387 - DNA, 2969 bp, Zea Mays
ttttctgcattcgacgccgccgcaggcccgcagccagctcgagcccaaaggagagaacccaggttggcggcggcgctccggcggcgatggactccccctacgctctccacctcgccatcgccgcgctcgtcggcgcctccttcgccgccgcctccgcctactacatgcaccgcaagaccctcgaccagcttctccgtttcgcccgcgaccagcagcgccgccgcaaccgcctcctccccgaaggcgacgaactggaggacggcgaagaggaccctccgccgcactgggatcatgatcgccgcaccctgcccatcccgccgggcctcccgccgctccacaccggccgagagggtaggccagttgtttctccaggttcgactaaaagagttggacctattgttagaccgactacacccaaatcctctgtccccactatcagtgcatttgatagaattgaagattcagatgacgaggaggatcttgtcccagatgccaagaatgatactgcttacttgaccccaaatggtgctattggatcagatctcacagataaagcgagccagaatggggaattaacatcagcaccatcaacgcagatgattagatcccatagtgcaactggcagcctgcatgtaccccagcttaacccaatagcagctgatatacttcgaaaggagcctgaacatgaaaccttcagtaaaatcaatatcacagctgttgagactccttctcctgatgaaattgaggcatacaaagttcttcagaaatgccttgagctgcgtcagaggtacatattcagagaagaagttgctccttgggaaaaagagatcataactgatcctagtactccaaagcctaatccaaatccgttcagttatgaacatcaggctaaaaccgatcaccatttcgaaatggttgatggcgtcattcatgtgtaccccaataaagattctaaagaaagactctatccagttgccgatgcaactaccttctttactgatatgcactacgtccttcgtgtgttggctgctggggatatccgaaccgtgtgtcatcaccgtttaaatcttctagagcaaaaatttaatcttcacttgatggtcaatacggatagagaactgcttgctcagaaagctgcacctcaccgggacttctacaatgttaggaaggttgatactcatgttcatcactcagcatgcatgaaccagaagcacctgttgagatttatcaagtctaagttgaggaaggaacctgatgaggttgtaatctttagagatgggacctatttgactcttaaggaggtttttgagagtttggatttgacagggtatgacctcaatgttgatctcttagatgttcatgctgataagagtacatttcatcgttttgacaagttcaatctgaaatataatccatgtggtcaatctcgcctgagggagatatttttaaagcaggataatcttattcaaggtcgcttccttgctgagctgacaaaagaagtattttctgaccttgaagcaagtaaatatcagatggctgagtatcggatatctatttatgggaggaagaaaagcgaatgggaccaaatggcaagttggatagtgaacaatgaattatatagcgagaatgttgtttggttaattcagattcctcggatatacaatgtatacagggagatgggcacaatcaattctttccaaaacctccttgacaatatttttctccctctttatgaagtaactgttgacccagcttcacatcctcagctccatgttttcttaaaacaggttgttgggttggatttggtggatgatgaaagcaaacctgaaagacgcccaacaaaacacatgccaacacctgagcaatggactaatattttcaatccagcctatgcgtattatgtgtactattgctatgccaatctgtatacactgaacaagcttcgtgagtccaagggcatgacaacaatcaaacttcgtccacactgtggggaggctggtgatatcgatcaccttgctgcagcatttcttacttcacataacattgctcatggggtgaacctaaagaaatcccctgtacttcagtacctgtattatcttgctcagattggtctagcaatgtctcccttaagtaacaactcactgtttatcgactatcatcggaaccctttcccaacatttttcttaaggggtcttaacgtgtctctttcgactgacgaccctctacaaattcacctgacgaaggaacctttggttgaagaatacagtgttgctgcttcactttggaagctgagctcatgtgacttgtgtgaaatcgctagaaattctgtctaccagtccggattctctcacaggctcaagtctcactggatcgggagaaactactacagaaggggtccggagggcaatgacatccaccagacaaatgttcctcacatcagggttgaatttcgacacactatctggaaagaagaaatggagctgatacattttggaaatgttaacctacccgaagaagttgacaggtgaagagcaggggaattgcagtgaagtctggcggtggcggcaaggggacgagagaatgtgtcaacacgagagactcgtttgcttgcagaggaggtatcatgacaatggatgtcgccaagtcctccgtgtcgaccatatatatatgaagaataataagaaaacacaaatacccaagtatttagaagcgttgaatccagatgtggcatgaggtcggagccaacgtgtacttgcatacgttacgtttatatacatgtactgctctgctgtaatggtgtttcgacgaatgtgtcttgtcattaatgttttgttaggctcgttccaggcttctgctgatatatacgttacgttcaggcccgaactaggtttgggttttcgctttcgctactcgtaggaaatgtttaagtaccggacttcatgctatagggatactagctcagatggctc

SEQ ID NO: 142388 - DNA, 2869 bp, Zea Mays
cattcgacgccgccgcaggcccgcagccagctcgagcccaaaggagagaacccaggttggcggcggcgctccggcggcgatggactccccctacgctctccacctcgccatcgccgcgctcgtcggcgcctccttcgccgccgcctccgcctactacatgcaccgcaagaccctcgaccagcttctccgtttcgcccgcgaccagcagcgccgccgcaaccgcctcctccccgaaggcgacgaactggaggacggcgaagaggaccctccgccgcactgggatcatgatcgccgcaccctgcccatcccgccgggcctcccgccgctccacaccggccgagagggttgtaggccagttgtttctccaggttcgactaaaagagttggacctattgttagaccgactacacccaaatcctctgtccccactatcagtgcatttgatagaattgaagattcagatgacgaggaggatcttgtcccagatgccaagaatgatactgcttacttgaccccaaatggtgctattggatcagatctcacagataaagcgagccagaatggggaattaacatcagcaccatcaacgcagatgattagatcccatagtgcaactggcagcctgcatgtaccccagcttaacccaatagcagctgatatacttcgaaaggagcctgaacatgaaaccttcagtaaaatcaatatcacagctgttgagactccttctcctgatgaaattgaggcatacaaagttcttcagaaatgccttgagctgcgtcagaggtacatattcagagaagaagttgctccttgggaaaaagagatcataactgatcctagtactccaaagcctaatccaaatccgttcagttatgaacatcaggctaaaaccgatcaccatttcgaaatggttgatggcgtcattcatgtgtaccccaataaagattctaaagaaagactctatccagttgccgatgcaactaccttctttactgatatgcactacgtccttcgtgtgttggctgctggggatatccgaaccgtgtgtcatcaccgtttaaatcttctagagcaaaaatttaatcttcacttgatggtcaatacggatagagaactgcttgctcagaaagctgcacctcaccgggacttctacaatgttaggaaggttgatactcatgttcatcactcagcatgcatgaaccagaagcacctgttgagatttatcaagtctaagttgaggaaggaacctgatgaggttgtaatctttagagatgggacctatttgactcttaaggaggtttttgagagtttggatttgacagggtatgacctcaatgttgatctcttagatgttcatgctgataagagtacatttcatcgttttgacaagttcaatctgaaatataatccatgtggtcaatctcgcctgagggagatatttttaaagcaggataatcttattcaaggtcgcttccttgctgagctgacaaaagaagtattttctgaccttgaagcaagtaaatatcagatggctgagtatcggatatctatttatgggaggaagaaaagcgaatgggaccaaatggcaagttggatagtgaacaatgaattatatagcgagaatgttgtttggttaattcagattcctcggatatacaatgtatacagggagatgggcacaatcaattctttccaaaacctccttgacaatatttttctccctctttatgaagtaactgttgacccagcttcacatcctcagctccatgttttcttaaaacaggttgttgggttggatttggtggatgatgaaagcaaacctgaaagacgcccaacaaaacacatgccaacacctgagcaatggactaatattttcaatccagcctatgcgtattatgtgtactattgctatgccaatctgtatacactgaacaagcttcgtgagtccaagggcatgacaacaatcaaacttcgtccacactgtggggaggctggtgatatcgatcaccttgctgcagcatttcttacttcacataacattgctcatggggtgaacctaaagaaatcccctgtacttcagtacctgtattatcttgctcagattggtctagcaatgtctcccttaagtaacaactcactgtttatcgactatcatcggaaccctttcccaacatttttcttaaggggtcttaacgtgtctctttcgactgacgaccctctacaaattcacctgacgaaggaacctttggttgaagaatacagtgttgctgcttcactttggaagctgagctcatgtgacttgtgtgaaatcgctagaaattctgtctaccagtccggattctctcacaggctcaagtctcactggatcgggagaaactactacagaaggggtccggagggcaatgacatccaccagacaaatgttcctcacatcagggttgaatttcgacacactatctggaaagaagaaatggagctgatacattttggaaatgttaacctacccgaagaagttgacaggtgaagagcaggggaattgcagtgaagtctggcggtggcggcaaggggacgagagaatgtgtcaacacgagagactcgtttgcttgcagaggaggtatcatgacaatggatgtcgccaagtcctccgtgtcgaccatatatatatgaagaataataagaaaacacaaatacccaagtatttagaagcgttgaatccagatgtggcatgaggtcggagccaacgtgtacttgcatacgttacgtttatatacatgtactgctctgctgtaatggtgtttcgacgaatgtgtcttgtcattaatgttttgttaggctcgttccaggcttctgctgatatatacgttacgtt

SEQ ID NO: 142389 - DNA, 682 bp, Zea Mays
gtgggtcatggatggattttctaacactgtctggtgtctgctctagtctcactggatcgggagaaactactacagaaggggtccggagggcaatgacatccaccagacaaatgttcctcacatcagggttgaatttcgacacactatctggaaagaagaaatggagctgatacattttggaaatgttaacctacccgaagaagttgacaggtgaagagcaggggaattgcagtgaagtctggcggtggcggcaaggggacgagagaatgtgtcaacacgagagactcgtttgcttgcagaggaggtatcatgacaatggatgtcgccaagtcctccgtgtcgaccatatatatatgaagaataataagaaaacacaaatacccaagtatttagaagcgttgaatccagatgtggcatgaggtcggagccaacgtgtacttgcatacgttacgtttatatacatgtactgctctgctgtaatggtgtttcgacgaatgtgtcttgtcattaatgttttgttaggctcgttccaggcttctgctgatatatacgttacgttcaggcccgaactaggtttgggttttcgctttcgctactcgtaggaaatgtttaagtaccggacttcatgctatagggatactagctcagatggctcagattttatgtccagccctattattta

SEQ ID NO: 142390 - DNA, 4147 bp, Zea Mays
gcagatcatgttgagggcgtccatgcggatgttggggacgatttcgacaatctcatcctcagccacgaactccacctgcagcacagacaggacaggtccaaacattccctttgacgaagatagtctagtccctgcctgtgattgtggaagggatggggttggttacctcggagggcgagaagatggagaggtgcgggtcggactgccccgccatgaatgccccccactggaacgccgggactcgtgagagagagcaatggaggcgctgctgcgggtcggaggcggcgaggcgagagcgaggtcgacggagagaggaggctacaggtcgctgggactctctaaactacagcccaatctgagtgcccgaaagcccatccaacaacagagcccaacagccgcttcacgcagcttcagttcgatttggtcgggtcgcggcagcgcacggcgggtgaggcagcggcgaggcggggcggcggggcgccgcggttgcctttctcgctgctcctgcagtcctgctcgctcagcgccgggacccgggagaggttattagggtttccttctcatcaactttagccccagcagcaacacagccagcagaagagggcgggcccgatgctggccgcccggaacccccctccgccgccccatgacatcgccgcgcgcctccaccacctgcgcgacctccgcagggtgccgctccccaaccgcgtcgcgcgcatcgccgacctccacaccgatgaggccagccccgtgcgcaagcttgttgccgagatcatcggtgagcttgggtcaaaacacatgaggtatctacctgatatgatcccttgtttgctgcaccttctgaatgatgagacgcctgcagtcgtcaggcaagctgttaagacaggaaccaacttgtttgccaaagtactccaaaagctagctatccagggtttattctccaatggagggattgatgatgcacttaaatcatcatgggaatggctgctcaagttcaaatcaggtgtctcgcacatggcatttcaggccaccggcaatgaaggtgtcaggttactggctattaagtttgttgaaaaaacagttcttatgtacacaccagatcctgatgtcccatctgatccgccaactgaaacaacagaagatatggcattcaatgtagcttggttacgaggaggtcaccctttgcttaatgttggggatctggccatggaagccagccagagtcttggattgttgctagagcagctcaagtctcctaaagtaaagtcactcagtacttccatgatcattgtcttcgttactagtctctcagctattgcccaaagaaggccttcattttatggacgcatattgccagttttactttccttggatccagcaagttctattattaaattgagagtcccgggcgcattccatgccttgaagagtgccttctctgcatgcctgaaatgcacacattcaagtgctgagccgtggcgagcacgcctattggaagctcaaaatattatcaaccaagggggttcaatagaagatgcagcaaatgctgctaagaatttcggggacacttcaaacagggaagaatcgtggcctctgatggagagaagcactgacggtagtaacaagcgtagtctggctgaagacatgaatcatgtgacagaggatgatgtccactccactaaaagagccaggcaatcaattgatgctaatgaacatagtgaagaggcaaacaagacaaattttgagtcgatgtctgttgatatctcatctagccagcccagctctataagaactgggaattcagaagctgtgtatcaattaattggtatgtttgctgcactagctgcacaaggtgacagagcagctggatcactgcaaatcctttcatacagtatcgctagtgacttactagcggaggtggtaatggttaacatgcaacatctcccaatctctcgtcctgaagttgaccaacagcagcttccttctacgagctctggagatggacttccactttcaagtttctcctctctgctggggattctgctgaagggagcgaaccaaattgatcaagatgaagtgtctccagctaaagaacctgcgctggtgtcgtcagttgcagatgacagaatgatacttcctgctaattcacctgttcctagctcagtaaatctacctatcgaagagaacagtaacagtccaacagttccattatgtatagaaacaacagaggccaaagtaaccagtgcaggtggcaatagttcgattgatattccagaatcatcagaagcttcccatgcctcaacagagccccagggaacccaagagcatgctagcacttttgccggtccatttcctgctgataatttctcagttggatttagtttggcacaatcgtcagaaactcgcagcccaagctcttctacattggaagcaaaccactcacagctttcatcccttagttcacaatatgttcttccaaagttggttgtcaataatattgatctcagtgatgaggccaaagatctccttcaaaaagaggcgtttgtgcggattcttgagagtgataagaaagaagcatctggtggttcaattgctcgccttccgttgcttgctcacctgggtgttgagtttcctctggaatttgatccttgggtgattcttcaaaagcacattctctctgattatgcgaataatgaggggcacgagttgactatatgcatcctgaaccggctatatcatgaggcagagcaggatcacgatttcctttcatctagaactgctacatcagtttacgaatcctttcttctaaacatagctgaaaatcttcgagacatgtttccagcttcagataagtcacttggcaaattgctttgtgagataccatacttaccagaaggtgtgctgaaactgcttgaaagtttatgttctcctggaagtaatgagaggcaggacaaggatattcagagtggtgatagggtaactcaaggtctcagtgctgtctggaaccttatcatgctaagaccttcaaatcgggacagatgtctggagattgctttgcagagttcaactcatcatctagaggaggtccgcatgaaggcaatacgtttggtggcaaataagttatttcctatgacaagcatttccaaaaagattgaagattttgcaaatgaaaaacttaattcagtgctggaaatgactccatctggtgattgtgtaactactgaaatggctacacctgaagcacacaaagatattggtttagaaaacttaacagcttcagtaacaggcatgcagactctgatgtctctatactttgcattgtgcaccaagaaacattcccttctcagacatgtatttgcaatatatggtaatctaccgcaagctgccaagcaggcagttcatcaacaagtaccaattctgatacgcactataggctcctcctctgatcttcttggaatcatctcagatccaccagctgactgccgggacctcctcatgcaggttttacaaaccctcactgatgctgcggttccatctaaagatctgatttcttccataaagatcttatattctaaaacaaaggatgttgagttcctttttgcaatcttggttcatctaccaaaagatgaggtcctgcctgtgttccccagtattgttaatcttccaatagacaagtttcaaagtgccatttcccgaatcttgcagggatcacctcggaatggcccttcacttgatccatcagaaattttaattgcaattcatgtaatagctcctgataaggaaggaataccactcaaaaaggttatggatgcatgctcttcttgctttgagcaaagaacaatatttacccagcaagttctggcaaaagcactaaatcaactggttgaacagattcctcttcctttgctattcatgaggactgtcatgcaagcaataggtgtttttcctgcattggtgagttaattagatgactcacattgtgtcttactaaccttggcagtgttcttaaggcgtctagatgagcaagtgcaccagacaaccaccttagcgcctaggcaggtaaggcgagcatggcgtccagttttgcccgagcgcttggacgcctaagcgtcgcctaggcgacgccttaagaacaatgaaccttgga

SEQ ID NO: 142391 - DNA, 103 bp, Zea Mays
aaaatgccaagtttgcccagctcaagaggcctacaaacattcccccagccacatggcaatgtccaccttttgcgtaatttcgacctctccaaagaaaccctca

SEQ ID NO: 142392 - DNA, 1430 bp, Zea Mays
tgacatgatcctagcattccttgatttgtaattgaaaagtaaggctcatgctgccacttgatctacctaccataaagctttgtagggtacactacactcccttgttctccttcatgcatccccattccattggaaagcatatgttgatggtttcttgttagtaacagtcgtgggcatactttagatgaccctgaacccaagtagtgtgtccatggctccatgcagatgggcggcggtctcaccacaacggcagggataaggatggagatagtaactcatgatctatttcttgcttaaccgaaaagagatataatcccatccttttataaatagggtcactaggctcataaaataaaccaatctctagaatcaatgaatcaactcaatctaatcttatctctaaatgaattaatttaagcctagtgcgcctggggctggccctagcatggcctggagctgctccatttcatggggccctaatggggcacatgacagtcatatgatgctcgagaagcaagaattgttcattgatgcttatctcttgctcttggttttggtgaaggcaccagattctactggaaaaatgtaaccaagaaatatggaaaggcatgaacggttgagacaagcaaggatccatggattaaagcctgccagaacaaatttgctaatatgaatcctattgatttcacgtagaaatccagtgtttgcagtttacaatcacgaaaagctgttaatatatcagtgtcttggaggcatcatttctcagttttagtagattcgatttgatgcatatgactttggagtctgatgttgagcctttctcgcaggtggattttgtgatggagatcatgtcacgccttgtgagcaagcagatttggaaatatcccaagttatgggtaggatttctgaagtgtgctatcttgacaaaacctcagtcatatggtgtgttgctgcagttaccagctcctcaacttgagaatgccttgagtaagaacccgacactgaagacgcccttggctgagcatgccgagcagccaaatattcggtcgacacttccaaggtctactttggtggttctgggtcttgctgaagatcaaccacagcaaccagcagtaacacaggtgcagagcagccaaaaccaggctgcggaaaccagtagctctgctgctgatacggctacagaagtaactcaggaatcttctggtgctagctaacatcttttatgccgaaatgggctaatgcttgcaggttgtgtaccatatgtctcttgagggtctaagatgtgtttttctgtgtgatgcgtctcattggacgggtgttagctgctgcatctggacgcctaaatgagaactaagttatttagttgctgggggtaattctaattttcggtggtgcacagggaccattgtaaagtaaagaggttaacatta

SEQ ID NO: 142393 - DNA, 1999 bp, Zea Mays
tgacatgatcctagcattccttgatttgtaattgaaaagtaaggctcatgctgccacttgatctacctaccataaagctttgtagggtacactacactcccttgttctccttcatgcatccccattccattggaaagcatatgttgatggtttcttgttagtaacagtcgtgggcatactttagatgaccctgaacccaagtagtgtgtccatggctccatgcagatgggcggcggtctcaccacaacggcagggataaggatggagatagtaactcatgatctatttcttgcttaaccgaaaagagatataatcccatccttttataaatagggtcactaggctcataaaataaaccaatctctagaatcaatgaatcaactcaatctaatcttatctctaaatgaattaatttaagcctagtgcgcctggggctggccctagcatggcctggagctgctccatttcatggggccctaatggggcacatgacagtcatatgatgctcgagaagcaagaattgttcattgatgcttatctcttgctcttggttttggtgaaggcaccagattctactggaaaaatgtaaccaagaaatatggaaaggcatgaacggttgagacaagcaaggatccatggattaaagcctgccagaacaaatttgctaatatgaatcctattgatttcacgtagaaatccagtgtttgcagtttacaatcacgaaaagctgttaatatatcagtgtcttggaggcatcatttctcagttttagtagattcgatttgatgcatatgactttggagtctgatgttgagcctttctcgcaggtggattttgtgatggagatcatgtcacgccttgtgagcaagcaggtccttgattctttttgccttttaattgaagatattagccacggttcttttttacatatttctgaaactggaccctcacttgccatggtagatttggaaatatcccaagttatgggtaggatttctgaagtgtgctatcttgacaaaacctcagtcatatggtgtgttgctgcagttaccagctcctcaacttgagaatgccttgagtaagaacccgacactgaagacgcccttggctgagcatgccgagcagccaaatattcggtcgacacttccaaggtctactttggtggttctgggtcttgctgaagatcaaccacagcaaccagcagtaacacaggtgcagagcagccaaaaccaggctgcggaaaccagtagctctgctgctgatacggctacagaagtaactcaggaatcttctggtgctagctaacatcttttatgccgaaatgggctaatgcttgcaggttgtaagccatctatcattttcatctctggagtgatgttggtgattgatgaaatgggctaacgcttgcaggttgtgtaccatatgtctcttgagggtctaagatgtgtttttctgtgtgatgcgtctcattggacgggtgttagctgctgcatctggacgcctaaatgagaactaagttatttagttgctgggggtaattctaattttcggtggtgcacagggaccattgtaaagtaaagaggttaacattatatatcatccttaaataggaaaagggcaaacaagtgtttgttgaagctgtagctcaaacagtccctacttattccatgagttgtttcaggctaccaagggggctggctatgtcaagcaaccaatgcaatgattcgaaaattttagtggagcagtaaggaagggaagagattctaaatttaggggactacgttttcttgatgtagccctatgaattagaccgccacaaatgtggagagctatacttgatggacttgacgttcttcagcaaccccaagggatggagctttatggccaacccccccagatgtgttagtgaattaatagaagatggtatatctatgaaatggcgacttgacgtgattcaaaagtacttatataatatggatgctaagatatattcctttat

SEQ ID NO: 142394 - DNA, 2264 bp, Zea Mays
tgacatgatcctagcattccttgatttgtaattgaaaagtaaggctcatgctgccacttgatctacctaccataaagctttgtagggtacactacactcccttgttctccttcatgcatccccattccattggaaagcatatgttgatggtttcttgttagtaacagtcgtgggcatactttagatgaccctgaacccaagtagtgtgtccatggctccatgcagatgggcggcggtctcaccacaacggcagggataaggatggagatagtaactcatgatctatttcttgcttaaccgaaaagagatataatcccatccttttataaatagggtcactaggctcataaaataaaccaatctctagaatcaatgaatcaactcaatctaatcttatctctaaatgaattaatttaagcctagtgcgcctggggctggccctagcatggcctggagctgctccatttcatggggccctaatggggcacatgacagtcatatgatgctcgagaagcaagaattgttcattgatgcttatctcttgctcttggttttggtgaaggcaccagattctactggaaaaatgtaaccaagaaatatggaaaggcatgaacggttgagacaagcaaggatccatggattaaagcctgccagaacaaatttgctaatatgaatcctattgatttcacgtagaaatccagtgtttgcagtttacaatcacgaaaagctgttaatatatcagtgtcttggaggcatcatttctcagttttagtagattcgatttgatgcatatgactttggagtctgatgttgagcctttctcgcaggtggattttgtgatggagatcatgtcacgccttgtgagcaagcagatttggaaatatcccaagttatgggtaggatttctgaagtgtgctatcttgacaaaacctcagtcatatggtgtgttgctgcagttaccagctcctcaacttgagaatgccttgagtaagaacccgacactgaagacgcccttggctgagcatgccgagcagccaaatattcggtcgacacttccaaggtctactttggtggttctgggtcttgctgaagatcaaccacagcaaccagcagtaacacaggtgcagagcagccaaaaccaggctgcggaaaccagtagctctgctgctgatacggctacagaagtaactcaggaatcttctggtgctagctaacatcttttatgccgaaatgggctaatgcttgcaggttgtgtaccatatgtctcttgagggtctaagatgtgtttttctgtgtgatgcgtctcattggacgggtgttagctgctgcatctggacgcctaaatgagaactaagttatttagttgctgggggtaattctaattttcggtggtgcacagggaccattgtaaagtaaagaggttaacattatatatcatccttaaataggaaaagggcaaacaagtgtttgttgaagctgtagctcaaacagtccctacttattccatgagttgtttcaggctaccaagggggctggctatgtcaagcaaccaatgcaatgattcgaaaattttagtggagcagtaaggaagggaagagattctaaatttaggggactacgttttcttgatgtagccctatgaattagaccgccacaaatgtggagagctatacttgatggacttgacgttcttcagcaaccccaagggatggagctttatggccaacccccccagatgtgttagtgaattaatagaagatggtatatctatgaaatggcgacttgacgtgattcaaaagtacttatataatatggatgctaagatatattcctttatatatgtcggcaagatgattttttttttgcacgacatcgtaaaagatgtggtatattctctgttgaatctgattacagaatgcttgtttataatcagaatcaaatacaggattggctggatggcagagtagatacttcagataatgaagccggtgaagttcttaaagaaaggtcaatgagtcgatgaaagtgggttcaatataggccaatttgatgaacacaggcattgaattatactagattaggctgctgaatagcgtaatacctacatccatttaggtgtgttttcttgttagcgtgctattgtaatgtctatattgtaatgggtctcgacccaccaaactttgttatattaatgcactcccaatcttgattaggattagggttttcaatatgttataaagctagattctctcttccccctttca

SEQ ID NO: 142395 - DNA, 390 bp, Zea Mays
cccagatcacatctattggagcacatacacaacatcttttagcaatatatgcatggataccgtattttgtagagcacaggccacagcacactacacaagagcatgcactaaagcggcttcactagcctcgtgacaatcaaataaaaaaacataatagagagatccacagctgtgcaattactaggcaataccaaaaaaaagttgctagcataagaggaagcacatcatgctacataatctaatctactatcaacataaacaacaaactccgggtcgacaatcagtcaaatggatgcatgtaaccacagaaagcctaaaatttgctcactcaactcagtgactactgtgacctggtcagtaaagtcagtgacaccaacttatgctccgttg

SEQ ID NO: 142396 - DNA, 106 bp, Zea Mays
tgtcactattcatgttttgtcattcccgttctgccaccattaccatttcttgttctgcgtttctcattctcatgttctgtcattcccattttttccccctctccgc

SEQ ID NO: 142397 - DNA, 100 bp, Zea Mays
ctccccctgccccactctccttacaagggaatatttgggattgggtcatgcatcccatagactgcattcaatagatctcattgggactgacgagtcatag

SEQ ID NO: 142398 - DNA, 2813 bp, Zea Mays
acgaggagggagcccttgaaggcaaaccaatgcgcaccgccgcttattcattaaccaaagacttgcatccaaccaatcccaccacttgtgtctacctcttcgagtcaggctgatgggaggtgcctgtcagcaactctccgtggacggagatgcgaggacgcctgcgaatgaccgcgatccggccggcctgctccagcatgatgatacggaaaaccagcagcagcagcaggcctgctgggagcgcttcctcctcaaggagactctcaacgtcttgcttgtggagagtgatgattcaaccaggcaggtcgtcagtgccctgcttcgttgctgcatgtaccaagttatctctgccgaaaatggccagcaagcatgggcttatcttgaagataagagaaacaacatagatcttgttttgactgaggtttttatgcccggtgtatctggtatttctctgctgagtagaatcatgagccacaatatttgcaagaacattccagtgattatgatgtcttcgagtgatgctatgagtacagtctttaaatgtttgtcaaaaggtgctgttgactttttagtcaagcctatacgtaagaatgaacttaagaacctttggcagcatgtgtggagacaacggtgtcacagttggtagtggaagtgaaagtggcattcagacgcagaagtgtaccaagtcaaaaggtgccaatgaatccggtaacaacagtggtagcaacgacgatgaagctggcatgggacttaatgcaagggatgacagtgataatggcagtggcactcaagcacagaactcatggactaagcttgctgtggagatcgacagtccacaagctatgtctctggaccagttagccgatccagccaatagcacctgtgcacaagtaatccactcaaagtcagagatatgtagccacagatggctaccaggtagcagcaacagaaactgcaagaagcaaaaatacactaatgatgactttaagggaaaagacttggagatagatggtcctggaaatctatatatggatcaccaatcttccccaaatgagagacccatcaaagcagcagatcatgaaaacaattccaaggagtcaatgatgggaaatttaggggatgcaactgttcgagctgctgacctaattggttcaatggccaaaaacatggatgcccaacaggcagcaagagctgcagatacccctaatttctcttctgaagtgccagaagggaaaggtaagaatgatgactttaagggaaaggacttggagataggtggccctagaaatttatatatggatcaccaatcttccccaaatgagagacccatcaaagcagcagatcatgaaaacaactccaaggagtcaatgatagaaaatttagaggagccaactgttcgagctgctgacctaattggttcaatggccaaaaacatggatacccaacaggcagcaagagctgcagaagatacccctaatttctcttccaaagtgccagaagggaaagatggtgccaacgatacagtcaatgacgatgaacagcggaatagtgcattaaggcgatcgaatctctcggcttttacaaggtaccatacatctgcggcttccaatcaaggtgggacaggattggtaggtagctgttcgccgcatgataacagctcggaggctgtgaaaacggattctacttacaacatgaagtcaaattcagatgctgccgcaataaaacaaggctccaacggcagtagcaataacaatgacatgggttccactacaaaggatgttgtgacaaaacccagcacaaataacgagagggtgatgttgccctctgctattaaggctaatggatacacgtcaacattccatcctgtgcagcagtggatggttccagataatgcgacagcagggaaagcgaaggctgatgaagtggccaacaatgcaggcagaaatagtcatcctggtgacgtgcagagcaacctgacgcaacaacatcgtccaacccttcattacgtccattttgagaatagtggatcaggtgccctgcaatgtggttcctccaatgtatttgatcccccacttgaaggccaggctaccaataactatggtgtgaaagccgggagcaactcaggcagcaacaaggggcagaataatgggagtacagctggtgcgagcacggctgctgcaaatgctggacggacagatacagagatacgggctatcgataaaagtggacctggaggtggcagtgggagtggcaatgacacatatgtcagacggcttgctgcgagcatgacaccacgacaagaacagctaaagaaatatagagagaaaaagaaagatcggaactttgggaaaaaggtgcggtaccagagcagaaagaggctagccgaccagcggccaagggttcgtggacagttcgtgaagcaagctgtgcaaaatcaagagggagatggagagagatgacccccccccccctctggcttcagctcatggttgttagacgtggcggttgatgattcttccttctctggtgtgatctgatatgatcgacaacacaccatccttccttttcttcattggtttcttcacatctagaatttactgcctgaccgggaaaaaataagctaggaacttctatacatgtgtatgcatttctaatcatgtagaagaataagtgtgtcttgactctagataattttaggtagagtcatgctcgctctcctacattatgtgatgtaactgaagtgttgttgtgttgtcatgtatggtcttggatcactttctgtcaatatattactagcccacaactactattaa

SEQ ID NO: 142399 - DNA, 2650 bp, Zea Mays
atatgaatttcatgatttaaatcatattatttttcattaacgggttatgaacaaggtgatctattcttataattcgagatgaactgaattttgtttttctttcttttactttagttacatagtcatgtatcaattatttttgaactaagccatacctattttctgtctctggtttttctgtggtaaggtatcttactgacaggtgggtctaagcccatgtagcactgaaagatctcagtggtgaagttgctatatatatcggaaattaaagcaatgttccccagtggagttgctatgtatatatcaaaattaaagcatgggcacattataacttgtttccttgttaatatttcataaggcacagaactcatggactaagcttgctgtggagatcgacagtccacaagctatgtctctggaccagttagccgatccagccaatagcacctgtgcacaagtaatccactcaaagtcagagatatgtagccacagatggctaccaggtagcagcaacagaaactgcaagaagcaaaaatacactaatggtatgccatgctcaactgatgcactatgcaattttacaaaataaataaacttgctggccattttatctgttatgtttgatgcttgatttcagatgactttaagggaaaagacttggagatagatggtcctggaaatctatatatggatcaccaatcttccccaaatgagagacccatcaaagcagcagatcatgaaaacaattccaaggagtcaatgatgggaaatttaggggatgcaactgttcgagctgctgacctaattggttcaatggccaaaaacatggatgcccaacaggcagcaagagctgcagatacccctaatttctcttctgaagtgccagaagggaaagatgactttaagggaaaggacttggagataggtggccctagaaatttatatatggatcaccaatcttccccaaatgagagacccatcaaagcagcagatcatgaaaacaactccaaggagtcaatgatagaaaatttagaggagccaactgttcgagctgctgacctaattggttcaatggccaaaaacatggatacccaacaggcagcaagagctgcagaagatacccctaatttctcttccaaagtgccagaagggaaaggtaagaatgaccagcatgataattatgttttgccatcacttgagctgagtttgaagaggtcgagatcatgtggagatggtgccaacgatacagtcaatgacgatgaacagcggaatagtgcattaaggcgatcgaatctctcggcttttacaaggtgcaaaacataatatcagtgtcattagtgagttatgaaagcaacagtatgttgggtactaacagttaccacttttattgcaaggtaccatacatctgcggcttccaatcaaggtgggacaggattggtaggtagctgttcgccgcatgataacagctcggaggctgtgaaaacggattctacttacaacatgaagtcaaattcagatgctgccgcaataaaacaaggctccaacggcagtagcaataacaatgacatgggttccactacaaaggatgttgtgacaaaacccagcacaaataacgagagggtgatgttgccctctgctattaaggctaatggatacacgtcaacattccatcctgtgcagcagtggatggttccagataatgcgacagcagggaaagcgaaggctgatgaagtggccaacaatgcaggcagaaatagtcatcctggtgacgtgcagagcaacctgacgcaacaacatcgtccaacccttcattacgtccattttgagaatagtggatcaggtgccctgcaatgtggttcctccaatgtatttgatcccccacttgaaggccaggctaccaataactatggtgtgaaagccgggagcaactcaggcagcaacaaggggcagaataatgggagtacagctggtgcgagcacggctgctgcaaatgctggacggacagatacagagatacgggctatcgataaaagtggacctggaggtggcagtgggagtggcaatgacacatatgtcagacggcttgctgcgagcatgacaccacgacaagaacagctaaagaaatatagagagaaaaagaaagatcggaactttgggaaaaaggtgcggtaccagagcagaaagaggctagccgaccagcggccaagggttcgtggacagttcgtgaagcaagctgtgcaaaatcaagagggagatggagagagatgacccccccccccctctggcttcagctcatggttgttagacgtggcggttgatgattcttccttctctggtgtgatctgatatgatcgacaacacaccatccttccttttcttcattggtttcttcacatctagaatttactgcctgaccgggaaaaaataagctaggaacttctatacatgtgtatgcatttctaatcatgtagaagaataagtgtgtcttgactctagataattttaggtagagtcatgctcgctctcctacattatgtgatgtaactgaagtgttgttgtgttgtcatgtatggtcttggatcactttctgtcaatatattactagcccacaactactattaatttgatgagatgtatataattaaaaata

SEQ ID NO: 142400 - DNA, 1742 bp, Zea Mays
gattcattagcagctccctgcttgccttgcacgtggtgactggtgagttcattcactttgccaagtcatcacgtcagcagcagaccaagaccaacagagacatgggtggaggcagccgcatgcagaccgtgctgttggccccgggcgttaaggacaagaagctgctctcctacacccgccgcaacgcgctcaaggaaaaggacgccgtcaccgacctcatccgctccatcatcgccacgtccagccccgtccagcggaccgccttccacgtcttccgcattgacaacgtcctcgagctctactcggcctggcgccgcggcctccccgacgtgcgcccctactacgccgtcaagtgcaacccggagccggcgctcctcggcgccctcgcggagctcggcgccgggttcgactgcgccagccgcgccgagatcgaggccgtgctcgcgctcggcgtcccgcccagcagcatcatctacgccaacccctgcaagtccgagccgcacctagagtacgccgccgcggccggcgtcaacctcaccacctacgacaccgaggaggaggtcgccaaggtcaagcgctgccacccgaggtgcgagctcctgctccgcctcaagggccccgacggcagcgagaccacgtgcgacctaggcaccaagtacggcgcgcgcgccgacgaggtggtgccgctcctgcgcgccgtccagcgcgcgggggtcaccgtggccggcgtctccttccacgtcgggagccccgtggcccgcgtcggcgtgtaccgcgccgccatcgaggccgcccgcgccgcgttcgacgaggccgccgccctcggcatgccccccatgcgcgtcctcgacatcggcggcgggttcacggccggcgccagcttcgacgacgccgcggccgtcatcaacgacgccctcgcgcgctccttcggcgacctgccgtgcgtcgaggtcatcggcgagccgggccgctacttctgcgagaccgcgttcaccctcgccgcgcgcgtcatcggcaagcgcacgcgcggcgaggtgcgcgagtactggatcgacgacggcctctacggctcgctcaacaacatactcatggaccacaaggtcccgcgcccgaggccgctggccaccccgcgccccggcgacaggacgcacacgtccacggttttcggcccgacgtgcgactcccaggacgaggtggtcaccggctaccagctgcccgagatgagcgtcggcgactggctcgtcttcgacaacatgggcgcctactccacaggttccggctccaagttcaacggcttcgacacgtcggagattaagatctacgtcgcctactccagctgagctagcaatgcatatatcgacggcgcccgccatcatatgcatgcattattacacgtctatatacatatagcccctcgttaaaaaaacataactacgtaccgacgagtagtacaccgtcgatcggtaaagatgtcttacaaataatgagtcggtaaatccacgtttaccagttattacctgtcagttgatggtaaatccacgtttaccctacttctaccttccaaatttctgtcaatatattcgagcattgtttttccttaattcaggtttacttgtgtcatgtgattttatatttatacatgtacgtatgtatcagataaaaggggtgatccacattacatggaaatccgtatttgaatttcagattaattaaataaatgaattggttacactgttccaaag

SEQ ID NO: 142401 - DNA, 915 bp, Zea Mays
aaaacgtctcattctcatccacacgctagtccgcttcacatgcgtgcagggcgcgtctcagcatcggcaagcaaggacaaggcccaagcgcgtctcggcttttggatggagaaggcccgttaaaggcccaagcgcgtagtaaccctaaccctcgccaccggcctccgcctctcctccagagccagccgccgtgcgctctcgctctccctctgtctgcgacgagacttggtgggctaccgccgctgcgcttcgccaggtgctgacgccttcgccgatcacttcgccggcgatagcactcaccaggtagtcccaccctcattctctcccctgtctgctgtgcgaaaccgagatcccaaacttacttgatctatcttctatctggctatttgatctgatctctacttatttctaactgtttgcacaaaaaggccgtacatgtgtgcaccacgtccctttactagatccgcccctgatttgaacaaacatagctataatctgcaggaatgggcctgtggacattgctggagggttttttgcttcttgcaaatgcgttagcgatattgaacgaagaccgcttccttggtccaaggggatggagcatgtctgaagtatcaggaaacgggcaaaccaagtcgttcaagggccagatcgtggggcttatctacgctacacagtttctgcggatgcccttaattgctctcaacgttctcatcatcgttgtcaaattggtgtctggctgagcctgatgaattggtatctgttccacctttatgtaagagctaagagatcccaaagttaattgtactcaaggttgctgtaaatatgctgtttctgtttactctaatgtggatttctgttattgttgtcgtaaattaatttggtcagaaaatgactgtcgatattcatactatccaa

SEQ ID NO: 142402 - DNA, 792 bp, Zea Mays
aaaacgtctcattctcatccacacgctagtccgcttcacatgcgtgcagggcgcgtctcagcatcggcaagcaaggacaaggcccaagcgcgtctcggcttttggatggagaaggcccgttaaaggcccaagcgcgtagtaaccctaaccctcgccaccggcctccgcctctcctccagagccagccgccgtgcgctctcgctctccctctgtctgcgacgagacttggtgggctaccgccgctgcgcttcgccaggtgctgacgccttcgccgatcacttcgccggcgatagcactcaccagctataatctgcaggaatgggcctgtggacattgctggagggttttttgcttcttgcaaatgcgttagcgatattgaacgaagaccgcttccttggtccaaggggatggagcatgtctgaagtatcaggaaacgggcaaaccaagtcgttcaagggccagatcgtggggcttatctacgctacacagtttctgcggatgcccttaattgctctcaacgttctcatcatcgttgtcaaattggtgtctggctgagcctgatgaattggtatctgttccacctttatgtaagagctaagagatcccaaagttaattgtactcaaggttgctgtaaatatgctgtttctgtttactctaatgtggatttctgttattgttgtcgtaaattaatttggtcagaaaatgactgtcgatattcatactatccaagcgggcactttattgggggtgtctttcttttgtacattaatgaattcaagacatatttgcaa

SEQ ID NO: 142403 - DNA, 779 bp, Zea Mays
aaaacgtctcattctcatccacacgctagtccgcttcacatgcgtgcagggcgcgtctcagcatcggcaagcaaggacaaggcccaagcgcgtctcggcttttggatggagaaggcccgttaaaggcccaagcgcgtagtaaccctaaccctcgccaccggcctccgcctctcctccagagccagccgccgtgcgctctcgctctccctctgtctgcgacgagacttggtgggctaccgccgctgcgcttcgccaggtgctgacgccttcgccgatcacttcgccggcgatagcactcaccaggaatgggcctgtggacattgctggagggttttttgcttcttgcaaatgcgttagcgatattgaacgaagaccgcttccttggtccaaggggatggagcatgtctgaagtatcaggaaacgggcaaaccaagtcgttcaagggccagatcgtggggcttatctacgctacacagtttctgcggatgcccttaattgctctcaacgttctcatcatcgttgtcaaattggtgtctggctgagcctgatgaattggtatctgttccacctttatgtaagagctaagagatcccaaagttaattgtactcaaggttgctgtaaatatgctgtttctgtttactctaatgtggatttctgttattgttgtcgtaaattaatttggtcagaaaatgactgtcgatattcatactatccaagcgggcactttattgggggtgtctttcttttgtacattaatgaattcaagacatatttgcaa

SEQ ID NO: 142404 - DNA, 975 bp, Zea Mays
ttccgacctaaccttccttgcgaactccgccaccgcgtccctgcgttatagggccgtcgacgacgacgggttgcgcgtccccgcctcattcgcgcgaccatggacacggacacggacacgacgacgtccaccggctcccgcctccatcccgcggccggacatgtacgctcattggccgcccggggcgccgagagcctcgtcacctgcgtcttcgcgacggtgggcacggtcctcggcgcgatcaccggtggcctcatcggcctggccacggagacgggcgtgctgcgcggcacgggcgtcggcggcatcacgggcgcgctggtgtccatggaggtcgtcgagtcgctgtggcgctccgacgagccggcaatctggagcgtcgtctacgtgctcgatgtcatctggagcttgctcaccggccgccttgtgcgcgagaaggtggaccccgccgtgctcagcgccgtcgagagccagatgagcgcagcggacacaccggccttgcatgcagaccacgccgacatcttcgacacgggcggcaccaacggcatggcgagggtcgccatggacgcgctccccgtcgttaggttcaccgagcgcagcaacgtcgacgccagcggcgagctcatcgcctgttcggtttgcctccaggaattccaagccggcgacagcgcgaggagcctgccggtgtgccgccacacgttccacctgccgtgcatcgacggctggctgctccggcacgcctcctgccccttgtgccgccgcgctgtctaggccgcgcccgttcctctaccctcaaggatagccgccaccagagctgctctgacaagcgacacccgttccttcaggctgtagccgtacgcacactggcagcgtgatttttctgtagctcatcagatgattcagatgggcgttatgtaaacattggttaatttttaacaaatgcaagtggtgcacatggcgatggccacatacata

SEQ ID NO: 142405 - DNA, 800 bp, Zea Mays
attcatttgttcgccgacccgatgctgctgtgctgccactgccagtgggcacggtcctcggcgcgatcaccggtggcctcatcggcctggccacggagacgggcgtgctgcgcggcacgggcgtcggcggcatcacgggcgcgctggtgtccatggaggtcgtcgagtcgctgtggcgctccgacgagccggcaatctggagcgtcgtctacgtgctcgatgtcatctggagcttgctcaccggccgccttgtgcgcgagaaggtggaccccgccgtgctcagcgccgtcgagagccagatgagcgcagcggacacaccggccttgcatgcagaccacgccgacatcttcgacacgggcggcaccaacggcatggcgagggtcgccatggacgcgctccccgtcgttaggttcaccgagcgcagcaacgtcgacgccagcggcgagctcatcgcctgttcggtttgcctccaggaattccaagccggcgacagcgcgaggagcctgccggtgtgccgccacacgttccacctgccgtgcatcgacggctggctgctccggcacgcctcctgccccttgtgccgccgcgctgtctaggccgcgcccgttcctctaccctcaaggatagccgccaccagagctgctctgacaagcgacacccgttccttcaggctgtagccgtacgcacactggcagcgtgatttttctgtagctcatcagatgattcagatgggcgttatgtaaacattggttaatttttaacaaatgcaagtggtgcacatggcgatggccacatacata

SEQ ID NO: 142406 - DNA, 3167 bp, Zea Mays
aaatcctaggcgtggtgaaatcctaaacccgctccgcgggcggcgatggcgctcgtgtccaccgccaccgtcgcgtcgtcgtcctaccactgcgacccccacctcttcccaggggccaggaggagctggcgcgagccgaggtggagccgcggcggcgcgggcgcgaggctagcggtgctgcagcgtgcgggcggcggcgggctcgcggtgctggagcgagcgggcgcgggtgcggggtccgcggtgctagagcgggcggggggcgccgcggcggccgcggcgaggagggaggagctggtgccctcggggaatgcgaggaactcgtacgaggtggagtcactgatcgaccggctgagcaacctgccgccgcggggctccatcgcgcgctgccttgagacagcgcggcaccggctgacgctgcaggacttcgcggcggtgtaccgcgagttctcccgccgcggggactggcagcgctcgctccggctcttcaagtacatgcagcgccagtcgtggtgccgccccgacgagcacatacacgccatcgtcatcggcgtgctcgggcgccagggccccgcgctgctcgacaagtgcctcgaggtgttccacgacctccccgccgagtcgcgcactgcgctctcctatacctccctcatcgccgcctacgcgcgcaacgcgctgcacgaggaggcccgcgcgctgctcgaccagatgaaggccacgggggtcgcgcccaccgccgccacctacaacaccgtgctcgccgcctgcgcccgcgccaccgacccacccgtccccttcgacatgctcctcggcctgttcgctgagatgcggcacgacgcgtccccctccgtgcgccccgaccttaccacctacaacaccctccttgccgccgccgccgtgcgctctctggctgatcagtctgaaatgctgctgcacactatgcttgaggccggcgtctccccggacactgtttcttatcgtcacattgtggatgcctttgccagtgccggcaacctctcccgtgcagccgagctattctccgaaatggcagccacggggcacacggcggatgcctctgcttatttgggactcatggaagcacacacgcgtgttggcgccactgctgatgcggtggctgtgctgcgacagatgcaggctgatggatgtgcgccaacagctgccacttaccgtgtcctgctcgatctttatggaaggcaggggcggtttgatggagtgcgccaactcttccgtgagatgagaactgctgtaccgccagacacggccacatataatgtgcttttccgtgtattcggagatggtggcttcttcaaggaggtggtggagctcttccatgatatgcttaaaactggggtacagcctgatatggtgacctgcgaaaatgtcatggctgcctgtggtcacggtggcctccatggggatgcaagagaagttcttgaatatatgaccagagaaggaatggtgcctactgcagatgcctacactggcctggttgaggcccttggccacgcagctatgtatgaggaagcctatgttgctttcaacatgatgactgaaatcggtagcttgccaactcttgagacctacaatgctcttgcatttgcatatgctaggggtgggctcttccaggaggctgaggccatcttttctcggatgagtaacaatgctggcattcagaaaagcaaagactcatttgacgccctcatcgaagcatattgccagggctcccgattggatgatgcagtgaaggcgtacatggagatgcgtaaatccaggtttaatccagatgagcggtcccttgagggagtacttaatgcctactgcatagcaggggtcatagatgagagtaaagaacagtttgaagaacttcaatctagtgtgactatgcccagcgttattgcctattgcatgatgctgtcactatatgccaggaatgacaggtggactgacgcgtacgatctgctggaagaaatgaaaacaaatcgtgctagtagtacacatcaagtaattgcttccctaatcaaaggggaatatgatgatagctccaactggcaaatggttgaatatgtcctcgaaaacagtaccatggaaggctgtgactatagtttccgattctttaatgctctccttggtgtgctttggtggtttggtcagaagggccgagctgctagagttctggatcaagcagtaaaatttgggctgttccctgagttatatcgtgacaccaaactggtttggtcactagatgtacataggatgtcgatgggtggagcactggtggctgtgtcagtatggctcaataagctttatgacagactagtagaagatgaagatcttccacagttagcatctgttgttgtattgagaggagaaatggagaaaagcacagttacaagaggactgccaatcgccaaagtcgtctactcctttctaaacgatacactatcagcgtccttccattttccaaaatggaacaagggacgaatcatatgcttgaagtcccaactaaaaaggctgcagtcggccgtagactcctcaaatgggtctcttgcagctggttttgtcgacatgacaaactcccgtctgccggctcccggttccaagatatacacaagcgaggaccaattggataatggttcacgccatttgcctgacgaaccgttggcggaggaaaaggagtcggagcttctcgcactgtgagctgctgcccttcgcatctacagttgtgatgccattggtctgaacaaggggagacgagatgcaggataccaagcgtattttcggagttcgtccattcagatctccgtctcggtctcagttatccagggtgggtgctacatactgcagattcacatcttgcctggaatttatttggctggggcttgacagtcaatgctgaacttgagttgcatttcaggcaggattttagctcgttgtagggagaacgagcttatggatgttgttgactgtgtatggcatccttgtgcgtccagctcaagtgctcaactctgtaaaacatgatagcctgataagtctgttgatacgatctgaatcctgatgatggggatagtgcctgtagtgtgatttgtattattaccagctgagtgaccatctgttgcttgctactaataaatctctctttattaaaa

SEQ ID NO: 142407 - DNA, 3077 bp, Zea Mays
gcggcgatggcgctcgtgtccaccgccaccgtcgcgtcgtcgtcctaccactgcgacccccacctcttcccaggggccaggaggagctggcgcgagccgaggtggagccgcggcggcgcgggcgcgaggctagcggtgctgcagcagcgggcggggggcgccgcggcggccgcggcgaggagggaggagctggtgccctcggggaatgcgaggaactcgtacgaggtggagtcactgatcgaccggctgagcaacctgccgccgcggggctccatcgcgcgctgccttgagacagcgcggcaccggctgacgctgcaggacttcgcggcggtgtaccgcgagttctcccgccgcggggactggcagcgctcgctccggctcttcaagtacatgcagcgccagtcgtggtgccgccccgacgagcacatacacgccatcgtcatcggcgtgctcgggcgccagggccccgcgctgctcgacaagtgcctcgaggtgttccacgacctccccgccgagtcgcgcactgcgctctcctatacctccctcatcgccgcctacgcgcgcaacgcgctgcacgaggaggcccgcgcgctgctcgaccagatgaaggccacgggggtcgcgcccaccgccgccacctacaacaccgtgctcgccgcctgcgcccgcgccaccgacccacccgtccccttcgacatgctcctcggcctgttcgctgagatgcggcacgacgcgtccccctccgtgcgccccgaccttaccacctacaacaccctccttgccgccgccgccgtgcgctctctggctgatcagtctgaaatgctgctgcacactatgcttgaggccggcgtctccccggacactgtttcttatcgtcacattgtggatgcctttgccagtgccggcaacctctcccgtgcagccgagctattctccgaaatggcagccacggggcacacggcggatgcctctgcttatttgggactcatggaagcacacacgcgtgttggcgccactgctgatgcggtggctgtgctgcgacagatgcaggctgatggatgtgcgccaacagctgccacttaccgtgtcctgctcgatctttatggaaggcaggggcggtttgatggagtgcgccaactcttccgtgagatgagaactgctgtaccgccagacacggccacatataatgtgcttttccgtgtattcggagatggtggcttcttcaaggaggtggtggagctcttccatgatatgcttaaaactggggtacagcctgatatggtgacctgcgaaaatgtcatggctgcctgtggtcacggtggcctccatggggatgcaagagaagttcttgaatatatgaccagagaaggaatggtgcctactgcagatgcctacactggcctggttgaggcccttggccacgcagctatgtatgaggaagcctatgttgctttcaacatgatgactgaaatcggtagcttgccaactcttgagacctacaatgctcttgcatttgcatatgctaggggtgggctcttccaggaggctgaggccatcttttctcggatgagtaacaatgctggcattcagaaaagcaaagactcatttgacgccctcatcgaagcatattgccagggctcccgattggatgatgcagtgaaggcgtacatggagatgcgtaaatccaggtttaatccagatgagcggtcccttgagggagtacttaatgcctactgcatagcaggggtcatagatgagagtaaagaacagtttgaagaacttcaatctagtgtgactatgcccagcgttattgcctattgcatgatgctgtcactatatgccaggaatgacaggtggactgacgcgtacgatctgctggaagaaatgaaaacaaatcgtgctagtagtacacatcaagtaattgcttccctaatcaaaggggaatatgatgatagctccaactggcaaatggttgaatatgtcctcgaaaacagtaccatggaaggctgtgactatagtttccgattctttaatgctctccttggtgtgctttggtggtttggtcagaagggccgagctgctagagttctggatcaagcagtaaaatttgggctgttccctgagttatatcgtgacaccaaactggtttggtcactagatgtacataggatgtcgatgggtggagcactggtggctgtgtcagtatggctcaataagctttatgacagactagtagaagatgaagatcttccacagttagcatctgttgttttttttttttcgatatccaggagaggagaaatggagaaaagcacagttacaagaggactgccaatcgccaaagtcgtctactcctttctaaacgatacactatcagcgtccttccattttccaaaatggaacaagggacgaatcatatgcttgaagtcccaactaaaaaggctgcagtcggccgtagactcctcaaatgggtctcttgcagctggttttgtcgacatgacaaactcccgtctgccggctcccggttccaagatatacacaagcgaggaccaattggataatggttcacgccatttgcctgacgaaccgttggcggaggaaaaggagtcggagcttctcgcactgtgagctgctgcccttcgcatctacagttgtgatgccattggtctgaacaaggggagacgagatgcaggataccaagcgtattttcggagttcgtccattcagatctccgtctcggtctcagttatccagggtgggtgctacatactgcagattcacatcttgcctggaatttatttggctggggcttgacagtcaatgctgaacttgagttgcatttcaggcaggattttagctcgttgtagggagaacgagcttatggatgttgttgactgtgtatggcatccttgtgcgtccagctcaagtgctcaactctgtaaaacatgatagcctgataagtctgttgatacgatctgaatcctgatgatggggatagtgcctgtagtgtgatttgtattattaccagctgagtgaccatctgttgcttgctactaataaatctctctttattaaaa

SEQ ID NO: 142408 - DNA, 3062 bp, Zea Mays
gcggcgatggcgctcgtgtccaccgccaccgtcgcgtcgtcgtcctaccactgcgacccccacctcttcccaggggccaggaggagctggcgcgagccgaggtggagccgcggcggcgcgggcgcgaggctagcggtgctgcagcagcgggcggggggcgccgcggcggccgcggcgaggagggaggagctggtgccctcggggaatgcgaggaactcgtacgaggtggagtcactgatcgaccggctgagcaacctgccgccgcggggctccatcgcgcgctgccttgagacagcgcggcaccggctgacgctgcaggacttcgcggcggtgtaccgcgagttctcccgccgcggggactggcagcgctcgctccggctcttcaagtacatgcagcgccagtcgtggtgccgccccgacgagcacatacacgccatcgtcatcggcgtgctcgggcgccagggccccgcgctgctcgacaagtgcctcgaggtgttccacgacctccccgccgagtcgcgcactgcgctctcctatacctccctcatcgccgcctacgcgcgcaacgcgctgcacgaggaggcccgcgcgctgctcgaccagatgaaggccacgggggtcgcgcccaccgccgccacctacaacaccgtgctcgccgcctgcgcccgcgccaccgacccacccgtccccttcgacatgctcctcggcctgttcgctgagatgcggcacgacgcgtccccctccgtgcgccccgaccttaccacctacaacaccctccttgccgccgccgccgtgcgctctctggctgatcagtctgaaatgctgctgcacactatgcttgaggccggcgtctccccggacactgtttcttatcgtcacattgtggatgcctttgccagtgccggcaacctctcccgtgcagccgagctattctccgaaatggcagccacggggcacacggcggatgcctctgcttatttgggactcatggaagcacacacgcgtgttggcgccactgctgatgcggtggctgtgctgcgacagatgcaggctgatggatgtgcgccaacagctgccacttaccgtgtcctgctcgatctttatggaaggcaggggcggtttgatggagtgcgccaactcttccgtgagatgagaactgctgtaccgccagacacggccacatataatgtgcttttccgtgtattcggagatggtggcttcttcaaggaggtggtggagctcttccatgatatgcttaaaactggggtacagcctgatatggtgacctgcgaaaatgtcatggctgcctgtggtcacggtggcctccatggggatgcaagagaagttcttgaatatatgaccagagaaggaatggtgcctactgcagatgcctacactggcctggttgaggcccttggccacgcagctatgtatgaggaagcctatgttgctttcaacatgatgactgaaatcggtagcttgccaactcttgagacctacaatgctcttgcatttgcatatgctaggggtgggctcttccaggaggctgaggccatcttttctcggatgagtaacaatgctggcattcagaaaagcaaagactcatttgacgccctcatcgaagcatattgccagggctcccgattggatgatgcagtgaaggcgtacatggagatgcgtaaatccaggtttaatccagatgagcggtcccttgagggagtacttaatgcctactgcatagcaggggtcatagatgagagtaaagaacagtttgaagaacttcaatctagtgtgactatgcccagcgttattgcctattgcatgatgctgtcactatatgccaggaatgacaggtggactgacgcgtacgatctgctggaagaaatgaaaacaaatcgtgctagtagtacacatcaagtaattgcttccctaatcaaaggggaatatgatgatagctccaactggcaaatggttgaatatgtcctcgaaaacagtaccatggaaggctgtgactatagtttccgattctttaatgctctccttggtgtgctttggtggtttggtcagaagggccgagctgctagagttctggatcaagcagtaaaatttgggctgttccctgagttatatcgtgacaccaaactggtttggtcactagatgtacataggatgtcgatgggtggagcactggtggctgtgtcagtatggctcaataagctttatgacagactagtagaagatgaagatcttccacagttagcatctgttgttgtattgagaggagaaatggagaaaagcacagttacaagaggactgccaatcgccaaagtcgtctactcctttctaaacgatacactatcagcgtccttccattttccaaaatggaacaagggacgaatcatatgcttgaagtcccaactaaaaaggctgcagtcggccgtagactcctcaaatgggtctcttgcagctggttttgtcgacatgacaaactcccgtctgccggctcccggttccaagatatacacaagcgaggaccaattggataatggttcacgccatttgcctgacgaaccgttggcggaggaaaaggagtcggagcttctcgcactgtgagctgctgcccttcgcatctacagttgtgatgccattggtctgaacaaggggagacgagatgcaggataccaagcgtattttcggagttcgtccattcagatctccgtctcggtctcagttatccagggtgggtgctacatactgcagattcacatcttgcctggaatttatttggctggggcttgacagtcaatgctgaacttgagttgcatttcaggcaggattttagctcgttgtagggagaacgagcttatggatgttgttgactgtgtatggcatccttgtgcgtccagctcaagtgctcaactctgtaaaacatgatagcctgataagtctgttgatacgatctgaatcctgatgatggggatagtgcctgtagtgtgatttgtattattaccagctgagtgaccatctgttgcttgctactaataaatctctctttattaaaa

SEQ ID NO: 142409 - DNA, 1086 bp, Zea Mays
gataaatagcaggccgcggacacagccgagacctttccatttccagagttccaaggcttcccttttaccccttcgcttcccatggcgccgtgggtgtgggtggcgttgcaggcggccgccgtggctgcgtccgcggcggaggcgctgagcctggacgtccaccaccgctactcggccaccgtgcgggagtgggcggggcaccgcgcgccgccagccgggacggcggagtactacgcggcgctcgccgggcacgacctccgccggcgctcgctggcgggagggggggaggtggccttcgccgacggcaacgacacgtaccggctcaacgaactgggattcttgcattacgcggtggtggcgctggggacgccgaacgtgacgttcctggtggcgctggacaccggcagcgacctcttctgggtgccctgcgactgcatcaactgcgcgccactagtctcacccaactacagggatctcaagttcgacacttacagccctcagaagtcgagcactagccgaaaggtcccatgcagcagcaatttgtgcgatgaacagagtgcatgccggtcagcaagcagcagctgcccctacagcatccaatacctgtctgataacacatcatccaccggtgtgctggttgaggatgtcctgtacctggtcacggagtatgggcggcaacccaaaatcgttacggcccccataacgttcggctgtggacggactcagacgggttcatttctgggcactgctgcacccaatggtctacttggcctgggcatggacaccatatcggtccccagtttgctagcaagtcagggagttgctgctgccaattccttctccatgtgcttcgcacaagatggccatggtagaatcaattttggggacactggaagctcagatcagcaggaaaccccgttaaacatgtataaacaaaatccatactacaacataagcatcactggtgctacggtggggagtaaatccattcacaccaagttcaacgctattgttgactctggcacctctttcacagctctgtctgatccgatgtacactcaaatcactagcagcgtaagtgtgcaa

SEQ ID NO: 142410 - DNA, 722 bp, Zea Mays
gtcaatgatccaataattaccattacggactctgtatctaatccgatggcatattgcttggctgttatgaagagcgaaggtgttaacttaataggggagaattttatgtctgggctgaaggtcgtgtttgatcgagagaggaaggtcttgggctggaaaaactttgattgttacagtgtgggcaactcaagaagcaaccttccagtgaacccaaatccttctggtgttccccctaaacctgccttgggacctaacagctacactcctgaagctaccaagggcgcctcgcccaatggcacccaagtcaatgtcttgcagccttctgcaagtttttcgccgaagctgcgttgcaacagaaacgtcctcgtcgccgctgctctgctgttcctcgtgatcctttgatcacctcaactccccatgacaatcttttcagaaaccaaatcgacagatatgatagattttagttaaacttggtttacgttgtatgtattgagttacgtatagtgtgatagtatcacattcttttggcctgtgtccacagttccagtaggagttaggatagaacacgggatgagtccatagccctttttttttgcacgttcataatgtacctggtggatgtactgtgtacatattagatatgacttcaggatgtattgattttatagaataattgaataacgatgctcgcatacacagatatatatacttcgcattgcttc

SEQ ID NO: 142411 - DNA, 720 bp, Zea Mays
cgctagccgcgacgcggacccatcgtgcgccttcgcttcagccgtgagcccgcaaccgacccgccgcaaaagaccaaaaccctagccgtcacagcgccgcccccgaaccataaacctccacctcgccggcggccatggcgttctccggcaggatccaggagctcgtgaggaagtatggcaaggtggccatttgcgtccacctatccgtctcctgcgcctccatcgccggcctttacgtcgccatcaacaacaacgtcgacgtcgaagccgttttccggaggttcggtatctcccccggcgttaccgtaggcggcgaggcctcacccgcccccgtttcccgcgatgaacacctgcgcgacgtccccctgccgcccatggccaacgaggtactgcaagaagagacggagcgagagcggcagccccgcaacaggacgatggagctcgtggcgtcaagtggcggcgcgttcgcgctcgctgtcgtctgcaacaaggcactattccccgtgagggtccccatcaccatcgcgctcacgccgcccgtcgccagggccctaagccgctggaggctcgtcaagagctgatctgtgagtccgtttgccgcttcggattgccctctgctattttagtttcagagtcaaactttgatgcaaccttcaacttcaatatgctgttggatgatgtgggcttattcataatttgtgtgaggtttcgttgattaaa

SEQ ID NO: 142412 - DNA, 950 bp, Zea Mays
agccgcgacgcggacccatcgtgcgccttcgcttcagccgtgagcccgcaaccgacccgccgcaaaagaccaaaaccctagccgtcacagcgccgcccccgaaccataaacctccacctcgccggcggccatggcgttctccggcaggatccaggagctcgtgaggaagtatggcaaggtggccatttgcgtccacctatccgtctcctgcgcctccatcgccggcctttacgtcgccatcaacaacaacgtcgacgtcgaagccgttttccggaggttcggtatctcccccggcgttaccgtaggcggcgaggcctcacccgcccccgtttcccgcgatgaacacctgcgcgacgtccccctgccgcccatggccaacgaggtactgcaagaagagacggagcgagagcggcagccccgcaacaggacgatggagctcgtggcgtcaagtggcggcgcgttcgcgctcgctgtcgtctgcaacaaggcactattccccgtgagggtccccatcaccatcgcgctcacgccgcccgtcgccagggccctaagccgctggaggctcgtcaagagctgatctgtgtttttttcgtcacaactgctctgggatatagggtgcatccacatccaggaaatccagagagaaaattcgccgcggtttgttttttgtggtcatggatgaaagctgaaatccctggagcgaagtctcatgttgaactcccctttgttcatcagtgaggtgtgaatccctggcagaacgccctgctgattttgtaacatgaacacaatggcttggggacaaaataagaactgcgatcgaatgattgatacaagaagctacgtctacactcgctttatgtgactttgcctgtttctctgatcgagtgtgtgaaatctatgtactgttctcacttctgagtgaatttataaatgatcaaagagctgaatat

SEQ ID NO: 142413 - DNA, 744 bp, Zea Mays
attcgcccacacgagcctacccaaagagcccagagcccgggaggttacttcgctgcctgaggagtccccggcaccggaggtcttgctaccggctggcggcttcttcttccgttcctccccaagtcctcttcccggaggaatcatgatcgtctgcgtcgccgttgtcggccaccagaacaatccgctgtacctgcagagcttcacggaggcggacgacgccctcaagctccaccacatcgtccactgctctctcgacgtcatcgacgagcgagtgagcaatcctaagaggagtgcacctacattgaatgagacatttttgggtcttctatacccaactgagaactacaaagtgtatggctatttgacaaacacaaaggtcaaatttatcatggtcacgactgatcttgatgtcaaagatgcagatgccagaaattttttcaggaagttccatgctgcatatgtagatgccgtctcgaacccgttccatgtcccagggaagaagattgcttcaagaagctttggtgcaagagtaagcaccatcgttaaatccttcggttcagggaccagttgatcgaatgctacttttgtcagactttctgtaatcaaacatatgtgttctctccctgtttgacaaaattactccctaccgtgtacttgtctggtgaacgagatgctattggtactgattgctgaacaaagaaaaatagtggtttattcattcaaaatcctcctcaattccatcca

SEQ ID NO: 142414 - DNA, 723 bp, Zea Mays
attcgcccacacgagcctacccaaagagcccagagcccgggaggttacttcgctgcctgaggagtccccggcaccggaggtcttgctaccggctggcggcttcttcttccgttcctccccaagtcctcttcccggaggaatcatgatcgtctgcgtcgccgttgtcggccaccagagcttcacggaggcggacgacgccctcaagctccaccacatcgtccactgctctctcgacgtcatcgacgagcgagtgagcaatcctaagaggagtgcacctacattgaatgagacatttttgggtcttctatacccaactgagaactacaaagtgtatggctatttgacaaacacaaaggtcaaatttatcatggtcacgactgatcttgatgtcaaagatgcagatgccagaaattttttcaggaagttccatgctgcatatgtagatgccgtctcgaacccgttccatgtcccagggaagaagattgcttcaagaagctttggtgcaagagtaagcaccatcgttaaatccttcggttcagggaccagttgatcgaatgctacttttgtcagactttctgtaatcaaacatatgtgttctctccctgtttgacaaaattactccctaccgtgtacttgtctggtgaacgagatgctattggtactgattgctgaacaaagaaaaatagtggtttattcattcaaaatcctcctcaattccatcca

SEQ ID NO: 142415 - DNA, 1317 bp, Zea Mays
atgtcgtctgagagggccgatgagaaaactggtagagatgagaaagaagtccttaaagctattgagtatgtgcatgaattgctagacaaagaagtagccgcagaaatgagtccgacagacatattggtttctgggatgagccaaggaggtgctctggcgaaagcgagtgttctactctacccaaaaactttaggtagttgtgctgtctttagtgtttcagttcctctaagtaaagcattcgctcaaaaggtgtcatctgaagctagaaaggcagttgagctgaaggctttcatcatagcgttagccgaagatattttgacaattgcaaagcaaaccgagagtgcccagaatgttgtaggtctatcaccactaggttattcagctagagtccagtctgagtcttgtggcagggagtggatgatctttcacattcccataggtttgtcgttggtactagagttcaagctgggtggagtgaagatggagaatgtgtataaagcaacagttggagctatagcacaaaatggatactatgtagcctatgatggctggggaaacagggaagaggatgggcttgtgccaagcttgaatcctcttgtgaaggagtttctcaatgctgctgatgacaagcggaaggaagtcctctctaaaatagaagaggatgttgctaagctcagcgctaagaagctacaagtgaatgccgaggagagcagccatgacttggctaacccaccgaaggtagaggagaagcttggtgttgtccctcatggcctgtccaccgactctgaggttgcccagagggaagccgagtctatctctaggaagactctcaggagctcagccgagaagaacaggagctgctcgagtctcttgtcaaagctgatacatctgaactctgaattgatgcagagaaggcaggaaagagctaaaaagatggaagaaaagaaagtgtatctgcaactgtacgaagcaatggaggcgctggtcaagatcgatctggagaccaacaagatcatggacttcatcaagtttgacgtcggcaacgtggtcatggtgactggcaggaggaacaccgggcgtgtaggagtcatcaagaacagggagaagcacaagggcagctttgagaccatccacgtgctgcttggagctttttgctatgtctagttttctcgtatttgttgtacaggaaaacatagaatagaattcaaatttggtggtcgcaaaagtgtggagactttaattcatataaagttaggcttaacattagtgcaaacaattgtattttagtttagatttagagtacacacttatgtatgt

SEQ ID NO: 142416 - DNA, 765 bp, Zea Mays
atgggagccacctcgttttcattcacaacggcagcagccattctccacctcgccctcctccttgcagcagctcgacggcacggcgcgacggactacaccgtcggcgactccgccgggtgggccatcggccccaactacctcatctggtcgcagaagtacaacttcaccgccggcgacaccctcgtgttcaactacgtgaaggagcagcacaacgtgtaccaggtgacgcaggacgagttccggacgtgcgagccgccggcgaaccagtcgacgcgcgtgtgggcgacgggccacgacctcgtcaacctcaccgtgccgggggactactacttcctctgcaacgtcgccggccactgcctcgggggcatgaagttctctatcgccgtggccgcgccaccccctccgcccccgccgccgccgcccccgccggccctgacgccaccgccaccgccgccgccgagctcgggctgcgtgccgttgatttcacggcggcgcgcgtgggcggaggtggggcggattccattcctcgcggcgatcggcctgctcgttctcacttgattgtcgtcgtcgttggtaggtacggtggttaccaatactacttttttttttgtgatggttgacctggacgttttcttggaattgatggttgggatgaactattgctatgcaagtaatggcgtgcgcatgcatgtctacgtttgattgatagtgttgactttgtactcaaaatgttattatcggtacgtgtgtttgggtccttttggt

SEQ ID NO: 142417 - DNA, 1396 bp, Zea Mays
ctctccggcccccgccttcccagtcccctcatctctcgtctctcctcctgcctcctcgtcctcgccttcccattcccccgccccaaacccccagctcgattcccagtcgtctcgccccgtgatgtcgccggctgctggtggccccgcgcccgcgccagcgccagcgcaatcagcggccgccgttccgcaggcgatcgcggtaccgccggagtccggccgttcggcgcccgaggcgtcccgcagggatccaccggcccaccccgagggggccgatcccaccaatgcggcggcaaggaagacaacgtggagcgtgctggcgcagacccccgccgccgcggcggaggcgaccccagagggcggcggcatcatcggcggggacgcctcgtggccggcgctcgtggagtcgacgcgcgcgtgccccaagtcgggctcgtccgactccctcaatgccctctccgatgtttccggcccgcctccgcaggaggatacaattgctgcttcatcggtacttccacatccagttgtgggggctaatccgattcccactgcccaaaaccctacctccatacctcctcgcacgcctgcggcttcctctcagcagaacggtgccacaacccagacatttccagttcggcgcagtggcaaccgtggaaatggtagcaatggtggcgtcagggctgccaatagtagcggaggtgacgggagcagcggcagtggtggtgatggtaactggaatgatggaagccttggtactgacagcggttgcaacagcagcaatggcgatggtcccatcaatttggatgataatgtccctggcactcgttgtgcccgtgggaatgacaatgacagcagcagaaatccttctggcaatggccactggaaccacaacatacgaggtggtggtggtggtggtgatgggaacaatagaaatagcagtggtagcagcaaccactggaataataatccccgaaatagtagtagtagcaatggcgttggaggtcgtggtggttaccggggtcgccgtgaccatgagagaggggctaatttctcccctaggaacttcccaagagttccggtaatgccatatcaacagcagcagcagcctggcatctaccagcctgggccctttcaccgaccaccaccaccggctgcccatttcatggtgccacagcatttttatgtcccatcatttccctaccttgctgatgtgcaaccttatcctgtctacctcccaccagtagaacagtttcagaacatgcatcttcttcggccacccatgcagcctgcttgggttcctcctcatcaggatcaaccaaatctccaagatagtattaggaatcagatagagttctattttagcacaaataatctatgccatgacgaatctctagatcgt

SEQ ID NO: 142418 - DNA, 362 bp, Zea Mays
agactttataacgatcaggatgtggtcttctaacagttatattcaccctatctttattatattattctcagatgagggcgtttacaggtttggtggacaccaactacatactagatgctatccgtggttctgagttattggaagtgcaggttaggctataatttctacagcactttgttgactactgaggtaatatgctctgacattaccgtgtctacactttttttttgaacttgtattgcctcaatctatgctacagggagataatgtccggaggcgcaatgattggatggaatggctgcttcattaaggccgtccactagtaaatcaggttcgtttcttctgtcgcactgtcatgatga

SEQ ID NO: 142419 - DNA, 582 bp, Zea Mays
agactttataacgatcaggatgtggtcttctaacagttatattcaccctatctttattatattattctcagatgagggcgtttacaggtttggtggacaccaactacatactagatgctatccgtggttctgagttattggaagtgcagggagataatgtccggaggcgcaatgattggatggaatggctgcttcattaaggccgtccactagtaaatcaggttcagatgccaagatgcagctgcatgccatattgggggaactgaatgaatagaagtcttgatcacggcgtgatggactgatgtacagcgagcgggtctattggaatcgggatgatttttgtttgacgtgatggctgcacgtgaaggcacattattcaaagggaaaataattttacttagggctagcaaatgtttttatggcagtctgtatagttgtccgaaaagaagtgaccaccctgccttctcattatggattattattattattaggtgtcctgttgaacgatttggtgaccgtttgctttgcttttcttggatcaaagtcacgtaaccgcagcccattcaattcaacccactacaa

SEQ ID NO: 142420 - DNA, 363 bp, Zea Mays
atggtagacatcctacatcctacttatataaagctaaataaaggaggccgccatggcaggtgcacgcccccccagctagacgaaattaataaaaacatgggatctatgtacattgaggccgccatggcaggaaggatttgcttgcttgcttcctggatctatgtagttctgagttctaccactactagtaaccaagcactaggcagcagccactcactaatcagtcacttacttaatcacctcctcaaaaaacaaacaaaacgagcaaccacctgcttcgactcatctccggtcaatgtcctcagaacggcgcggacggcatcctctgcagggtcttcctcaccatcggcaccgccacctcca

SEQ ID NO: 142421 - DNA, 1644 bp, Zea Mays
aagcggaagcggcggatgggtaggcaaggaccaaggagagagggcttttaacgcggattagttgggcctcaagacataaaaagcccaaacacatctagttgagcaagcccgtcccatgagcccacgaagtggaggatcagcaagcacgagcgtctcgagctcgcgtcgcgtccgtttgctgcgccctccgccgccgccgcaatgatgcagccgcatctgccctccccggcgaggctggggctcacagcctcgtcgccgtcgctcccgcccaatccggtccccttgaatcccacatcctcgccttcacacggtagcctgccctcgagcgcagccgctggcaccagtgctgccccaaccctaaccacctcgccgtcgctgctaccgctcctgccgccgcttccgcgcgcgcaatcgctgctccagcttatatcgtcgctcgcttccaacctcttggaactctcggcgaaccgcgccgcgtggatctcagcgtaccgaggatcgcttcccaccttcctcccatcggcgtcctccgcgccgccgctcgcaaccccgatctcctccaccaaggacgcgctctctcttgtcaccaccctgcagacgcagctcttcgaggccgtcgccgagctgcaagagaccctcgatctgcaggatgcgcgcgcgcgccttgtccgtgaggcgcgtggcaaggatgctgcgctgctagcctttgcgaagaagctgcatgaggctcaccaagtacttgaccgcctcgtcgacgactacgctgactaccgtcgcgatcccaaacgcccgcgtggcgccgctgctgctgacgatcccgagccggcgtcagagggcgacttcggcacgtccctccactccagccttaagcttgatgacatcctgacctacgcgcaccgcataagttacacaacctttgctccgccggagcatggtgctgggttgcctctccgtgttagcctgccacctgtaccacaggagaatcagatgagagcgtcgcagctgtatctgtttgctgatttggatgtaggggtacccaagaagccattggatgcgaaggacgggatcgcggcagaagtggaggttgcgccgctgtatgaggcaccacaggaggggccgtcgaggctaccaaacaccttgccacccatgttcccgaaggagctaaagccgccgccgggatggaagcctggtgatccgatcacgctaccacttgatgagatactacctggtatcaagggtgaagagcgggaggcacaggcccctgtgccgcaggcacctgtttcagtgcgaccagtggcaccaatgggaccagagacaatacaggtcaagcctgtgcagcttgattttgggagcagtagtagtgacgagtacagtagtgacgttgggagctcagaagaagatgatgaggattagtgctcggtaagctgctctattttgttggctttcaattgtagttgcctttctatcgtatgcttggagtagaatcttctatgctagcgatttttacctgctcatgtcttactgactatttatgaactttagggctgatctcagatcattgtaatggtgctttatcctgtacttcttaaaccaatgtattctaccattgattttacttattatatgcttagtatcaattgttta

SEQ ID NO: 142422 - DNA, 1731 bp, Zea Mays
tttttttgaaagagatttatttctctgcttaccagtttacaaggataacagaagatgagaagaacaatagcagcagcaaaacaatctaaatcagacatcacacttgtagctgaattccaacaggatacccgaacccactccaggaacccaaaggcaacaggaacaccacctcttgcacttgtacagaggctcaaatcactgtgtatgtgatttaactgggtttttcttcttcttgtgatttaactgtgtacatgtgaatgctgcattccataggtcttacttagcgggatgcatgtgatcttctgaataaggtcgtttcgtatggtcccgtggttaggtgtctacagatgcagtgcattcagctgtcccaccacaccaccttctcagccgaccgaaaggcatcttacttatcccaatcagcctgccacagtggcgagaatggaaccgtacctccagtggttagggatacagctcatggagctcggcggtaccgcaatgtcgctgctgctgctgctcgtgctcgccgcgtcgccattgcagcaggccagggcggttggcggcggcaggccgcgggtgccggccatcctggtgttcggcgactccatcgtggacacgggcaacaacaacgccgtcctcacgctcaccaagtccaacttcaggccatacggcaaggacctcaacggcggcgtacccaccggacgcttctccaacggccggattccgacggacttcgtagcttcacggctcggcttgaaagatctggttccggcgtatctcggcaccgacctcagcgacgacgacctctgcacgggcgtcagcttcgcgtctgggggcaccggctacgacccgctcacctccactctcgtggcagttctgccgatgcaggaggagctcaacatgttcgcggagtacaaggagaggctcgcaggggtcgtcggagacgaggccgccgccgcaggaatcgtggccgaaagcctgttccttgtctgcgccgggtcggacgacatcgccaacaactactacctcgcccccgtcagacctctgcagtacgacatctcggcgtacgtggatttccttgtggagcaggcctgcgacttcattaggcaactgtaccagcaaggggccaggaggatcgcggtcctggggatgccgccggtcgggtgcgtgccctcgcagcggaccctcgccggcggcctagccagggactgcgaccccgctcgcaaccacgcggcgcagctgtacaactccaggctgaaggaggaggtagtgctgctccagaaggagctggcgtgccagagaatcggctacgtggatatctacgacgtcctgcaggacatgatcacgaacccctgcaaatacggcttcgaggtctccacgagaggatgctgcggcaccggggacttggaggtgtcgctcctgtgcaaccagctgacggcgccgacgtgccctgacgaccggaaatacgtcttctgggacagcttccatcccaccgagaaagcatacgagatcatcgtggactacctgttcccgagatacatagagaacctgctataattacttctgctttaccgtcgcttctttaattcgatcgtttctagttgttgtcaagtttagacatgccgtctttgtttcccaatttaagcttttgctttaaaactcaagacttttcaaggaaatgaaatgacacctgctagcttgttgcaagctgtaaagattgattggttttgttta

SEQ ID NO: 142423 - DNA, 1775 bp, Zea Mays
tttttttgaaagagatttatttctctgcttaccagtttacaaggataacagaagatgagaagaacaatagcagcagcaaaacaatctaaatcagacatcacacttgtagctgaattccaacaggatacccgaacccactccaggaacccaaaggcaacaggaacaccacctcttgcacttgtacagaggctcaaatcactgtgtatgtgatttaactgggtttttcttcttcttgtgatttaactgtgtacatgtgaatgctgcattccataggtcttacttagcgggatgcatgtgatcttctgaataaggtcgtttcgtatggtcccgtggttaggtgtctacagatgcagtgcattcagctgtcccaccacaccaccttctcagccgaccgaaaggcatcttacttatcccaatcagcctgccacagtggcgagaatggaaccgtacctccagtggttagggatacagctcatggagctcggcggtaccgcaatgtcgctgctgctgctgctcgtgctcgccgcgtcgccattgcagcaggccagggcggttggcggcggcaggccgcgggtgccggccatcctggtgttcggcgactccatcgtggacacgggcaacaacaacgccgtcctcacgctcaccaagtccaacttcaggccatacggcaaggacctcaacggcggcgtacccaccggacgcttctccaacggccggattccgacggacttcgtagcttcacggctcggcttgaaagatctggttccggcgtatctcggcaccgacctcagcgacgacgacctctgcacgggcgtcagcttcgcgtctgggggcaccggctacgacccgctcacctccactctcgtggtaaacaacaaacgaacgacccccgttgaaatgcctttcttcaggcagttctgccgatgcaggaggagctcaacatgttcgcggagtacaaggagaggctcgcaggggtcgtcggagacgaggccgccgccgcaggaatcgtggccgaaagcctgttccttgtctgcgccgggtcggacgacatcgccaacaactactacctcgcccccgtcagacctctgcagtacgacatctcggcgtacgtggatttccttgtggagcaggcctgcgacttcattaggcaactgtaccagcaaggggccaggaggatcgcggtcctggggatgccgccggtcgggtgcgtgccctcgcagcggaccctcgccggcggcctagccagggactgcgaccccgctcgcaaccacgcggcgcagctgtacaactccaggctgaaggaggaggtagtgctgctccagaaggagctggcgtgccagagaatcggctacgtggatatctacgacgtcctgcaggacatgatcacgaacccctgcaaatacggcttcgaggtctccacgagaggatgctgcggcaccggggacttggaggtgtcgctcctgtgcaaccagctgacggcgccgacgtgccctgacgaccggaaatacgtcttctgggacagcttccatcccaccgagaaagcatacgagatcatcgtggactacctgttcccgagatacatagagaacctgctataattacttctgctttaccgtcgcttctttaattcgatcgtttctagttgttgtcaagtttagacatgccgtctttgtttcccaatttaagcttttgctttaaaactcaagacttttcaaggaaatgaaatgacacctgctagcttgttgcaagctgtaaagattgattggttttgttta

SEQ ID NO: 142424 - DNA, 1726 bp, Zea Mays
tttttttgaaagagatttatttctctgcttaccagtttacaaggataacagaagatgagaagaacaatagcagcagcaaaacaatctaaatcagacatcacacttgtagctgaattccaacaggatacccgaacccactccaggaacccaaaggcaacaggaacaccacctcttgcacttgtacagaggctcaaatcactgtgtatgtgatttaactgggtttttcttcttcttgtgatttaactgtgtacatgtgaatgctgcattccataggtcttacttagcgggatgcatgtgatcttctgaataaggtcgtttcgtatggtcccgtggttaggtgtctacagatgcagtgcattcagctgtcccaccacaccaccttctcagccgaccgaaaggcatcttacttatcccaatcagcctgccacagtggcgagaatggaaccgtacctccagtggttagggatacagctcatggagctcggcggtaccgcaatgtcgctgctgctgctgctcgtgctcgccgcgtcgccattgcagcaggccagggcggttggcggcggcaggccgcgggtgccggccatcctggtgttcggcgactccatcgtggacacgggcaacaacaacgccgtcctcacgctcaccaagtccaacttcaggccatacggcaaggacctcaacggcggcgtacccaccggacgcttctccaacggccggattccgacggacttcgtagcttcacggctcggcttgaaagatctggttccggcgtatctcggcaccgacctcagcgacgacgacctctgcacgggcgtcagcttcgcgtctgggggcaccggctacgacccgctcacctccactctcgtggaggagctcaacatgttcgcggagtacaaggagaggctcgcaggggtcgtcggagacgaggccgccgccgcaggaatcgtggccgaaagcctgttccttgtctgcgccgggtcggacgacatcgccaacaactactacctcgcccccgtcagacctctgcagtacgacatctcggcgtacgtggatttccttgtggagcaggcctgcgacttcattaggcaactgtaccagcaaggggccaggaggatcgcggtcctggggatgccgccggtcgggtgcgtgccctcgcagcggaccctcgccggcggcctagccagggactgcgaccccgctcgcaaccacgcggcgcagctgtacaactccaggctgaaggaggaggtagtgctgctccagaaggagctggcgtgccagagaatcggctacgtggatatctacgacgtcctgcaggacatgatcacgaacccctgcaaatacggcttcgaggtctccacgagaggatgctgcggcaccggggacttggaggtgtcgctcctgtgcaaccagctgacggcgccgacgtgccctgacgaccggaaatacgtcttctgggacagcttccatcccaccgagaaagcatacgagatcatcgtggactacctgttcccgagatacatagagaacctgctataattacttctgctttaccgtcgcttctttaattcgatcgtttctagttgttgtcaagtttagacatgccgtctttgtttcccaatttaagcttttgctttaaaactcaagacttttcaaggaaatgaaatgacacctgctagcttgttgcaagctgtaaagattgattggttttgtttacttgttccgtgtg

SEQ ID NO: 142425 - DNA, 1740 bp, Zea Mays
atgagtatctcattgcgggatcgtattagaaagaggagggaagaagaagatgatgacatgatgatatttattttccccgccttatatctgatgggttctactagaggtgggggacaaaagaagaaacttcatacctcagatgagacaggcgaggttaaggttcgtcgactcctcgagggacatgtcaagaactgtcaagttacatttcggatggaaccacacatcttcagagagcttgcaacttatcttagaaggagaaggatcattgttgatacaaggatcacggtcgaggagaagttgggcctcctgatcctaatcaagtgcatcaaaaaatacaaggaatggttccaacccaccaatccggcagaaacgaacaaggccgaaggaatttggggctggacatcgaagaccacagaacccgaaggagctcttcaaccatcgtcacgcacttctgaggaaccatgtggaaagggctttggggtgcttaaaaagcgcttctccattctcaaagttgccacgttccacacactggaaaaccaagtaaagatacctataactgttgccatcttccacaatctaatccgatcacttcatggtgatgaggattggttagatcatcagccggataatattgatccatcaaactttgttgatctaccaagtgctatggttggaaaaggctccccaaggttcaacataggtggttccccaaagttgcgtaggttcattcctacaacaagtgctactaaaaagaaggcttctcctaaatgcagtggggcaaaaaagagtggaagttctccaagagtagtgaaacaaagagcggattggaatccaggcattgagaggtctcttgttgacattctccatgaatttaaagaaagtggatatagaggtgacaatggttggaactccgaagggtggaatagaatggtcaaggagtttcatgatgaagaaggtcagctgaagagagactacaagatgctcaaagcagcaaagcaacagagtgggtccacctggaatgagaaaaggaatatggttgaaggaccaccagctttgtgggagaatctcatggtgacatttcctaaaatcaagaagtttaacaacaacaaggcaaccttcccgctctttgatgctttgggagagctttatgatggacacttggctgaagggacttggaattgcacttctcttgaggcaccgcaagaggaagaaccgaatgagcaacttcaggatgcagaagatggaccacaaggctttgatctgaatgttgttcatgatgtagatgatgaagttgatgatgcactcactgaaaggaatgaagatatgcttgaaggaagggctaatactctgtcacgagatgaagaaagtggacagcgaagacctgttgcgtcaagaaacaagcaagaaaaggaaccaaagaagcctagaaagactgacaacatagaaaatatgatgaacaaatacctagaaatgaggagcaagcaagtagaagatgaagttgcaagagaaaaggaagcaagagaaaaggagacaagagaaaaggaggcagctcaaagtgaagatttctccatcaaaaggtgcatatcagttctgaacacaatggaagaagtgaccaaactggagaaggcaaaagcatattcagtcttcaccaagagcaaagagaatagagagactttcatatgtgcatgtgaagcggatcaagaatcagctttgatttggctaagaaatgagatggcttag

SEQ ID NO: 142426 - DNA, 1063 bp, Zea Mays
aatcgcacaagtttcccacccggagcgaggcaacattcatgaagcggagcagccgagcagaggcggcggcggcggagccagcgagggagcagccttgacgcagcagcatcacggtcacgggccgggcctcgtgcgctccgcccgttccgagtcgcatcgtatcgatacgcccgatgcgtcgtcacaggcacagctccgccgctcatgtccgcacccgagttattatatactactactacggcccgccaccttcgcttcgctagcggtccgcacccgttgcctccaaactcatttctcccgagcgccgccgcgagcctccgttccagcttcgtccatggcttccctcaccggatccgctctctcctttgcgaggcccgtcaaggtatatcgccggatcacctctcgagttgcctgatctgtgagataatccgattatgggtagggttttagctctagcggcgcagggtttcggttgttgtgccggttgcgatttctcttatctggtttatgtctgcgtgcttatcggttcgtctactggcgtcttgtcgcgtttgagatgcccttcgatgcgaagccattcacggttgtggagttcaaatcgatagatctgcgctgacgtacgtttacgcgctcatttcttcatcgtttggattagtggtgcagtgtccgtgatgattatgctgtatcctaatgtttgtggagccagatgttctctacagctttaccagtaccatgaggtttttgggattttctactttgaacttgggagaatattgtctcacctgactcaatgatttaaggttatattggttacagatctttccatgcttatcatgtattgacatgcttacgcccttaaccatctgtgtattaacggctcatttatggtttaagacgtgctccttttgtgtgggctgatgtctacatacttggttctagtgttctccgaagaatagctagttagcatattttaggttcatggagtcagggaactataaaagtatattggttcttttcatataaacgacaaggcaaaatacatgatgcgtggcccctcagttga

SEQ ID NO: 142427 - DNA, 1661 bp, Zea Mays
aatcgcacaagtttcccacccggagcgaggcaacattcatgaagcggagcagccgagcagaggcggcggcggcggagccagcgagggagcagccttgacgcagcagcatcacggtcacgggccgggcctcgtgcgctccgcccgttccgagtcgcatcgtatcgatacgcccgatgcgtcgtcacaggcacagctccgccgctcatgtccgcacccgagttattatatactactactacggcccgccaccttcgcttcgctagcggtccgcacccgttgcctccaaactcatttctcccgagcgccgccgcgagcctccgttccagcttcgtccatggcttccctcaccggatccgctctctcctttgcgaggcccgtcaaggcaatcagcattaagtctgtctctttctctggtttaaggaaggataatgtagccttccgcttgcagccagtgccacaaagattcgcagtctgctgtcctgtaagtaacaaattgttgtactgtggatctgtcaccacgtaatttaatcactgcatgatgctgcagctacacatctctatttattttctttttctatgtcaaatgtgccaattgtttcaactactttgtttggcttctaaagagattttgtatttattgtgcactgaagtgcttccattatgtacttgattgtatttttgtgaacacatagctccgatgaaagaaattttcaagagaattcctaaggtactggttatctttttttttcctttgcatttggcaccccaggatttttctgtcacgtgttagcatctgatgtggatgtaaaacgtcccatcacattgtgtttgtgtttttagctggtagattatactggtgcaatcttctttaaactgaagtttgtgttacctaatgattatgatcattccactgttgctgtgcttaccattttaccaggctaaaaaggagactgtggatcgggtttgtgatattgtcaagaagcagcttgcacttcctgagggcactgaggtctgtggctcctctaagtttcaagacctcggcgctgattcgttggacactgtaagtgcttttaagtttgcaacacctgaatttatctatttaatttttgaatgattcttggggtagcagaacaacaattagctattttgttttgtacatgtaccaatcataaattgattacatttccagggaataacatctaggatcagtgctctggttctctactcaagtctgcaagttatctgttatgccagtagataaattctggactgaagtctattggcatttgtgttgagttgaatataaacttggattactcttctttcccaaaagagactaaatcttccatggacctgttttttaggttgagattgttatgggccttgaggaggctttcaagatcactgtagaggagtcgagcgcgcagtcaatcgcaactgtggaagatgctgctaatctcatcgacgaacttgttgcaggagcagcaaaatcgtgttaaactggtcgtattgcgttgggtgctgtaccagggcatcacttgttgttctatgcccccttgcctactagattttctaccctgggcctggagagatgtttctgtcatgactgtcattgtggatctcgcgatattgttatattgaagcttttgtgcttgttcaag

SEQ ID NO: 142428 - DNA, 1061 bp, Zea Mays
aatcgcacaagtttcccacccggagcgaggcaacattcatgaagcggagcagccgagcagaggcggcggcggcggagccagcgagggagcagccttgacgcagcagcatcacggtcacgggccgggcctcgtgcgctccgcccgttccgagtcgcatcgtatcgatacgcccgatgcgtcgtcacaggcacagctccgccgctcatgtccgcacccgagttattatatactactactacggcccgccaccttcgcttcgctagcggtccgcacccgttgcctccaaactcatttctcccgagcgccgccgcgagcctccgttccagcttcgtccatggcttccctcaccggatccgctctctcctttgcgaggcccgtcaaggcaatcagcattaagtctgtctctttctctggtttaaggaaggataatgtagccttccgcttgcagccagtgccacaaagattcgcagtctgctgtcctgctaaaaaggagactgtggatcgggtttgtgatattgtcaagaagcagcttgcacttcctgagggcactgaggtctgtggctcctctaagtttcaagacctcggcgctgattcgttggacactgttgagattgttatgggccttgaggaggctttcaagatcactgtagaggagtcgagcgcgcagtcaatcgcaactgtggaagatgctgctaatctcatcgacgaacttgttgcaggagcagcaaaatcgtgttaaactggtcgtattgcgttgggtgctgtaccagggcatcacttgttgttctatgcccccttgcctactagattttctaccctgggcctggagagatgtttctgtcatgactgtcattgtggatctcgcgatattgttatattgaagcttttgtgcttgttcaagaaaagaaaatgttgttgcgatatatatgttattatattgaattttttttgtccatgttcaaggatattttatatattttaagtgatctgaggggtactggtaggctcgctcatgctgtgcttttttatggcatgattattttgttcattgcgagtctacg

SEQ ID NO: 142429 - DNA, 1506 bp, Zea Mays
tttcccacccggagcgaggcaacattcatgaagcggagcagccgagcagaggcggcggcggcggagccagcgagggagcagccttgacgcagcagcatcacggtcacgggccgggcctcgtgcgctccgcccgttccgagtcgcatcgtatcgatacgcccgatgcgtcgtcacaggcacagctccgccgctcatgtccgcacccgagttattatatactactactacggcccgccaccttcgcttcgctagcggtccgcacccgttgcctccaaactcatttctcccgagcgccgccgcgagcctccgttccagcttcgtccatggcttccctcaccggatccgctctctcctttgcgaggcccgtcaaggcaatcagcattaagtctgtctctttctctggtttaaggaaggataatgtagccttccgcttgcagccagtgccacaaagattcgcagtctgctgtcctgtaagtaacaaattgttgtactgtggatctgtcaccacgtaatttaatcactgcatgatgctgcagctacacatctctatttattttctttttctatgtcaaatgtgccaattgtttcaactactttgtttggcttctaaagagattttgtatttattgtgcactgaagtgcttccattatgtacttgattgtatttttgtgaacacatagctccgatgaaagaaattttcaagagaattcctaaggtactggttatctttttttttcctttgcatttggcaccccaggatttttctgtcacgtgttagcatctgatgtggatgtaaaacgtcccatcacattgtgtttgtgtttttagctggtagattatactggtgcaatcttctttaaactgaagtttgtgttacctaatgattatgatcattccactgttgctgtgcttaccattttaccaggctaaaaaggagactgtggatcgggtttgtgatattgtcaagaagcagcttgcacttcctgagggcactgaggtctgtggctcctctaagtttcaagacctcggcgctgattcgttggacactgttgagattgttatgggccttgaggaggctttcaagatcactgtagaggagtcgagcgcgcagtcaatcgcaactgtggaagatgctgctaatctcatcgacgaacttgttgcaggagcagcaaaatcgtgttaaactggtcgtattgcgttgggtgctgtaccagggcatcacttgttgttctatgcccccttgcctactagattttctaccctgggcctggagagatgtttctgtcatgactgtcattgtggatctcgcgatattgttatattgaagcttttgtgcttgttcaagaaaagaaaatgttgttgcgatatatatgttattatattgaattttttttgtccatgttcaaggatattttatatattttaagtgatctgaggggtactggtaggctcgctcatgctgtgcttttttatggcatgattattttgttcattgcgagtctacg

SEQ ID NO: 142430 - DNA, 995 bp, Zea Mays
tgcagtgccggccatggctgtggagcagtgaagaatattctgcacttgtcggagcaaattccccgacagccatcagcacggcctgcgtggctgtcggtgcccatcgatcgagctgacaactttgtttcaagctcttcaagttcatcagtgcaaaagcagcagctgtacatactacatatataatagctgcctagctccaccgcaaagccgagcaggaggcgacgaaaccaactgagggtgcgtgtcggatggcgaggccgagggaggaggagctcgtggaggccgcgctggtcgcggcggccgcagcgctgatcgtgtcgggcgttaagaggctggtggcgccgcccgagcccgtagctccgtggtggtggcctgcgtcgctctcggtgccgtctcccgcgctgttcctgctcctcaacgtcatcatcgcgtctatcgttgtggcgtccgtgcagccgcggcggggaggagcggcagcttcggcgtcgtccgggggagccatcgacgacgaacgggaggcgcggggagacgccgcgaagaggaggaggagcaagagcaagagcaagagcaagaagcggacggcggccgaggccgccattccagatggctgctacatggcgctggtcgttacgggcgagccgatagagacggcggcggtgatggaggaggtggcggcagcagatgaggatgcggccgccgaggtgaacaaacgggctgaggagttcatctcggcgttccggcaccacctcagggtcgactccttctcgtctactacaacccggcgaagcaacgctagagcggcggcaccatgctctatctagatagttctggattgcaaacatatttttatggtttccccactttcaaagaatttttaatttgtgctccaagtttttcttcttcttttgagttgtagttgtatactctcttaacgtcagtttcatccaaattccctcactttgccttttcatttgactactcaacaatttaatcaa

SEQ ID NO: 142431 - DNA, 838 bp, Zea Mays
gccttcaaccatcgttagagtttccttggtagtttttttccctcttgtcacagcaccccccacccacacacacccaaggccccaactgcagtgcccatccggcagtcaggtcgatggcggcggaagcagcggcagcggggaaggagaagatgcggacgctagtcagcagcgacttcaagaagttcgatgtggaggagtctgtggcgagggaatcgctgattatcctgaacctgatggcggactgcgacgacagtgacatcccggtcttcaacgtcaacgccaatatcctcgacaaggtcatcgcgtactgcaggaagcacgcctcggcgccgcgcgccgatggcggtgatgcggagccaagtgctgcgagtaacaaggcctcagcggacgatctcaagtcctttgatgctgagttcgtcgatgttgacctggtcaccctcttggagctcattaaggctgcagactacctggagatcaatgggctgctggacctgacctgccaggccgtcgcggacatgatcaaggggaagactccagaggagatacgcgagacattcgacatcgagaatgacttcacacctgaggaagaggctaaagtgaggagggagaatcagtgggcctttgaatgaagaagctgcaggctagctctaacaaaacaatagcaatatcatataaccaggccagagatgaagtgcttgttcaggatgttatgagtcgaaggtttggttggtcgtgagcagactatattgctgttccagtattttggctggtttggttctcaaacattgctggttcttctgcctacccaattttgttttactggttgctttgctttgct

SEQ ID NO: 142432 - DNA, 562 bp, Zea Mays
gaaagcttataaagcagcagtaagacatgcctttggttgattattctttgtgtttgtaagttcattatcaagatggttctttgcatttgttcatacatgcttttggttgattcaggtttggctatcacatgtctgaagttgtaagcttgtaactcatatttttctcaaacaaccttttccaatcctaagctgccgaacaaggagaagaagtgttctaggcaaaagtgttctaattggattaattctagactagaaagagcgaaagatccagatgcactaaatcgaggcctgaaacagttcatggcttggaactgttcctatactaccgaacgggtccgagctatttccaaatatatattatctattgctacttccttcatatatcattactttatgtgttcttgctggttacatttgccaccattgttggaagcttgattacgttggagtttgtcccaccaatgtcactgtaccgcataatctgagctctctccaccttcatcatcgggacttttctcaaacttctccggtgtacacttgggagacttgagtgatcctgaaa

SEQ ID NO: 142433 - DNA, 1920 bp, Zea Mays
ctgcggatagcctaacctcctggagacgggcgttggagcctgacaccttcgcggcttcgcgcaccaccatcccgccacgtcggctcaccttccccgctgtggccgcaccagccccacctaccaaccgcagtaccatctcagctgtccattcatattgccaactgcccagatcgatccgtctcactcatcaccgtgctcctcgcccacctaccgcgccacacccgcctcaaatcaccggctcggaaaccaccaccaattacatcggcgtcaccgtcaccgccgctttccgagctctcatggcggcgtccgcgtcctccctccttgccgcccccgcatcctcatcctgtggggccatctccccccagctccctcgtggagctccggccgctgcctccgtcgcttcgccgtcgcgtcactcctgctacctcctccgcgcttccccttcgaggcgccatcggagtcgcttcgtagccaacgccgctcccaccatgcagcctccggcggagtccagggtctccacggtagtcgatgtcgacctcggcgaccgtagctatccgatctacatcggcgcaggcctcctcgacgagccggacctgctgcagaggcatgttcatggtaagagggttctggtggtgaccaacacgaccgtcgcgccgctttacctggacaaggtgacatgggcactcacccacaacaacctgaatgtatcagtggaaagcgtgatcctgcccgacggtgaaaagtacaaaaatatggacacgctgatgaaggtgtttgacaaggcagtcgagtcccgttttgaccgccggtgcacatttgtagcactgggtggtggtgtcattggggacatgtgtggttttgcagctgctgcattcctccggggcgtcaatttcatacagataccaactactctgatggcccaggtggattcatctgttggtgggaaaaccgggattaaccacccactaggaaagaacttgattggggcattttaccagccacaatgtgttctaattgacacaaatacactgaacacattgcctgacagggagctagcttcaggcattgccgaggtagtaaagtatgggctcataagggatgcaccattctttgagtggcaagagaagaacatgccgaaattgttagcaagagaaccaaatgctttggcatatgctatcaagagatcatgtgaaaacaaagctgaagtggtggcacaagatgagaaggaaagtggccttcgagcaacactaaacctgggtcacacatttggccatgctattgagactgggacaggatatggagcatggctccatggggaggctgtcgcagctggaacagttatggcaactgacatgtctcaccgcctggggtggatagatgactccatcagaaaacgtgtggttgacatactaaagcaagccaaacttcccattgcacctcctgagaccatgaccgtagagaagtttaaaaacatcatggctgttgacaagaaggttgctgatggtctgttgagactcatccttctgaaaggaccactagggtgctgtgtatttacgggggattatgaggggaatgcactcgatgaaaccctacatgcattctgcgacaactgagacatcccagttttggacatcacttctgtatgctagtactaggctatgtatcaatcagagaaaatattgtggtgtacattatcttcactgcctcattggtatatttttgtcagaaataatggtatattgttttaagtgctggtttgagtttgtagagaaccatggctaatcaactgcggtgcggtcagttgttctctagtaataatagtaaagaagcttcactacatcccttctgtctgttactgtcaagtaacaatactcgtagagatttaaacctgtatttgtgtcaattaaatcattacctcgt

SEQ ID NO: 142434 - DNA, 2040 bp, Zea Mays
ctgcggatagcctaacctcctggagacgggcgttggagcctgacaccttcgcggcttcgcgcaccaccatcccgccacgtcggctcaccttccccgctgtggccgcaccagccccacctaccaaccgcagtaccatctcagctgtccattcatattgccaactgcccagatcgatccgtctcactcatcaccgtgctcctcgcccacctaccgcgccacacccgcctcaaatcaccggctcggaaaccaccaccaattacatcggcgtcaccgtcaccgccgctttccgagctctcatggcggcgtccgcgtcctccctccttgccgcccccgcatcctcatcctgtggggccatctccccccagctccctcgtggagctccggccgctgcctccgtcgcttcgccgtcgcgtcactcctgctacctcctccgcgcttccccttcgaggcgccatcggagtcgcttcgtagccaacgccgctcccaccatgcagcctccggcggagtccagggtctccacggtagtcgatgtcgacctcggcgaccgtagctatccgatctacatcggcgcaggcctcctcgacgagccggacctgctgcagaggcagtcaaattatacattttttctttaactgttagactggagtggtcagcctgtgatccttatttatgttttctcaggcatgttcatggtaagagggttctggtggtgaccaacacgaccgtcgcgccgctttacctggacaaggtgacatgggcactcacccacaacaacctgaatgtatcagtggaaagcgtgatcctgcccgacggtgaaaagtacaaaaatatggacacgctgatgaaggtgtttgacaaggcagtcgagtcccgttttgaccgccggtgcacatttgtagcactgggtggtggtgtcattggggacatgtgtggttttgcagctgctgcattcctccggggcgtcaatttcatacagataccaactactctgatggcccaggtggattcatctgttggtgggaaaaccgggattaaccacccactaggaaagaacttgattggggcattttaccagccacaatgtgttctaattgacacaaatacactgaacacattgcctgacagggagctagcttcaggcattgccgaggtagtaaagtatgggctcataagggatgcaccattctttgagtggcaagagaagaacatgccgaaattgttagcaagagaaccaaatgctttggcatatgctatcaagagatcatgtgaaaacaaagctgaagtggtggcacaagatgagaaggaaagtggccttcgagcaacactaaacctgggtcacacatttggccatgctattgagactgggacaggatatggagcatggctccatggggaggctgtcgcagctggaacagttatggcaactgacatgtctcaccgcctggggtggatagatgactccatcagaaaacgtgtggttgacatactaaagcaagccaaacttcccattgcacctcctgagaccatgaccgtagagaagtttaaaaacatcatggctgttgacaagaaggttgctgatggtctgttgagactcatccttctgaaaggaccactagggtgctgtgtatttacgggggattatgaggggaatgcactcgatgaaaccctacatgcattctgcgacaactgagacatcccagttttggacatcacttctgtatgctagtactaggctatgtatcaatcagagaaaatattgtggtgtacattatcttcactgcctcattggtatatttttgtcagaaataatggtatattgttttaagtgctggtttgagtttgtagagaaccatggctaatcaactgcggtgcggtcagttgttctctagtaataatagtaaagaagcttcactacatcccttctgtctgttactgtcaagtaacaatactcgtagagatttaaacctgtatttgtgtcaattaaatcattacctcgtcacttctaaattttaatacggagtagttcactttgactttgtc

SEQ ID NO: 142435 - DNA, 1180 bp, Zea Mays
gtactcctagtagttgtgaaagatgtttagtgaactgtaattagaaagaaagtttgcactctagtttagcccttacaatagcattacattatattatattgctgaactttcgcttgttgagaaaatgcagaatagttttctggcataatttgaatgttgtaattaaatttccatcttgctgttaatgttacatatagcgtattgctgaactttcgcttgttgagaaattgcagaatagtattctggcatatattgaatgtagtaattaaattttcatcttgctgttaacgttgagcttgaaatgtatatctatagagaaccaaatgctttggcatatgctatcaagagatcatgtgaaaacaaagctgaagtggtggcacaagatgagaaggaaagtggccttcgagcaacactaaacctgggtcacacatttggccatgctattgagactgggacaggatatggagcatggctccatggggaggctgtcgcagctggaacagtaaatcacttgagaattattatatagcctcttagtattttgtagtgttgttttcttatcttttgcttatgtttgtgggggtggaactaccctaggttatggcaactgacatgtctcaccgcctggggtggatagatgactccatcagaaaacgtgtggttgacatactaaagcaagccaaacttcccattgcacctcctgagaccatgaccgtagagaagtttaaaaacatcatggctgttgacaagaaggttgctgatggtctgttgagactcatccttctgaaaggaccactagggtgctgtgtatttacgggggattatgaggggaatgcactcgatgaaaccctacatgcattctgcgacaactgagacatcccagttttggacatcacttctgtatgctagtactaggctatgtatcaatcagagaaaatattgtggtgtacattatcttcactgcctcattggtatatttttgtcagaaataatggtatattgttttaagtgctggtttgagtttgtagagaaccatggctaatcaactgcggtgcggtcagttgttctctagtaataatagtaaagaagcttcactacatcccttctgtctgttactgtcaagtaacaatactcgtagagatttaaacctgtatttgtgtcaattaaatcattacctcgt

SEQ ID NO: 142436 - DNA, 771 bp, Zea Mays
cacaacgcattggaacattcgattactagaatagtacaactttgggacgagaccatgaagctcgcttgctcgctaaagagaacggacagtcacgcagatcacatctttgttgcgatgccatagccgcatcgtcgcagctaaagcttgaggatccgtcggagctcgtcggtggcgccgacatccacggcgcaggcggtcggcggcgtgactgtgagcaacagggacgtaggcatcggtacgctgctcggcggtggggacacggagtagagcgagtccgccgtctccgtccactcctccagtccagtccccggcgccaccctcttcttggatggttcaggagcgacggccatcttgtgtggctgtggctccttggcgcgcggagcctggggtggcgccggcggtcgcggaaatgacggggcgttcttcgtggcgtggcgggctgtgcaggtgttgtagtacggcgtgcaagccatcgagatcaagatatggagtcagaattctaagatctaaaaaataaagtgtgttagttccttgcgagctgatctgagcaacaacagcacagatagatcaacaaagtttcggaacaaatcgaagctgcagagctaagcaaacaattaaaagaaactccagccagcaaaaaaacaagtggagatggatcgaagcaaaagaaggccgcagcttgctcgctgatcttaatcaaataaaacagatcaagataaatagcagcttatgctacaaccaaaagggtcagtatcatgtcaactactgctc

SEQ ID NO: 142437 - DNA, 2559 bp, Zea Mays
cagccaggtggtttggggcatccacgtccaagggaacgggaaatcacaccacgggtaggggtagccctggcgcgcacgtcagcgtcacgagccacgcgcgaacttcaccacggacctgtggagaagatccaccctcatgcacacgcgctagtttagtgaccttaattatagcatttgcgccccacggattattgttaaccccaccttggatcgcggccgccgtgtgcgtgagcagcgacgtgccgacagccgaaggcccaaaccaattcgattcctcccccctgccggccgaatcaaatttctccgccgccgcccggagcaccgatccccgagagttccatggactcgccttccgcatcgaggtattagcaagcctcgccgcgtcgcgccgcactgccccgccccgacgcctgctgcgctggttttggaaggatccaagatgggtgtaatcagcacagtgcttggtttctttgggtttggatttgggttatctgctggcattgtaattggttacttcttcttcatctacgtacaaccaactgatgtcaaggatgtcaaggtccggccgcttgtagaatatgattcaaaatccttggagggcatccttcccgaaattcctttgtgggtcaagaatcctgactatgatagaattgattggttgaataggttcttggagttgatgtggccttatcttaacaaggctatctgcagaactgcacaagatatcgcgaagccaattattgctgagaatactgctaagtataacatagacactgttgagtttgaaacacttactttgggtagcttgccacccacctttcaagggatgaaagtctacatcacagaggagcaagagctgataatggaaccatctcttaaatgggctgcaaacccaaatattactgttgttgtaaaagcctatggtttgaaagctactatccagattgtggatctacaagtctttgcatcacctcgcattactctgaagccattggtgcctacatttccttgctttgcaaaaatccttgtctcacttatggagaagccacacgttgactttgggctaaaacttcttggagcagatgtaatggctattcctggtctttacatatttgttcagaccatggacccaaatgatgtacaaaatgagaaatctcgtggtgagcttactctagagctcatatacaagcctttcaaggaagaagatatagagaaagaagatacagagagtgctgatgtgatagagaaagctccagatggtactccagctggtggtggcttgctttatgttattgttcatgaagcccaagatcttgaggggaagcaccatacaaacccatatgcaaaaattattttcaaaggcgaggagaagaaaacaaaggtcatcaagaagaatagggatccaagatgggaggatgaatttgagttcgtgtgtgaggagcctcctgtaaatgataaactgcatgttgatgtcctaagtaaagcctcgaagaaagggctaatacatggcaaggaaactttgggctacattgatattagcctcgcagacgtgatcagcaacaagcggattaatgaaaagtaccatctcatagactcaaaaaatggtcagatccaaatcgagttgcagtggagaacttcctagacaggaaaaagccagaatgcctgaatgtagtacacacgtatgttcctatattcagtttgcggatgtctgtgattgagattgagctcgtgtagatagtttctttgtttatggacatctttgttcagatctcctcttagttgctcaaatttccgacaagcactatgtatgcatgtttatggaactgaacctattctttgactaatggcagaccatacaagagcattctggcattggtgtggaatttgcatcaaatcaaaagacctcaaagtaaaactatagaactggaaaataaaactttaggaacatactctacttcatagctttcaaaccaggcgacggttccgattctagacctggtcgcttttagttttactttactttgactattgacaaacccttcttccattacctgcatcaaatcagaagacttcaaagccctataaggcgaatgctccaagacgtagcaggcgggtggctggaattggtgtggaatttgctatgcaggattggggtggaaaatcttccaagaaagctatgaaggccttgcacatcatcagtaatggagaaatcagtcaagaagcccaacgggagtatgctgcgcttttcaaacatcctctgtccccgtctgttagcaatactcactaatccctaaccgaacagcaggagtggaggaagatacacagcaggagtggaggaagatacaagagaaggtagggaagatcacaggaaggatggagtatcttctgcagagagaaaatagttgttcatgttttcgataatcctgacccttccatcaggtagtgcataagtactacttgcttacaagctgccaaaccaggcccagctatcctcgcgcacgcaggcgcccaacaggtcactttcttcggtctggcccatatacacgatcgctcagatga

SEQ ID NO: 142438 - DNA, 1504 bp, Zea Mays
gttaaccccaccttggatcgcggccgccgtgtgcgtgagcagcgacgtgccgacagccgaaggcccaaaccaattcgattcctcccccctgccggccgaatcaaatttctccgccgccgcccggagcaccgatccccgagagttccatggactcgccttccgcatcgaggtattagcaagcctcgccgcgtcgcgccgcactgccccgccccgacgcctgctgcgctggttttggaaggatccaagatgggtgtaatcagcacagtgcttggtttctttgggtttggatttgggttatctgctggcattgtaattggttacttcttcttcatctacgtacaaccaactgatgtcaaggatgtcaaggtccggccgcttgtagaatatgattcaaaatccttggagggcatccttcccgaaattcctttgtgggtcaagaatcctgactatgatagaattgattggttgaataggttcttggagttgatgtggccttatcttaacaaggctatctgcagaactgcacaagatatcgcgaagccaattattgctgagaatactgctaagtataacatagacactgttgagtttgaaacacttactttgggtagcttgccacccacctttcaagggatgaaagtctacatcacagaggagcaagagctgataatggaaccatctcttaaatgggctgcaaacccaaatattactgttgttgtaaaagcctatggtttgaaagctactatccagattgtggatctacaagtctttgcatcacctcgcattactctgaagccattggtgcctacatttccttgctttgcaaaaatccttgtctcacttatggagaagccacacgttgactttgggctaaaacttcttggagcagatgtaatggctattcctggtctttacatatttgttcagaccatggacccaaatgatgtacaaaatgagaaatctcgtggtgagcttactctagagctcatatacaagcctttcaaggaagaagatatagagaaagaagatacagagagtgctgatgtgatagagaaagctccagatggtactccagctggtggtggcttgctttatgttattgttcatgaagcccaagatcttgaggggaagcaccatacaaacccatatgcaaaaattattttcaaaggcgaggagaagaaaacaaaggtcatcaagaagaatagggatccaagatgggaggatgaatttgagttcgtgtgtgaggagcctcctgtaaatgataaactgcatgttgatgtcctaagtaaagcctcgaagaaagggctaatacatggcaaggaaactttgggctacattgatattagcctcgcagacgtgatcagcaacaagcggattaatgaaaagtaccatctcatagactcaaaaaatggtcagatccaaatcgagttgcagtggagaacttcctagacaggaaaaagccagaatgcctgaatgtagtacacacgtatgttcctatattcag

SEQ ID NO: 142439 - DNA, 2908 bp, Zea Mays
cggaccgttactgcacacctgtttgtcacaggcaacacgcgtctccgtcctcccacctcactctagccttctcccccagcagcaaaaatggtaaaaggtgcgaagactgcgtgacatgtgaagaagagggcagagagagtgctccagcattagcctttgctctcgtctgctcgctcaacggctacttcctgcgtcgccgtggtgctgggtttgggagactgggggaggcggattgtaggaagagctggtgtgtggtgcggtggtcaccaaagagcgccggaaccggagcggcgatgggctgctgccagtcgcggctggagcggctggaggcggtgtcgcggtgcaaggctcgccggcggtacaccaagcacctggtgcaggctcggcgggacatggctgcggcgcacgcgctctacctgcgcgcgctccgggccaccggcgcctcgcttctacacttcgccagcgccgaggccgaccacccgcacccccattcctccgctgccgacgacgccgactgggacgacgccgccaccaccgtcgtcgacgcacccatcgccgcgccgccgcccgtggtcacggccgctgcggcggtggccgcgcccccttccatcgtcaccgccaccaccacctccaccactcccagcgagctcaccgtcgttgcggtaccccgcggcggcgccgggaagaaggacctcgcggagatcgccaccgagcttgatgagtacttcctcaaggcagccgacgccggcgcccgcgttgctgcactactcgaggctcccgtttgcgagccccccgagcccaccaccaacagcagcctaccagggaaggtacttagttacagcaagagcttgaagcccatgggatgggcatggggcggcggagggtatgggaaaggtaacgatgggttcacaaggttcgggagaggagacggtggaatgcccatgggcaatggcggaggcggtggaatgctcagtcattcatccaccgtggagaagctctacgcatgggagaagaagctgtttcttgaggtcaagagttacgaggggtataagcaggagcatgataagaaggtcagtctgttgaggaagcaagaggtgaagggtgtggattacttgaagatggagaagaacaagatggagattgagagcctggagtccaagatgctggttgccaaccagtccatcgagaccaccacttctgagataatcaggctcagagaatccgagctatttccccagcttcttgagctgattgctggcttgatgagcatgtggaggggtatgtacgagtgccatcaagttcagacccacatcgtgcagcagctggagtacctgaacaatgctcggaataccaatccgacttccaatgtccaccggcaagcagctcttcagctcgagatagaggttgacaggtggtattcagccttctgtagtctggtgaaatcccagagagactacgtctactcattgaccggctggcttcgtctatcgctgttctgccaccacgacccactgactaaagctcagaactcagatatctatggcttgtgtgaggaatggcagctagccatcgacagaatcccagataaggtggcctcggaagggatcaagactctcctgacagtgattcatgctgtcgtcattcaacaagctgaggagcataagcagaagaagaggtcggagtctgcattcaaagagtttgagaagaaggcagaggagctgagagccctggagtcaaaatatgtcggcgctgaaggttacagagaaatgtcacgaaaatcatcggtagctgacaagcgggcgaaggttgaggctctgaggagccgtgccgacgaggagaagatcaaatacgagaagagcatcggggtcaccagagcaatgaccctgaataacctgcagactggcttccctaacgttttccaggcgatgacgggcttcgccagcgtgtgcatggaggcatttgagtcggtgtacaacttcaagcggagctcggacccgaagaggctgctgacctgaagcaatgttgtataaaatgtatacagtcctaggtttttagtaacaatgataccttgcaacctttgtctggctgttatcaggttctaatggcgcaaaaaaaaaaccccccgtcaagttcaattacaccaagtaattgaaacttgaggccttgttttcctttttggttgagataatctcttgcctcggatgcaggttccaaaaggctcagctttgttttttcaatcggaagaaggtttgaactgtttgtttgcttccagcagctaatgacctgtttgtagcttcatgtcacgagctgagacttggatgggactggtaacagtagtctgtgcaattcagaaatgggccacacctgttgtttttccagcgcctaaattatatttctggtgatatggtcagtgaattctaattgaggcttttcagcttcaatttgcaagttcaacaagaggactgaaccgcacggcacacctgcctatccaatctcctataactttttttttctttcgaaaagttataccctctatgaagatctgaccctaagccacaccccctatgaagatctgaccctaagcagtggagagtgggacacccaggaaggataatcccttggcaccagctattgggtacttgatttcaattccctgaatgcatttgagaatcaaggcaacacaagttagtaatgtgaaccttcgacctgatctaaagtgtcaatatggagaacgaaggtcatagaaatgcaaacggaaatgatgtgtaatggagtaacacgacacaatggtgtatgaaaactcatctttcttgtcttgacattttcattccatctcccattacactagataaatttataagcatacattctgctccttaacagaaggtagaacgaaagttcttcggag

SEQ ID NO: 142440 - DNA, 2398 bp, Zea Mays
cttctcccccagcagcaaaaatggtaaaaggtgcgaagactgcgtgacatgtgaagaagagggcagagagagtgctccagcattagcctttgctctcgtctgctcgctcaacggctacttcctgcgtcgccgtggtgctgggtttgggagactgggggaggcggattgtaggaagagctggtgtgtggtgcggtggtcaccaaagagcgccggaaccggagcggcgatgggctgctgccagtcgcggctggagcggctggaggcggtgtcgcggtgcaaggctcgccggcggtacaccaagcacctggtgcaggctcggcgggacatggctgcggcgcacgcgctctacctgcgcgcgctccgggccaccggcgcctcgcttctacacttcgccagcgccgaggccgaccacccgcacccccattcctccgcggcccaccacgagccgccgccgtccccaccgccgccgcctcccccgccgccgtttagcccctccacgacagccaggtcctggacgaccaattcctcctcgatctccgcgtccgcgatcttgccccctcccccgccgccgccactgccgccactgccgtccagctgggacttctgggaccccttcgcgccctcctcctcccgctccgctgccgacgacgccgactgggacgacgccgccaccaccgtcgtcgacgcacccatcgccgcgccgccgcccgtggtcacggccgctgcggcggtggccgcgcccccttccatcgtcaccgccaccaccacctccaccactcccagcgagctcaccgtcgttgcggtaccccgcggcggcgccgggaagaaggacctcgcggagatcgccaccgagcttgatgagtacttcctcaaggcagccgacgccggcgcccgcgttgctgcactactcgaggctcccgtttgcgagccccccgagcccaccaccaacagcagcctaccagggaaggtacttagttacagcaagagcttgaagcccatgggatgggcatggggcggcggagggtatgggaaaggtaacgatgggttcacaaggttcgggagaggagacggtggaatgcccatgggcaatggcggaggcggtggaatgctcagtcattcatccaccgtggagaagctctacgcatgggagaagaagctgtttcttgaggtcaagagttacgaggggtataagcaggagcatgataagaaggtcagtctgttgaggaagcaagaggtgaagggtgtggattacttgaagatggagaagaacaagatggagattgagagcctggagtccaagatgctggttgccaaccagtccatcgagaccaccacttctgagataatcaggctcagagaatccgagctatttccccagcttcttgagctgattgctggcttgatgagcatgtggaggggtatgtacgagtgccatcaagttcagacccacatcgtgcagcagctggagtacctgaacaatgctcggaataccaatccgacttccaatgtccaccggcaagcagctcttcagctcgagatagaggttgacaggtggtattcagccttctgtagtctggtgaaatcccagagagactacgtctactcattgaccggctggcttcgtctatcgctgttctgccaccacgacccactgactaaagctcagaactcagatatctatggcttgtgtgaggaatggcagctagccatcgacagaatcccagataaggtggcctcggaagggatcaagactctcctgacagtgattcatgctgtcgtcattcaacaagctgaggagcataagcagaagaagaggtcggagtctgcattcaaagagtttgagaagaaggcagaggagctgagagccctggagtcaaaatatgtcggcgctgaaggttacagagaaatgtcacgaaaatcatcggtagctgacaagcgggcgaaggttgaggctctgaggagccgtgccgacgaggagaagatcaaatacgagaagagcatcggggtcaccagagcaatgaccctgaataacctgcagactggcttccctaacgttttccaggcgatgacgggcttcgccagcgtgtgcatggaggcatttgagtcggtgtacaacttcaagcggagctcggacccgaagaggctgctgacctgaagcaatgttgtataaaatgtatacagtcctaggtttttagtaacaatgataccttgcaacctttgtctggctgttatcaggttctaatggcgcaaaaaaaaaaccccccgtcaagttcaattacaccaagtaattgaaacttgaggccttgttttcctttttggttgagataatctcttgcctcggatgcaggttccaaaaggctcagctttgttttttcaatcggaagaaggtttgaactgt

SEQ ID NO: 142441 - DNA, 1980 bp, Zea Mays
ggaaccggagcggcgatgggctgctgccagtcgcggctggagcggctggaggcggtgtcgcggtgcaaggctcgccggcggtacaccaagcacctggtgcaggctcggcgggacatggctgcggcgcacgcgctctacctgcgcgcgctccgggccaccggcgcctcgcttctacacttcgccagcgccgaggccgaccacccgcacccccattcctccgctgccgacgacgccgactgggacgacgccgccaccaccgtcgtcgacgcacccatcgccgcgccgccgcccgtggtcacggccgctgcggcggtggccgcgcccccttccatcgtcaccgccaccaccacctccaccactcccagcgagctcaccgtcgttgcggtaccccgcggcggcgccgggaagaaggacctcgcggagatcgccaccgagcttgatgagtacttcctcaaggcagccgacgccggcgcccgcgttgctgcactactcgaggctcccgtttgcgagccccccgagcccaccaccaacagcagcctaccagggaaggtacttagttacagcaagagcttgaagcccatgggatgggcatggggcggcggagggtatgggaaaggtaacgatgggttcacaaggttcgggagaggagacggtggaatgcccatgggcaatggcggaggcggtggaatgctcagtcattcatccaccgtggagaagctctacgcatgggagaagaagctgtttcttgaggtcaagagttacgaggggtataagcaggagcatgataagaaggtcagtctgttgaggaagcaagaggtgaagggtgtggattacttgaagatggagaagaacaagatggagattgagagcctggagtccaagatgctggttgccaaccagtccatcgagaccaccacttctgagataatcaggctcagagaatccgagctatttccccagcttcttgagctgattgctggcttgatgagcatgtggaggggtatgtacgagtgccatcaagttcagacccacatcgtgcagcagctggagtacctgaacaatgctcggaataccaatccgacttccaatgtccaccggcaagcagctcttcagctcgagatagaggttgacaggtggtattcagccttctgtagtctggtgaaatcccagagagactacgtctactcattgaccggctggcttcgtctatcgctgttctgccaccacgacccactgactaaagctcagaactcagatatctatggcttgtgtgaggaatggcagctagccatcgacagaatcccagataaggtggcctcggaagggatcaagactctcctgacagtgattcatgctgtcgtcattcaacaagctgaggagcataagcagaagaagaggtcggagtctgcattcaaagagtttgagaagaaggcagaggagctgagagccctggagtcaaaatatgtcggcgctgaaggttacagagaaatgtcacgaaaatcatcggtagctgacaagcgggcgaaggttgaggctctgaggagccgtgccgacgaggagaagatcaaatacgagaagagcatcggggtcaccagagcaatgaccctgaataacctgcagactggcttccctaacgttttccaggcgatgacgggcttcgccagcgtgtgcatggaggcatttgagtcggtgtacaacttcaagcggagctcggacccgaagaggctgctgacctgaagcaatgttgtataaaatgtatacagtcctaggtttttagtaacaatgataccttgcaacctttgtctggctgttatcaggttctaatggcgcaaaaaaaaaaccccccgtcaagttcaattacaccaagtaattgaaacttgaggccttgttttcctttttggttgagataatctcttgcctcggatgcaggttccaaaaggctcagctttgttttttcaatcggaagaaggtttgaactgt

SEQ ID NO: 142442 - DNA, 1655 bp, Zea Mays
cattccttgccgagcgccgccgcggctggagctgggttcagtcggcgcggccccgttctgcggcgaactttttcttaatggtaggggcggtgaacgttgtggacttgcatctgtctcctctctcctgtgagcgagcgcatccgtggcggtggccggcgtggtgttcgacgaaatgcaaatctcggcgatgtttgcatctctcgttacattagaggcaacagaaaatcactggttcacagattcagacagagtcaaaggagcatatggatggtcattataattttatgtcatcttttggtggatgtggatgcactaagaaaaaggagcttatgggacagggcatctgtgcatcagcgacaggaaaagagagatgaatgaacgaacctaatccatccatcagcagcgtaaccaaatcaggcacaggtttgggtattaatttaaagcagtggaagtgatgagctgggagcaggcctaacccttttccaccaactctagaagagctcccgcgatccagtcaagtgccctataaaatccagccccgcttggcttcacccacccttgggctcgcagtcgcagcaacgatggggaggtcgccgtgctgcgagaaggcgcacacgaacaagggcgcgtggaccaaggaggaggacgaccgtctggtggcgtacatcaaggcgcacggcgaggggtgctggcgctcccttcccaaggccgccggacttgtgcgctgcggcaagagctgccgcctccggtggatcaactacctgcggcccgacctcaagcgcggcaacttcacggaggaggaggacgagctcatcatcaagctccacagcctactcggcaacaaatggtccctgatcgctggaaggctgccgggcaggaccgacaacgagatcaagaactactggaacacgcacatccggcggaagctgctgagcagggggatcgacccggtgacacaccgccccatcaacgagcacacgtccaacataaccatatcgttcgaggactggggccaggggaaggcgctcaagtgccccgacctgaacctggacctctgcatcagcccgccgtgccaggaggaggaggaggccatgctgctgaggccggtgaagcgggaggaggccgggctctgcttcagctgcagcctggggctccccaagagcgcggactgcaagtgcagcaacttcctcgggctcaggaccgccatgctcgacttcagaagactcgagatgaaatgagagcttccatccatctctgtctgtctctctctgtaacttcacccctgataacacgcagtagtagtagtcaccaactgatttgtcgctccattaattctgtctctctctctctctctctcgctatgtaaattagcatcaccaactgattgattgatcatgggcaattaataatacttgttgctgctgcaaattgacattaatcacggttgccatgtgcagctgagacagatcttacgacgtttaccaaaccactagtagagcagcagcagcaagcatccaaatggcttcctgctgtgggctgtcccccggcgatgcggtaggggcgccgccccctgctgtgggctgtgggctgtgtggcctgcggaaaaaaggcagctggttttggaaggatctcgcgcagcaacttgcctgatcgat

SEQ ID NO: 142443 - DNA, 1157 bp, Zea Mays
ccgcagcccacagacccacacaagtcacaaggcagccacagccatataagcatccttcttctaaaacaattaagatggtgctatggaacataaaaacaagacacacaaagggaggaataccacaatacagggactaggtgtccctaggaccacccttctttgcagcctcagctgcagccttctctgcctctatctcagcaacatattcatcaatctcagcctcctcaagttcccggagaccatccttctttgtcatcactgcaacctcgatgttcttcccaccactttcaacaacctatcaaagtgcacgaatagcaagcttgatggtctccttgccggaggtctccttgtagttcttctccagaaactcacgcatagagttggagttccttcccgtggcgttcgccttccaagcagagaaggtaccagaaggatcggtctggtacagcgctggcttgtcggtgtaggggtcgaagccgacaatgagtgtggagaggccgaaagggcggactccaccactctgtgtatacttctgctgcagcccagcgatgtagcgggtgatgtactcgacggtgacggggtcctcgacggtgagtcggtggctctggcactcgacccgcgcgcggttgatgagcacgcgtgcgtccgccttcagccccgcgcatgccagagcgatgtgggtgtccaggcacgcgatcttgcgcacggacctggggagacatgaattcggggtcagagatattagtttgagtcgggaatcgcgagatctggtcggaggatcgatgggagggacggagggtttgctacctggagtcctggagcttgggggttgacttcttctccacaccgaggacgacggtgtccgtgccgcggacgccgacggcggcgttgcccttgcggacggcctccagggcgtactcgacctggaagaggtggccgtcgggggagaagacggtgatcgcgcggtcgtagcgggccatcgtgctggcgtcgccggcggttagggtttgagcttgcttcctggccggtggtggtggccgtacctttgcttgtttgctgaattttttctgggccttgtcttgttcaggggcgtttgggaaaaaggggtgcagtctgtttctacttgggcttcgtgtttgtgtccgtcttgcctgcag

SEQ ID NO: 142444 - DNA, 1145 bp, Zea Mays
aatatgagggcgctcgctcgcctgcctataagtactacccacgcgtatgcttgctaggcattcaccgtccacgttccatatggcttcctgcaggatggcactcctccttggcttgctgctgctagtagtagcttcgcccgcgatcgctgatgacgactccggtatctactaccagctggctcttatgtggccaggagcatactgcgagcagaccagcgctgggtgctgcaagccgaccaccggcgtctcgccggcgcgcgacttctacataacgggcttcaccgtccttaacgcgaccaccgacgctgcagtgacgggatgcagcaacaaagttccttacgaccctaacctgattaccggcatccaaggcctgaatcagtactggagcaacatcaggtgccccagcaacaacgggcagagcagctggaagaacgcctggaagaaggccggcgcctgctccggcctcagcgagaaagactacttcgagactgccctctccttccgtagccggatcaacccactcgttcgcctcaaagccaaaggtaaactaactaagcatatattatattcgtctactagctgcagtacgtctgtctgaatcttctgcatgcttgcaatgcaggtatcgagccggacttcgggctctacggcctcaaggcgatcaccaaggtcttcaagagcggcatcaacgcgacgccggtgatccagtgcagcaagggccccttcgacaagtacatgctgttccagctctacttctgcgcggcggggaacggcacgttcatcgactgccccgcgccgcagcagtacacctgctccaaggagatcctcttccaccccttcaagaagtggatgctcaagcagcagctcaaccaggacgacgaccctttccagctgcctggcgtcgccatggacaactgatacaccgtaccgtcgtctctgtttgcgtttctgtcaagtgtgcatggaataatactgtaactgtgtttcctgccgggcaatgcactgtgatatgatgcccaacgaataaatgtcgcttttatttttattcgacttcccccctgtaccgtgtggaaataaacctattataagcatcgtgttgaaactcatgatatgcatgagcagctagtgaaaagtttgaatcctag

SEQ ID NO: 142445 - DNA, 1411 bp, Zea Mays
aatatgagggcgctcgctcgcctgcctataagtactacccacgcgtatgcttgctaggcattcaccgtccacgttccatatggcttcctgcaggatggcactcctccttggcttgctgctgctagtagtagcttcgcccgcgatcgctgatgacgactccggtatctactaccagctggctcttatgtggccaggagcatactgcgagcagaccagcgctgggtgctgcaagccgaccaccggcgtctcgccggcgcgcgacttctacataacgggcttcaccgtccttaacgcgaccaccgacgctgcagtgacgggatgcagcaacaaagttccttacgaccctaacctgaatcagtactggagcaacatcaggtgccccagcaacaacgggcagagcagctggaagaacgcctggaagaaggccggcgcctgctccggcctcagcgagaaagactacttcgagactgccctctccttccgtagccggatcaacccactcgttcgcctcaaagccaaaggtatcgagccggacttcgggctctacggcctcaaggcgatcaccaaggtcttcaagagcggcatcaacgcgacgccggtgatccagtgcagcaagggccccttcgacaagtacatgctgttccagctctacttctgcgcggcggggaacggcacgttcatcgactgccccgcgccgcagcagtacacctgctccaaggagatcctcttccaccccttcaagaagtggatgctcaagcagcagctcaaccaggacgacgaccctttccagctgcctggcgtcgccatggacaactgatacaccgtaccgtcgtctctgtttgcgtttctgtcaagtgtgcatggaataatactgtaactgtgtttcctgccgggcaatgcactgtgatatgatgcccaacgaataaatgtcgcttttatttttattcgacttcccccctgtaccgtgtggaaataaacctattataagcatcgtgttgaaactcatgatatgcatgagcagctagtgaaaagtttgaatcctagatgaattgaaacacactattatatgattgctaaataaatctcaaatccacaagttggccgagcagccactcaacaagctaataataagcatcgtgttgcaacacacgtttatgtttgccagttaaaaaaaagaaaaggaaaagcctacacaaatctcagccgcttagtatggcacatgcatgatataatatatagttacactagtaattaaagtcagtctgaattttgcatgtgctcattcctaactggacctagctagagtcctcaatgtttcaagcacccatctcataccacttgtgttccctgttcttggctagggatagattcagatcggatacacatggaaacgaatccgaatgttactatt

SEQ ID NO: 142446 - DNA, 977 bp, Zea Mays
gtactacccacgcgtatgcttgctaggcattcaccgtccacgttccatatggcttcctgcaggatggcactcctccttggcttgctgctgctagtagtagcttcgcccgcgatcgctgatgacgactccgtggccaggagcatactgcgagcagaccagcgctgggtgctgcaagccgaccaccggcgtctcgccggcgcgcgacttctacataacgggcttcaccgtccttaacgcgaccaccgacgctgcagtgacgggatgcagcaacaaagttccttacgaccctaacctgattaccggcatccaaggcctgaatcagtactggagcaacatcaggtgccccagcaacaacgggcagagcagctggaagaacgcctggaagaaggccggcgcctgctccggcctcagcgagaaagactacttcgagactgccctctccttccgtagccggatcaacccactcgttcgcctcaaagccaaaggtatcgagccggacttcgggctctacggcctcaaggcgatcaccaaggtcttcaagagcggcatcaacgcgacgccggtgatccagtgcagcaagggccccttcgacaagtacatgctgttccagctctacttctgcgcggcggggaacggcacgttcatcgactgccccgcgccgcagcagtacacctgctccaaggagatcctcttccaccccttcaagaagtggatgctcaagcagcagctcaaccaggacgacgaccctttccagctgcctggcgtcgccatggacaactgatacaccgtaccgtcgtctctgtttgcgtttctgtcaagtgtgcatggaataatactgtaactgtgtttcctgccgggcaatgcactgtgatatgatgcccaacgaataaatgtcgcttttatttttattcgacttcccccctgtaccgtgtggaaataaacctattataagcatcgtgttgaaactcatgatatgc

SEQ ID NO: 142447 - DNA, 2007 bp, Zea Mays
aaaaaccaataaattactccaagaaaagccgtaccctccctctctcagccgctgataaaaccaccggccctgctcctacggccgaccagaccgaacgaatcctcgagtcccgcccgacgcaccggaaagcgacgcgcctccaccgccccttccgtacctcctcctcctcctcctcgggacacacggccaagcaccaagcgaccaaacgcgcgccaccttgattgaactcgaagcaagcaaggaaaggccctaatggcggggacgcgctgggggcggtggctggggctggtgacggcggtgtgggtgcagtgcatctccggcaacaactacaccttctccaactactcgcacgcgctcaagacgctcatgggcctcacgcagctgcagctcaacggcctctccgtcgccaaggacgtcggcaaggcgttcggcctcctcgcggggctggcgtccgaccgcgtccccacctggctcctcctcgccgtcggctccctcgagggcctcctcggctacggcgcgcagtggatggtcgtgtccggggccgtcgcgccgctcccgtactggcagatgtgcgtcttcctctgtctcggcgggaacagcaccacatggatgaacaccgccgtgctcgtcacctgcatccgcaacttccgccggagtaggggccccgtctccggcctgctcaagggctacgtcggcctcagcaccgccatcttcaccgacacctgctccgcgctcttcgccgacgacccggcctcgttcctcgtcatgctcgccgtcgtgccggccgccgtctgcgcgctcgccatggtgttcctccgcgagggcgccgccgctgcggacgaggacgacgacgggcgctgcttcgccgcgatcaactcgctcgccgtggcaatcgcgctgtacctcctcgccgcggacctcacggggctcggcggcgggggcggggtcgtcttcgtcgccgtgctcctggtgctcctcgcgtcccccgctgccgtgccggcgatcctggcgtggaaatcgtgggcggagacccgcaaggccgcgaacgccgacctcgaggaggcggactccttggccgcggccgcgccgctgcttctcgtcgcgaaggaggcgcgtgctcccggagagcggccgcgcctcggggaggagcacacgatcgcgcagacgctcacgtcgctggacttctggctgatgttcgcgtcgttcctgatgggcgtgggcacggggctggccgtgatgaacaacctggggcagatgggcgtggccatgggctacgtcgacgtctccctcttcgtctccatgaccagcatctggggattcttcggtcgcatcgcctccggcaccatctccgagcacttcatcaagtaagttacttattacccgaattggcaattggtatggaatggaatcatataactccaaatccagaagaagaaaatgttgacatatatagtgcccaggacacgaggtattccccgcccgctgtggaacgcagcctcgcaggtcctgatggccgtcggatacatcgtgatggcgctggcgatgccaggctccctcttcatcggctcggtggtcgtcggcatctgctacggcgtgcggctggcggtcaccgtgcccacggcgtcggagctgttcggcctcaagtactacggtctcgtctacaacgtcctcatcctcaacctgccgctcggctccttcctcttctcgggcctgctggcgggcctcctctacgacgcggaagccaccgcggtgcccggcggcggcaacacctgcgtcggcgcacactgctaccgcctcgtcttcctgatcatggcgctcgcctgcgtcgtcgggttcggcctcgacgtcctgctctgcgtccggacgaagagggtgtacgccaagatccacgagagcaagcggttgagcaggtcagccgtggcggagagggtgggttagcttagcaacgcacgcggcgccggcggctctgtggaagcgttggaattcagaagcacctccgcaatttta

SEQ ID NO: 142448 - DNA, 629 bp, Zea Mays
ccgtgaggaggtgctacggtgggcgcaggagggcctccaagcggtgacggaggaacgtaactccctcgccaagtccctggaggacgactggtcctcgggtcaagccctggccgcccaaatagaaggtcttgagaagagtctggagggcatggcttggaccgtggagcaacagggggccgaggcggtggcagacctctttcaagacctcgatgtggtgggcatgccgcgggttggacccatgcggccttgcatgcaagccctgggcgacttcgtatggggtgagctccgcagggctgtccacctcgggtgaagcgagccctggtggtggtcgcttcccactacgagattgacctcgagcgggtgtgcgacggcttcgtacttcccgacaagcccgagctggctgctgctgaagggcagaggctgatggacgtcgtcgaggggccgaggactttgtgggctcgtcacttcgaggacgaggcggtgcctctttccccatcgcatgtggccgccgagcctcctgcgagacctcctccagcggcgtgaagatggccctagccatgcggggaattatcaatgtttttgtaatatatgctaagactctttgcaaatactaagtgtttaaactcata

SEQ ID NO: 142449 - DNA, 90 bp, Zea Mays
aaataatgcaatcgatttgtttgatgcattatcaatctggacatgcactcacgccattgaccacccctatcccagatcccaactaatcaa

SEQ ID NO: 142450 - DNA, 347 bp, Zea Mays
tcgcagaaatgtacaagtcacggctgtaggagctgtgccagaagcggctatgggcgccaccgttgtacgagcctacccgagagggtcctgcccacgcgcccctcttccgtgacactgtcgtcgtgaatggcaagaggttcagtttctgggatgaaggggagaagtcactcaaggaggcgtacaacctcgcggcgatggccgccttctacaacctcatcgcgctctcggttgcggcccttgccccggctgctccaacgccgtccccatccggtaggaatcactccaaggttcaagcatctgcctaccttttgaaattaatcttaccagatgaactgaagaagagttga

SEQ ID NO: 142451 - DNA, 1206 bp, Zea Mays
atggaggatgtgatgcttggggcagctccccttcctgttttggatatgaccaaaaagcgttctcgcagttcagcaataaggattattaaaagcgtttctcgttctgtgaaactggtaaggaatctattggaacatacagttggcaatcttgatcctttgctgactgtgttaaccttttggttaaatactaccacgaggctcggcgtgggggtatacatggcaagcatggacgaggaaacaatatgcaaaaatcaggtggaacaatcacttctcatcacaggttttggatatgaacatgatgatgcctggatgaccaatataaatttgtttaaggaatttactgtcctaagcacgatctgcacatctgagttttctattatcctgctcggctgccccttttttggagtgactgtagcaaccacttctaattcattttctaccgcgacaactggcgctgcaaggtactgcttctctcccattctcactattatgataaggacgtgccaagaatggaggaacaaaaccatgaagactacaactgagagccgtagttggccgagtcgtttaagcagaacatgcctttttaacacagagaagattgatactaagtggcttagttgttttgatggcagctcagactctaacaaacaatgccttctcccctttgtttggactggacttaataacaactacaggatggaaggtgaggcagagaccgtggttggttcttgttctaaaccatgtgggcctctggaggactactacattccagattacattctgaagccaggtgcccaacaagtacttgttgatcatgcggcaccctgccccattgtagtgttcatcaactcaagatctggaggccaacttggaagtagtttaatcaaaacatatcgtgagcttctcaatgaagcacaggttttttatctctcaaaagaggctccagataaggtattgcatcgtttatatgccaaccttgaaaggctgaagatggaaggacacattcttgcagttcaaatttggaggacactgaggctaattgttgcaggcggtgatggtacagctagcaggctgcttggggtagtcagtgaccttaagctttcccacccacctccagtggcaactgtgcctctgggaaccggaaataacctccccttttcatttggatgggtgttggcaaaatcttctaagatggtttctgactaa

SEQ ID NO: 142452 - DNA, 877 bp, Zea Mays
ggcgaacgactcggggtcgtcggtgctgaacgcgtcggaagcggggaggtcagggagcaggaagacgacgacgacaacgtgcctcaactcagcgctgcggcgatggaggcgctccgggagttcctggcgggacagcatcgtccggaggagcagaatgaagctggaggaggggaagacggggtagagctggtcccggaggactggcggttgagccagttctggtacgatgagcgtaccacgcgggagctcgtggaggaggtcgtccgccttgtctccccttctggatcaggctccgccgctggtgccgtggcctgcatcacatgcccgacgctctacgcctgcctgaagaagacggtccccggagtgcccgcgcagctgctggagtacgacgagcggttcgggcagtacggcggcgacttcaccttctacgactacaaccgaccggaggagctaccggcggcgatgaagcacgcctaccgagtcatcattgccgaccctccctatatgagtaaggagtgcttggaaaaggttgccaaaacagtatctttcctcgcacggcctgaaggttcattcctgctgctgctcacaggtaattgtagctcatggcaatgctctgtggagtgaaagcgattaatttgattttactttggtattttgattttgttctgcaatcaataagctatagtttggaattcctatatgatagcttcacgtttataatctagccaagagtgttgataatgacttcaattttttcgagcatggttagtttaatattgctttggcaatttagcaatagtgcaaaactcctagatgatagtttcgccttataatctagctaagggtgctgatgatgactcatggttaactcatataa

SEQ ID NO: 142453 - DNA, 1266 bp, Zea Mays
aaaacaacaaaaaaacccagcctagcagctgctagctattgctactacctcccttctccatccgctccaagttgccatgcgcgctggctacggatgatgactactacaacaagtcgatcccagcagtagaagctagctagcatcgagatctgctggctccggcatatcatcgatccccggccggcccgctgtagagcaagcaaatggccaagtactactggggtatgctgggcgccgcaaccaccacgacccgcgctggtactggtagcagcctcatcaggtccacctggccacctccggcagcgcatggcggcggccgcagcggcgagccgtcgtgggaggagctggccttcgcccaggacgcggcggggcaactcggcggctgcgtctggccgccgcgctcctacacgtgcaccttctgccgccgagagttccggtccgcgcaggcgctgggcggccatatgaacgtgcaccgccgcgaccgggctcgcctccggcagtgcgccccgccggatcatgaccaggagccgatcgccgcgcctcttccagcgccggaattggcggatcaccagcagcagcttctgcaactgcatggatctcccatgaccaaggcggcagtattattctctggccgccctgctgctgcttgctgtactcatcagcaaacttattgcaataacaacagggagggggagggggaggattctcctgctcggtacatatcaacgacgacgaccatcatcaaggacagcaagagcaaggtactcatctccatacctgcagcaacgacagcaacggggagcaaaaaagccgctactactatagcaatcatcggtgaggaggaggaggaggaagaagaagaggaagagatcatggtgacggggcggaggacgaaacgaaggcggctagtccatcagccgttctacgacctgcggcggcttccgccggcatcatcatcacccaataaaggaggagttgaagatgatgatgcaaaggtacccaaattaagcagccctagtagcctcagtcatcatcttgcaggccggcaagaagaagtggatctggagctcaggcttggcactagctgctagctagtcgcgatccgccgtccggtccctaaattaagttgcgtgaatggatccatatatctctcttttcacttcaccataattaagatcgagtgtgtgcgtgcacaactgaatcatatatatcatctgctgcttgcttcattcatatatcatatatatagtatgcttctcgtgatac

SEQ ID NO: 142454 - DNA, 887 bp, Zea Mays
gctccaaccgctcgcagccctaaatctaatccgtcgtcttccgggtcgccatccgccctcatcccctcacgctcaaaccaaaccctagcaaaccctagcagatgtcagcccacgacgaggacggcggccgccgccgcaggacccttgccaaggtttcactctcgttggtctcgagcaccatggcggaggcctccacctactccttagacgcagttaagacgcgccacctctagctccaccacagccccggcggcgcgggcgtgcgcggcgtaatccgggtcgcggccgagctcgtccgagatagcggggtttaacggggcttaaccccctccgttctccgccacctgatgtacacccgctttgcatcgtggggttccagcatcttcggtccaccctcgctagcaactgggggaggatggcctttttgggaaggcgctcgccggtggactttcaggtgttgctgcacagtcactgatagggcagccgttctgggtttcctatgagaaactgcaccaaacatcaggtgcaatgggctggcttttgataaactcgaatgtggaggtggcttgctactgcaagccttgttactggcttataaatctggcttccaagtgtgggatgtggaacatgtttatgatgtaagatagctagatacagacatgatggctctatttcatttattcaagtgctaaaggatccaattttcacaaccgaatctcgagacagatttgtagatgtacggccatcgctagctcttgcatgtgatcgtgtatgattgcaacaatcctgacaaaatatggtggtactttatattttggcatattgtgcacaaaaacaagtgtcttctatgaccaccgtgatttatgtattttcaaacgaaattttat

SEQ ID NO: 142455 - DNA, 473 bp, Zea Mays
ctccccgccgctagcagtagccgctgatgtagcctccatagtcacacgccgccctcacgcggcaccctcttcagaactcgccgcctccatgctcccttccgaccgcgcgcacgtctcttccgtccgtttcgacgccgtcctaaaagatcatatcaataagctgataaagctttgatgtgcctgagcatcagatctgtttatctattagttgagttcttcagatcatggatgctgttgtacactgttatttcagagcctcattgctcagaatatggagattatctgatcctcattgtattaatataaagacccatgtcatttcctatgtacgttatgaaggcccatgttagttcaacttcatgctacttggaaggaactactccctgcatcctgtaatgtagtgtattctagagatttttgagactaattaagaggaaatacagacacataaacttaatttcctaataagatgt

SEQ ID NO: 142456 - DNA, 164 bp, Zea Mays
gttcttgtgtgtttatgttacttttttacaggtggtgatggagaggacatcctggatgtataacttatcaaggctagatccatcatacatatccgaggtccataggtttattgatgtcgctacgaaccatgcttggagaacaaagacaaaacacatatattgtc

SEQ ID NO: 142457 - DNA, 2704 bp, Zea Mays
cggagatcggatcgaactgcctgtgcagtctccctccctccctccctccctccctccctcatgtccatatataccaaaaaatctccgccgcgccgccattagctagctctcgtcgtcttcgttcctccgcaaataatttgttactcaagccgaaggaggacgagggcgacgggattggctaatcaaatcgaccgatctagtggctggtgcccaggagaagggacgcgggcagtgcggctcgtcgtggtcagcagcttgtggcgaccggtcgccagggaatcaatcaattcaatcagaaagttgcaattttgattgagctcgattcgtcatccacaagacattagggaatcgaaccaccacaaagcaagaaggcagtccagtgcagagagagagagagagagaccaagaagagaaagagaaagggaaagagaagcaaagcaatggatccaccgcatcaccgtgctgtgctgcggcggcctcgtcctcctcctcctccctcctgccctttttataggccgcctccgcttcgtcgtcttggcaagacctgcccccgcgcctgcaatcctacgacaacagggcgccgctcctcctgcccgtcaagatcatggacgccgccgccgacgacaagccggaaatctccgacgatacggcccaccagattagcgttgatccttggtatcaagttggcttcgtcctcacaaccggggtcaacagcgcatacgttctaggatactctggatcaatcatggtccctctaggctggatcggcggcacatgcggcctcctcctagctgccgccatatccatgtacgctaatgctcttcttgcacggcttcatgaagtcggtggcaaacgccatatcagatacagagaccttgctggacacatatatggaccgaaaatttacgggcttacatgggctctgcagtacattaaccttttcatgatcaacactggctttatcatcttagctggacaagctctcaaggccacgtatggactgttcagtgatgatggagttctgaaactcccttactgcattgcgatatcaggattcgtctgtgctcttttcgccattggaatcccttatttatctgccctcaggatttggttggggttctccacgcttttcagcctcatgtatattgtgatagcagttgtgctgtcgtcgagagatgggataaccgcacctgcaagggattacagcatccccaaatcatcgcagtcaactcgagtcttcactacgataggttccatagcagaccttgtgtttgcttacaacaccggcatgctgccagaaattcaggtgagcattttctttttctggataacattttctgttattgttgccttactatttgtgatatattattacaggcaaccatcaggcctcctgtggtgaagaacatggagaaagctctatggttccagttcaccattggctccttgcctctctatgctgtagtttttgtgggttactgggcttatgggtcctcaacatcaggctacctcctcaacagtgtcacaggcccagtctgggtgaaagcggttgcaaatctgtcggcattttttcagacagtcatagcgctgcacatctttgctagccccatgtatgaattcctggacacaaaatatggaagtgggcgtggtggcccttttgagatccacaacgtggcgttcagagtagcagtcagaggaggctacctgacggtgaacacgctggtggccgcggtgctcccattcctcggcgacttcatgagcctgacgggcgccctcagcaccttcccgctgacgtttgtgctcgcaaatcacatgtacctgatggtgaaggggcctaagctgggtgccatccagaaatcatggcactggctcaatgttcttgggttcactgcgctggctgttgcagcggcggtctccgcaataaggctcatcatgcgtgattccagcacctaccacttcttcgctgatctttgagatcgatcgttttcttttctttttgttggaatgctgagccagagctagtattttttcattttcagagaattattatccatgtatgtaaggatgacgcatatatatattgaatagatgatttaatatcaggtcagagcagacaaggaggtatggtgtcgatgcacgacttgtagaggatgcggaggtagtcgagcagggcatcctggttggcgtcgtccaccggctccatctcgaagctccacaccaccagcgttgcgcctccgccgtagtccaggaggctgatggtgttgcgggagccggcgaggccgacgttgccgtcctccatgaggtaggtgtaggagcgggcggtgtggtccatggccaccagcctctccctcacccacgacgacccctgctgctgctgggggaacatgaggccgccgcgcacgaggcgcacgtagcccggcacgtcctcgtcaccggccaccgcggtgcacgactccaccatgggcatccactcgcgcagccgagacgtggaggacaccagctcccacacgcgggccacgggcgcgctcaccacgccgctcgctgcgccgcgccacgccttggacgccgcttcatctgactgtccgtgcccatccatggccaagaaccgtcagctccggggccagcggatatagcaagggggtcgctggaaagtcaagctacatggctgcaaaaccaaagctcacctaaaaataaggacaaacat

SEQ ID NO: 142458 - DNA, 2633 bp, Zea Mays
cggagatcggatcgaactgcctgtgcagtctccctccctccctccctccctccctccctcatgtccatatataccaaaaaatctccgccgcgccgccattagctagctctcgtcgtcttcgttcctccgcaaataatttgttactcaagccgaaggaggacgagggcgacgggattggctaatcaaatcgaccgatctagtggctggtgcccaggagaagggacgcgggcagtgcggctcgtcgtggtcagcagcttgtggcgaccggtcgccagggaatcaatcaattcaatcagaaagttgcaattttgattgagctcgattcgtcatccacaagacattagggaatcgaaccaccacaaagcaagaaggcagtccagtgcagagagagagagagagagaccaagaagagaaagagaaagggaaagagaagcaaagcaatggatccaccgcatcaccgtgctgtgctgcggcggcctcgtcctcctcctcctccctcctgccctttttataggccgcctccgcttcgtcgtcttggcaagacctgcccccgcgcctgcaatcctacgacaacagggcgccgctcctcctgcccgtcaagatcatggacgccgccgccgacgacaagccggaaatctccgacgatacggcccaccagattagcgttgatccttggtatcaagttggcttcgtcctcacaaccggggtcaacagcgcatacgttctaggatactctggatcaatcatggtccctctaggctggatcggcggcacatgcggcctcctcctagctgccgccatatccatgtacgctaatgctcttcttgcacggcttcatgaagtcggtggcaaacgccatatcagatacagagaccttgctggacacatatatggaccgaaaatttacgggcttacatgggctctgcagtacattaaccttttcatgatcaacactggctttatcatcttagctggacaagctctcaaggccacgtatggactgttcagtgatgatggagttctgaaactcccttactgcattgcgatatcaggattcgtctgtgctcttttcgccattggaatcccttatttatctgccctcaggatttggttggggttctccacgcttttcagcctcatgtatattgtgatagcagttgtgctgtcgtcgagagatgggataaccgcacctgcaagggattacagcatccccaaatcatcgcagtcaactcgagtcttcactacgataggttccatagcagaccttgtgtttgcttacaacaccggcatgctgccagaaattcaggcaaccatcaggcctcctgtggtgaagaacatggagaaagctctatggttccagttcaccattggctccttgcctctctatgctgtagtttttgtgggttactgggcttatgggtcctcaacatcaggctacctcctcaacagtgtcacaggcccagtctgggtgaaagcggttgcaaatctgtcggcattttttcagacagtcatagcgctgcacatctttgctagccccatgtatgaattcctggacacaaaatatggaagtgggcgtggtggcccttttgagatccacaacgtggcgttcagagtagcagtcagaggaggctacctgacggtgaacacgctggtggccgcggtgctcccattcctcggcgacttcatgagcctgacgggcgccctcagcaccttcccgctgacgtttgtgctcgcaaatcacatgtacctgatggtgaaggggcctaagctgggtgccatccagaaatcatggcactggctcaatgttcttgggttcactgcgctggctgttgcagcggcggtctccgcaataaggctcatcatgcgtgattccagcacctaccacttcttcgctgatctttgagatcgatcgttttcttttctttttgttggaatgctgagccagagctagtattttttcattttcagagaattattatccatgtatgtaaggatgacgcatatatatattgaatagatgatttaatatcaggtcagagcagacaaggaggtatggtgtcgatgcacgacttgtagaggatgcggaggtagtcgagcagggcatcctggttggcgtcgtccaccggctccatctcgaagctccacaccaccagcgttgcgcctccgccgtagtccaggaggctgatggtgttgcgggagccggcgaggccgacgttgccgtcctccatgaggtaggtgtaggagcgggcggtgtggtccatggccaccagcctctccctcacccacgacgacccctgctgctgctgggggaacatgaggccgccgcgcacgaggcgcacgtagcccggcacgtcctcgtcaccggccaccgcggtgcacgactccaccatgggcatccactcgcgcagccgagacgtggaggacaccagctcccacacgcgggccacgggcgcgctcaccacgccgctcgctgcgccgcgccacgccttggacgccgcttcatctgactgtccgtgcccatccatggccaagaaccgtcagctccggggccagcggatatagcaagggggtcgctggaaagtcaagctacatggctgcaaaaccaaagctcacctaaaaataaggacaaacat

SEQ ID NO: 142459 - DNA, 1699 bp, Zea Mays
cctttccctatcctatccatcgatcccctttctcttcttccatcagccacactccacacacctctgccctgcacgccaaggccaagaacatccatcctctcccgattcgaataccctgcaggctaatctcatctcaagagcagagtgtgtcattccccattctcttcccttcccgagttgccactcactgttgctttgctgcagcctgaaggggaaggaaagcagaaatctgctgttggctgatgagatccatccatgcggatgcaatccaccacaccagcagcagcaacaaagctagcatttttcatctgattcatttttcatctctgcttcatttccttccatcattgtaaaataacaacaatatctactgctgcgatggcaacggagatgccgccgcttctcgccctcttcttcctctgcctctcgcttgcgctgcgccccgccaccgccgtctcttccccgtccttcgccctcgacttcttccccgccgccggcgccattgcgcagctctccctctccggcggcgccaccgccaatgccaccgcgggttccgtctccatgcccatccccgacgcacgggtgcagtacaggacccccattgccgcgtccgccctccgcctcggattctccacctacttcgccttcgccctccctcacgccccgtcctccctcgccttcttcctcacaccctccgcctcccgctcgcccccggccctcgcactcgtcttctccgcgcgccacatccgcctcgacctcgccggccgcaccgccctccagacggagacacgccatcccgttcccaccaccgcaagccacctgcatgcctggattgactactaccacagcaactcttcttccagttccgccgacacggacactctccacgtacaactcgccgccacgcgcatccccaccgccaaccaccacccgaccccgaccccgccgctcctctcctacccgctccatctgctccccgtcctccgcaggggccccatccttgccggattccggacctcctccgggaactgcacgctcttcagctgggcgttccgcgcagctcccaaccggatgcactctctgccgctcaaccccgccgacctgctcaccacgccgccgccagagcgcgaagccagagccagccagccagcccccgaccgccgctacagcagcccctggggcgccgcactgtccctgctgctcgcggccgcggccggcgcaatgctcaccttcattgtgctcttcctctggtattacgcgaccaagcgccggcccgtcgcgccggtggagtaccccatgcacccctcgcacgtcgtctacgagaagattgtgctcgtcggggtcaaggacgacgccgcggctgccgatgccgccgggaacaagtagatgctcctaccaccaccacaaagcaagtagatgctgccttgcttacccacttcactagttcacttctgctgcatttgcatttgcaactgtgttgtagttactagtactagtaaagtagtaatggtggaaactgcagattttgcctcccaaacccaacagggcaaactctgcactttccaccttcagttagcttgtacaagagtgcttcctgttgtttttgtgatctttgtccctagttaaattgcaacaccgtcggtactgatgtatttccttccttgcactgatgctgcttagtaatttgcttctctactta

SEQ ID NO: 142460 - DNA, 1758 bp, Zea Mays
atggctcggctcccaagtactgctgctaatttccatctcgccatcgtcttgtgcttgctccatcacctcataaacgactacttgttggctgacgctgccattgttgagcacaccttccatgtgggcaacctgagcgtgcagcggctggggcagagccaggtgatcaccgcggtgaacgggcagttcccaggccccaagatcgaggcccgcgacggcgacacggtggtggtgcacgtcgtcaacctctccccctacaacctcagcatccactggcacggcatcctgcagcgcctctcctgctgggcggacgggcccaacatggtgtcgcagtgccccatccgccccgccgccggcacctacacctaccgcttcaacgttaccggccaggagggaacgctgtggtggcacgcccacgtctccttcctccgtgccactgtctacggcgcgctcatcctccaccccgcggccccgtcgtcctacccgttcccgacaccccacggcgaggccaccatcctactcggcgagtggtggaacgtcagcgtcgtcgacgtcgagaggcaggcactcctcatgggagcaggacccaacaactcagtcgcgctaactatcaacggcctcattggtgccggcggtggtggcggcagcgagaacagctcctcctcctcctcctcccagtatgaactcgccgtgcagcgcggcaggacgtacctgctccgcatcatcaatgccgctctcaactacgagctcttcttcaaggtcgccaaccactccttcaccgtcgtcgccgccgacgcctgctacaccgacccctaccacacggacgtcatcgtcatcgcgccgggacagacggtggacgctctcatgcgcgccgacgccgacccgggccgccgctactacatggccgcacaggtgtaccagagcctcgcaaacgccacctacagcgccgccaccacggcactcctaacctacctgccggacgcctcggggtcggacgacgagcagccgacgctgatgcctaccatgccagcgttcaacgacagcgccaccgctcagagcttctacgcgagcctcacggggctgctgcaggacggggtgccgctccacgtggacacgcggatgctggtcacgttcggcctgggcgccacgccgtgcgcgtcggcgcagacgctctgcaaccggacgctgggctccgtggcggccagcatgaacaacgtctccttccagctcccgacgaccatgtcgttgctggaggcgcacatgcggggcgcgccggacggcgtgtacacgcgcgacttccccgaccggccgccggtgatgttcgacttcacgggcgacgccatggcggccaaccggtcgttcatgctcacgtccaagggcaccaaggtgaagacgctgcggtacaacgagacggtggaggtggtgctgcagaacacggccgtccttggcgccgagaaccacccgctgcacctccacggcttcaacttcttcgtgctggcgcagggcccgggcaacttcaacgcgcacaggcacgtccgcaagtacaatctcgtcaacccgcagcagcgcaacaccgtcgccgtccctggcggcggctgggccgtcatccgcttcacagcggacaacccgggcgtctggatcatgcactgccacctggacgcgcatctgcccttcggcttggccatggccttcgaggttgaagacgggcccacgcccgacgccgtgctcccgccgcccccgccagactacccgcgctgctag

SEQ ID NO: 142461 - DNA, 2344 bp, Zea Mays
atcgagacaaaatatctaccggggatgtggtggtggatgctcgggcattcgtcaaaccactcatcatcccatcccatcccatccaagggaatccgatcaatcccggactcgtcctcccggccaaccctagcttcccttctcttcccctcccccgatggacccgccgccaaccagggacagaggggaggagctggagcctgaaacccgcgccttccccgacgccgacgacccggagacctcccgatctgaacgcgaagagggtatccctccaccgccaccgccaccgcctctgcgccagcagctcatgggggcttgccgcgccgacgagcgcctcaggccgctcctcaccctcaacgtctcctgcggcgcagcggacgaccgactcatcgcacacctcgcgcagcacttcgaggtgtcggaggtgggcatgctcgcgcgttgcctctgtgttcccctcgtttccctgcgcgttggcaaggttcagagggaaggggccctcctctgcccaacacacattagagggaagctgaaccttgttcttctgccatcatctagcatgcggcttacctttgtttgtgatgatggttatccagagcaactagctctcttgagcaatggctttgaattttctgaagttatgattgaagaaatatcagctgataattctggacgctctttcctaatcagaatttcagaatctaaagtgttttactactggtgtgctgagaagtcgaaggaacatggaatggaacttcttgcaaagatgaaaaaccttttggacgggaggccaacactctctgatctcactggcatctctaattcacgacttgatgcttttgccactcatttacatgcttatcttcttgcatcaagtatcggtgatgttacatcattgggctcacttaatgacttcctgagtacttcaagatcacatgatcaatatttacagctccagtcagatttttccaaaacttccaggttccgtgcctcggctgctagtgcaattaagccaagctctgtctatcaagccagcctaagtccgagatctggcacttttaaagatggggtaccaagggcttcatgtgcaagggttgttgggagggacaagctgaagcgtcgtgtggaatggttaggcccgttaactgctccgcttgatacgaatcctttgacaatcaaccctgattctgccagtgagaagtgtgatgcagattgttcaaagaacaatgttagctcagttccgttggacctgcctctttcgtttcccctgttgccttctatttactcccttggcactcgtccggttcctgaggtttctttggagaaacagtttaagccttactattgctggtgcccaccatgcccatcatcgctgcaatacactgtcacccatttgcatctgccagctacacctgtagatccgttgcccctaccacctttgagttcactgctagcaagtgagcagccaccttcttcaacagtttctgtaaagctggatacaactgatctcccttcccttaatcttccgtccatactgcattcaccacttattcccctacatggtccacaagtgccaacattcacaccattgatgtccgatcccattgtgcatgtcccagtcattgatgtttgttcggcgggtcaggcctatctagtgagttgtgggccgtctataacttcagcagttcccctgctcccgagcttgaagcctctgctgccagaagcagagtcgttagtcgagagaagcgcaagggaaacactgatgaggctcatagcttcgacaccacctgcaagcaatcctctacctggaagtatatcctgggcgaataacaatgtgaagaagcatgttgatgtgtgtcccaatgaaaaagcatccggtacgtcttgtgttgctgctgtgtttggaagtgggattgcacacgctgaggatgaagttccaagcggaggtgattcacaagagccgtttgccgaatacgatggtaccagcaatgaatgtgatgtacatcattggcagaaattctagcttggctgcatcagcatggtaaatagggttttgaggattcgggggtttgatgtcctgtacgcagcagcagccttaaaagtttctgtgcccagccagcatctctatttggtttgcaaatgtaattactagtttgtactgtcttgtttttggcaaacttgctgcgagcctcgtgcttagtttggtttatttatttatgaactttaggcctgttcgaagcacccagtttgtaagaaaatggattatataaactgaagtgattccaaatatatcagtttatgtctcagtttataaaaattggattaccagtttctaaaaaaccaagaa

SEQ ID NO: 142462 - DNA, 2391 bp, Zea Mays
atcgagacaaaatatctaccggggatgtggtggtggatgctcgggcattcgtcaaaccactcatcatcccatcccatcccatccaagggaatccgatcaatcccggactcgtcctcccggccaaccctagcttcccttctcttcccctcccccgatggacccgccgccaaccagggacagaggggaggagctggagcctgaaacccgcgccttccccgacgccgacgacccggagacctcccgatctgaacgcgaagagggtatccctccaccgccaccgccaccgcctctgcgccagcagctcatgggggcttgccgcgccgacgagcgcctcaggccgctcctcaccctcaacgtctcctgcggcgcagcggacgaccgactcatcgcacacctcgcgcagcacttcgaggtgtcggaggtgggcatgctcgcgcgttgcctctgtgttcccctcgtttccctgcgcgttggcaaggttcagagggaaggggccctcctctgcccaacacacattaggtaatttgggcgtttgtcataatctctgatatatgaggaaagagaagagggaagctgaaccttgttcttctgccatcatctagcatgcggcttacctttgtttgtgatgatggttatccagagcaactagctctcttgagcaatggctttgaattttctgaagttatgattgaagaaatatcagctgataattctggacgctctttcctaatcagaatttcagaatctaaagtgttttactactggtgtgctgagaagtcgaaggaacatggaatggaacttcttgcaaagatgaaaaaccttttggacgggaggccaacactctctgatctcactggcatctctaattcacgacttgatgcttttgccactcatttacatgcttatcttcttgcatcaagtatcggtgatgttacatcattgggctcacttaatgacttcctgagtacttcaagatcacatgatcaatatttacagctccagtcagatttttccaaaacttccaggttccgtgcctcggctgctagtgcaattaagccaagctctgtctatcaagccagcctaagtccgagatctggcacttttaaagatggggtaccaagggcttcatgtgcaagggttgttgggagggacaagctgaagcgtcgtgtggaatggttaggcccgttaactgctccgcttgatacgaatcctttgacaatcaaccctgattctgccagtgagaagtgtgatgcagattgttcaaagaacaatgttagctcagttccgttggacctgcctctttcgtttcccctgttgccttctatttactcccttggcactcgtccggttcctgaggtttctttggagaaacagtttaagccttactattgctggtgcccaccatgcccatcatcgctgcaatacactgtcacccatttgcatctgccagctacacctgtagatccgttgcccctaccacctttgagttcactgctagcaagtgagcagccaccttcttcaacagtttctgtaaagctggatacaactgatctcccttcccttaatcttccgtccatactgcattcaccacttattcccctacatggtccacaagtgccaacattcacaccattgatgtccgatcccattgtgcatgtcccagtcattgatgtttgttcggcgggtcaggcctatctagtgagttgtgggccgtctataacttcagcagttcccctgctcccgagcttgaagcctctgctgccagaagcagagtcgttagtcgagagaagcgcaagggaaacactgatgaggctcatagcttcgacaccacctgcaagcaatcctctacctggaagtatatcctgggcgaataacaatgtgaagaagcatgttgatgtgtgtcccaatgaaaaagcatccggtacgtcttgtgttgctgctgtgtttggaagtgggattgcacacgctgaggatgaagttccaagcggaggtgattcacaagagccgtttgccgaatacgatggtaccagcaatgaatgtgatgtacatcattggcagaaattctagcttggctgcatcagcatggtaaatagggttttgaggattcgggggtttgatgtcctgtacgcagcagcagccttaaaagtttctgtgcccagccagcatctctatttggtttgcaaatgtaattactagtttgtactgtcttgtttttggcaaacttgctgcgagcctcgtgcttagtttggtttatttatttatgaactttaggcctgttcgaagcacccagtttgtaagaaaatggattatataaactgaagtgattccaaatatatcagtttatgtctcagtttataaaaattggattaccagtttctaaaaaaccaagaa

SEQ ID NO: 142463 - DNA, 414 bp, Zea Mays
atgatggtcctcacctcagttaccaccacctcgttcgtcattctactacttttctgtctcccctcatgctttcacctccgcgtcaccccattctcggcagagggcataggagcatgcgcctcctccccgtattcgtctgacaccagccccaacaccgactcgcgcagtggctattgcacgtccatgaggacatttcacatcatgcgcgcaccatcattttcgccgtcgtcggacgccccattcgtcttcccggccttcgccctattcttcctccctaacctgctgcccccgcccatggtcgcagccgcgagccgaccgacgctcgttgacatgggtacggggcgagtcggtcatgctcctggcctttctcctgcgtgccgtcgaggaggatatggtggtgcctgccacgcttag

SEQ ID NO: 142464 - DNA, 1848 bp, Zea Mays
gcctgaccgagacagacacacaccagagggagagggagacggagagaagggcgagcggcactagcaagcatggcggcggccgtcctagcgcccaagccgcctcctccgctgcctaccagggcctttccttcctcatccccctcgcggtttgcccctgccttcatctccccgcgtcatcccctgagaagattgctcctccgccggagtccaggccccgccgcatcgcccttttcgtcgagccgtctcccttcgcctacgtctccggctacaagaaccgcttccagaacttcatcaagtacctacgggagatgggcgacgaggtgattgtggtcaccacgcacgagggcgtgcctcaggaattccacggagccaagctaattggctcatggagggtaaggtctttgatttcatcccagcagcttcccttgcccctggtatcaaaaggttccgctgtcgctggccctcagtcctcgaatcatcgcagaagttgctagattcaagcctgacattattcacgcctcttcacctgggataatggtatttggcgcgcttatcatagcaaagttgctctgcgtccctctggtaatgtcataccacacccacgttccaatttatatacccagatatactttcagctggcttgtcaagcccatgtggctaataataaaattcttgcaccgagctgcagacctcacactggtaccatctgttgctatcggcagggatcttcaagctgctcgtgttacagcagccaataaaatacgcctttggaacaagggtgttgactcagaaagcttccatcctcgtttccgcaacatggaaatgcgttcaaggctaacgaatggtgaaccagaaaagccacttgtattttatgttggacgcttaggagttgagaaaagcttggattttcttaagagagtcatggaccgacttccaggagcaaggattgcatttattggagacggaccattcagagctgagctcgagcagatgttctcaggtatgccggtggtgttcacgggcacgttgcaaggggaggagctatcacaggcctatgccagtggggatgtgtttgtgatgccttccgagtcagagacactggggtttgtggtgctggaggccatgtcatcaggagttccggtagtcggggctcgcgccggaggaatacctgatatcatacctgaggatcaggaggggaggaccagctttttgtacacaccaggggatgtggatgactgtgttggcaagatcaagcggctcctgtcgagcgaggaactgagggaggccatggggagagctgccaggaaggagatggagaagtttgactggcgagcggcgacgaggaagatccgcaacgagcagtacagtgctgcaatctggttctggcgcaagaagagggcacaggtgctgcggcccctccaatgggtgctgcggctgctgaggcggacaatgccaggagctgccgatgccgcagcgaagcaatcctaggagaggggggctactatggttgatggtcctcttttttcccattccttgtattatctccgttttcgaatatttgtcgtccgctagttcatttttaactaaacagcgacaaataaaaaagaacgacgagagtataaaatgggctaaggaggccatggcagatgattggatatgtttcaggattagaggggaggaaggtcaagcttcaacattccaattcactgaagaatatataatgtacgtttaggactgttaggttgtaaatcgtcaaagtgtctatgtaatgcttcttcttggcatgctacactatatagtactaatattgatcctttaacaggaattggtgtgcagtcagacaatgat

SEQ ID NO: 142465 - DNA, 2200 bp, Zea Mays
ggatctgctaatccatccaactccaagcaaatggaatatgcctttgccttgcacccaagaacagtttctgtagtttcggctgcgagcctgaccgagacagacacacaccagagggagagggagacggagagaagggcgagcggcactagcaagcatggcggcggccgtcctagcgcccaagccgcctcctccgctgcctaccagggcctttccttcctcatccccctcgcggtttgcccctgccttcatctccccgcgtcatcccctgagaagattgctcctccgccccattccgtgcgcctcatcgccgtcttccgtcttgatgccgaacccggacctcgagactgagcctgcccacgatggagatggagatggagatgaggcgccgccggagtccaggccccgccgcatcgcccttttcgtcgagccgtctcccttcgcctacgtctccggctacaagaaccgcttccagaacttcatcaagtacctacgggagatgggcgacgaggtgattgtggtcaccacgcacgagggcgtgcctcaggaattccacggagccaagctaattggctcatggagggtaaggtctttgatttcatcccagcagcttcccttgcccctggtatcaaaaggttccgctgtcgctggccctcagtcctcgaatcatcgcagaagttgctagattcaagcctgacattattcacgcctcttcacctgggataatggtatttggcgcgcttatcatagcaaagttgctctgcgtccctctggtaatgtcataccacacccacgttccaatgtgagtttcgactgctgctctcacattcacatactgcttttcgccagcatacatgtaccactttctgctgttctgcacaagaactcattgtggaaccacaatcatatcctagtattttttacctgcacggctggatggagaactgacccttttgatcatggcagttatatacccagatatactttcagctggcttgtcaagcccatgtggctaataataaaattcttgcaccgagctgcagacctcacactggtaccatctgttgctatcggcagggatcttcaagctgctcgtgttacagcagccaataaaatacgcctttggaacaagggtgttgactcagaaagcttccatcctcgtttccgcaacatggaaatgcgttcaaggctaacgaatggtgaaccagaaaagccacttgtattttatgttggacgcttaggagttgagaaaagcttggattttcttaagagagtcatggaccgacttccaggagcaaggattgcatttattggagacggaccattcagagctgagctcgagcagatgttctcaggtatgccggtggtgttcacgggcacgttgcaaggggaggagctatcacaggcctatgccagtggggatgtgtttgtgatgccttccgagtcagagacactggggtttgtggtgctggaggccatgtcatcaggagttccggtagtcggggctcgcgccggaggaatacctgatatcatacctgaggatcaggaggggaggaccagctttttgtacacaccaggggatgtggatgactgtgttggcaagatcaagcggctcctgtcgagcgaggaactgagggaggccatggggagagctgccaggaaggagatggagaagtttgactggcgagcggcgacgaggaagatccgcaacgagcagtacagtgctgcaatctggttctggcgcaagaagagggcacaggtgctgcggcccctccaatgggtgctgcggctgctgaggcggacaatgccaggagctgccgatgccgcagcgaagcaatcctaggagaggggggctactatggttgatggtcctcttttttcccattccttgtattatctccgttttcgaatatttgtcgtccgctagttcatttttaactaaacagcgacaaataaaaaagaacgacgagagtataaaatgggctaaggaggccatggcagatgattggatatgtttcaggattagaggggaggaaggtcaagcttcaacattccaattcactgaagaatatataatgtacgtttaggactgttaggttgtaaatcgtcaaagtgtctatgtaatgcttcttcttggcatgctacactatatagtactaatattgatcctttaacaggaattggtgtgcagtcagacaatgat

SEQ ID NO: 142466 - DNA, 1896 bp, Zea Mays
ggatctgctaatccatccaactccaagcaaatggaatatgcctttgccttgcacccaagaacagtttctgtagtttcggctgcgagcctgaccgagacagacacacaccagagggagagggagacggagagaagggcgagcggcactagcaagcatggcggcggccgtcctagcgcccaagccgcctcctccgctgcctaccagggcctttccttcctcatccccctcgcggtttgcccctgccttcatctccccgcgtcatcccctgagaagattgctcctccgccccattccgtgcgcctcatcgccgtcttccgtcttgatgccgaacccggacctcgagactgagcctgcccacgatggagatggagatggagatgaggcgccgccggagtccaggccccgccgcatcgcccttttcgtcgagccgtctcccttcgcctacgtctccggctacaagaaccgcttccagaacttcatcaagtacctacgggagatgggcgacgaggtgattgtggtcaccacgcacgagggcgtgcctcaggaattccacggagccaagctaattggctcatggagcttcccttgcccctggtatcaaaaggttccgctgtcgctggccctcagtcctcgaatcatcgcagaagttgctagattcaagcctgacattattcacgcctcttcacctgggataatggtatttggcgcgcttatcatagcaaagttgctctgcgtccctctggtaatgtcataccacacccacgttccaatttatatacccagatatactttcagctggcttgtcaagcccatgtggctaataataaaattcttgcaccgagctgcagacctcacactggtaccatctgttgctatcggcagggatcttcaagctgctcgtgttacagcagccaataaaatacgcctttggaacaagggtgttgactcagaaagcttccatcctcgtttccgcaacatggaaatgcgttcaaggctaacgaatggtgaaccagaaaagccacttgtattttatgttggacgcttaggagttgagaaaagcttggattttcttaagagagtcatggaccgacttccaggagcaaggattgcatttattggagacggaccattcagagctgagctcgagcagatgttctcaggtatgccggtggtgttcacgggcacgttgcaaggggaggagctatcacaggcctatgccagtggggatgtgtttgtgatgccttccgagtcagagacactggggtttgtggtgctggaggccatgtcatcaggagttccggtagtcggggctcgcgccggaggaatacctgatatcatacctgaggatcaggaggggaggaccagctttttgtacacaccaggggatgtggatgactgtgttggcaagatcaagcggctcctgtcgagcgaggaactgagggaggccatggggagagctgccaggaaggagatggagaagtttgactggcgagcggcgacgaggaagatccgcaacgagcagtacagtgctgcaatctggttctggcgcaagaagagggcacaggtgctgcggcccctccaatgggtgctgcggctgctgaggcggacaatgccaggagctgccgatgccgcagcgaagcaatcctaggagaggggggctactatggttgatggtcctcttttttcccattccttagtataaaatgggctaaggaggccatggcagatgattggatatgtttcaggattagaggggaggaaggtcaagcttcaacattccaattcactgaagaatatataatgtacgtttaggactgttaggttgtaaatcgtcaaagtgtctatgtaatgcttcttcttggcatgctacactatatagtactaatattgatcctt

SEQ ID NO: 142467 - DNA, 866 bp, Zea Mays
ggatctgctaatccatccaactccaagcaaatggaatatgcctttgccttgcacccaagaacagtttctgtagtttcggctgcgagcctgaccgagacagacacacaccagagggagagggagacggagagaagggcgagcggcactagcaagcatggcggcggccgtcctagcgcccaagccgcctcctccgctgcctaccagggcctttccttcctcatccccctcgcggtttgcccctgccttcatctccccgcgtcatcccctgagaagattgctcctccgccccattccgtgcgcctcatcgccgtcttccgtcttgatgccgaacccggacctcgagactgagcctgcccacgatggagatggagatggagatgaggcgccgccggagtccaggccccgccgcatcgcccttttcgtcgagccgtctcccttcgcctacgtctccggctacaagaaccgcttccagaacttcatcaagtacctacgggagatgggcgacgaggtgattgtggtcaccacgcacgagggcgtgcctcaggaattccacggagccaagctaattggctcatggagcttcccttgcccctggtatcaaaaggttccgctgtcgctggccctcagtcctcgaatcatcgcagaagttgctagattcaagcctgacattattcacgcctcttcacctgggataatggtatttggcgcgcttatcatagcaaagttgctctgcgtccctctggtaatgtcataccacacccacgttccaatgtgagtttcgactgctgctctcacattcacatactgcttttcgccagcatacatgtaccactttctgctgttctgcacaagaactcattgtggaa

SEQ ID NO: 142468 - DNA, 417 bp, Zea Mays
aagttcaatccactgccaggaggttagatttgagtctcaattttttcaatggaagggatcatgctgataattcacttcatgggtacaaggttttcaaaaatccgagcattagtgatgtcctatgcacaacaacagcataggctcttgcaatggggaaattcgtgatctgcgcagaacatccatcaaatgagtttttcatgtcatttttgaaatgtttgacatacaagacttcagaggaatttgttgcgagagtgaaagaggcaatggatagagaaccccaaccgctaacccctgagcaaagatacaacctttcgtgggagacagcgaccgagagattcatggagtacttagaccttgaaaaggttctgaacaatgaggctgctcagcctgaacaaggtaggaaaagaaagaataaaa

SEQ ID NO: 142469 - DNA, 1101 bp, Zea Mays
aggtcttcgtcgatgcaacaatcctcggccgcctcgatggcaatggaggaagacgacgactacgagccgccgttgatggccacgtacaagcatctgttggacagtcacccgcaccgacaactgggcgccggcgccgcgcaagacgacgaggattgcttcctcctcccggtgatcgacctttccagcctcctgccgccggtgcatcatcgcaagcagtcatcatcagcagcagctgcagagcagtgccgggcgtccatcgtgcgcgccgcctccgagtggggcttcttccaggtgaccaaccacggcgtgccgcaggttctgctggacgagctgcaccaggcgcaggccggcgtcttccgccggcccttccaactcaaggcgcaccagccgctgctggacttctcgccggagagctaccgctggggcacgcccaccgccacgtgcctggagcagctctcgtggtccgaggcctaccacatccccacaacgacgaccacgaccggtaacgacgacaagacccggctagtggtcgaggaggtgtcgacggcgatgtcgaagctggcgcagcggctggcggggatcctcgtcgcggagctgggcgaagacagcgcggcggcggtggtgtcgcggtgcacgcggagcacctgcttcctgcggctgaaccggtacccgccgtgcgcggcggcggccagcggcgtcgtctacgggctgtgcccacactcggacagcgacttcctgaccatactccaccaggacggcgtcggcggcctccagctcgtcaaggacgggcagtgggtagccgtgaagcccagccccggcgcgctcatcgtcaatgtgggcgacctcctgcaggcgtggagcaacgaccggtaccggagcgtcgagcaccgggtgatggccagcgccacgagggagcggttctccgccgccttcttcctgtgccccagctacgacacgctcatccggccgcgctgcggcgccggcggacctcctcctcgctatgagagcttcaccttcggggagtaccggaaccagatcagggaggacgtcaggctcacgggccgaaagctcggcctgcaacgcttccgcaaagcagagtag

SEQ ID NO: 142470 - DNA, 2696 bp, Zea Mays
ttttatttttcccttttgtgatgagtgccatgctactgatcagtgatgcagcgcctgatatgacctgaatgacgacgaaacctgaacctgcaggcctggagctgatggagaaggaggtggtggccgtggtgggcccgcagtcctcggtcatcgcgcacgtcgtctcccacgtcgccaaccagctgcgcgtgccgctgctgtccttcgccgccaccgacccggcgctcgcctccacgcagtacccctacttcgtgcgcaccgtgcacgacgaccgcttccagatggccgccatcgctgacgtcgtctcgcacttcggatggagggaggtcaccgccgtctacgtcgacgacgactacggccgcggcggcgtcatcgcgctcgccgacgcgctggaggccacgcgtgccagggtgtcctacagggccgccttcccgctgggcgccgaccgcgccacgctcgccgacatcctccagcgcgccaacttcatggagtcgcgcgtcttcatcgtccacgctagcccggactcgggcctcaacgtcttcgccgccgcgcgggggctcggcatgatggtctcggggtacacctggatcgcgaccgactggctcgccaccgccgccatcgatgctgctggcgccgcctccaactccagcaacatacagggcgtcctcacgctgcgacagtacaccccggactctgacgccaaggcgtcgctcctctccaggctcgccgccgctgatccaaccagcaacaatgccaccgccagcgtcaacacgtacggcctcttcgcctacgactccgtatggatggcggcgtacgccatcgatcagttcctcggcgacgccggtggcggcaacgtctccttctccgccgaccccaccatccgcgatgccaacggcagcgcgctgggtctcagcgcgctcagggtgttcgaccagggcgagcagctactcgggaaggtcatgctctccaacttcaccggcgtcacgggccacgtggagttccagttcgacgccggtgtgaatagcagcggaaccctcgtcaaccctgcctatgagatcctcaacgtcggtggcacgggcgtccgccgtgtcgcctactggtccaactacacgcgcctgtcggtggacgcacccaagcagctcggcgacggcgtgcctccgcccaacagcaccagcacgacggcccaacagcagatgtccaacgtcatctggcccggtggcacgacggccacgccgcgcgggtgggtgttcgccgacaacggcaagccgctgacgatcggcgtgccctaccggacgtcgtacaaggagtttgtgtccaaggacgagacaagccccgacggcgtgagcggctactgcgtggacgtgttcaaggcggcggtggccctgctcccgtacccggtgccggtgtcgttcgtcctgttcggcgacggcgtcgagaaccccagctacaacgagctggtgcagaaggtggcggacggctacttcgacgcggcggtgggcgacatctcgatcgtcacgaaccgaacgcgggtggtggacttcacgcagccgtacatcgactccgggctcatgatcgtgtccacggtgaagtccagcagctccgacgagtgggccttcctcaagcccttcacaccggagctttgggccactgttgtcgccttctgcatcttcgtcggcgccgtggtgtggatcctggagcaccggcacaacgacgagtttcgcgggccgctgaagaagcagatggtcaccatcttctggttcagcttttcctccatgttcttcacgcagagagaggacaccgtcagtgttcctggtcgcttcgtcgtcatcatgtggctcttcgtggtgctcatcatcacccagagctacacagccagcctgacgtccatcctgacagtgcagcagctgtcgacgggaatccagggcctgagcgacctcctcgcctccaacgaccccatcggttaccaggtcggctccttcgctgggagctacatgaacaaggagctgggcgtcgcggcgacacgcctccgggagctggaccccgacgactacgccgacagcctgcagcgcgggcccagaggcggcggcgtggcggccatcgtcgacgagctgccctacatggagctcttcctctccagcaactgccagttccagacggtgggccaggagttcaccaagagcggatggggattcgcgttcccgcttgactccccgctggcggtggacctgtccacggccatcctgacgctgtcggagaacggcgacctgcagcggatccacgacaattggctcaacacggggacgtgcgactcgcagaacaacggcgtgggcggcgccgaaaggctcagcctgcgcaactttggggggctcttccttatctgcggcgtcgcctgcgtcatcgccctgctcatccacttcgtcaggatacttttccagttctgccagtaccgcagacacggggccgccgacggcgcccaagaagaggacgagaacgacggcgacgacgacagggacggcgacagcgacaaggagaagagccagcgccggcccgccaggcagaccagcatccgggacctcatgtccttcgtggacatggaggaggccgaggtcaagagggccatccggagcaggtctggcaagtccatgggccggtcccggagcgacacgtctgatgcaccgtcctcgtcgccggtgtaa

SEQ ID NO: 142471 - DNA, 2054 bp, Zea Mays
atggcgtcctccgccgccaccaccaccaccaccctcctccgtctgctttgcctctgcaccgtcctgctagtcgccatgcaggcggcggcggctcgcccgcccaacgtcaccatcggctccctcttcgcctttgactccgtcatcggaaggtccgccaggtccgccatccagctcgccgtcgacgacgtcaaccgcgaccccaccgtgctcaacggcaccaccctcaccgtcgtcttccaggacacaaagtgcagcggattcgcaggcacaatccaagcaggcctggagctgatggagaaggaggtggtggccgtggtgggcccgcagtcctcggtcatcgcgcacgtcgtctcccacgtcgccaaccagctgcgcgtgccgctgctgtccttcgccgccaccgacccggcgctcgcctccacgcagtacccctacttcgtgcgcaccgtgcacgacgaccgcttccagatggccgccatcgctgacgtcgtctcgcacttcggatggagggaggtcaccgccgtctacgtcgacgacgactacggccgcggcggcgtcatcgcgctcgccgacgcgctggaggccacgcgtgccagggtgtcctacagggccgccttcccgctgggcgccgaccgcgccacgctcgccgacatcctccagcgcgccaacttcatggagtcgcgcgtcttcatcgtccacgctagcccggactcgggcctcaacgtcttcgccgccgcgcgggggctcggcatgatggtctcggggtacacctggatcgcgaccgactggctcgccaccgccgccatcgatgctgctggcgccgcctccaactccagcaacatacagggcgtcctcacgctgcgacagtacaccccggactctgacgccaaggcgtcgctcctctccaggctcgccgccgctgatccaaccagcaacaatgccaccgccagcgtcaacacgtacggcctcttcgcctacgactccgtatggatggcggcgtacgccatcgatcagttcctcggcgacgccggtggcggcaacgtctccttctccgccgaccccaccatccgcgatgccaacggcagcgcgctgggtctcagcgcgctcagggtgttcgaccagggcgagcagctactcgggaaggtcatgctctccaacttcaccggcgtcacgggccacgtggagttccagttcgacgccggtgtgaatagcagcggaaccctcgtcaaccctgcctatgagatcctcaacgtcggtggcacgggcgtccgccgtgtcgcctactggtccaactacacgcgcctgtcggtggacgcacccaagcagctcggcgacggcgtgcctccgcccaacagcaccagcacgacggcccaacagcagatgtccaacgtcatctggcccggtggcacgacggccacgccgcgcgggtgggtgttcgccgacaacggcaagccgctgacgatcggcgtgccctaccggacgtcgtacaaggagtttgtgtccaaggacgagacaagccccgacggcgtgagcggctactgcgtggacgtgttcaaggcggcggtggccctgctcccgtacccggtgccggtgtcgttcgtcctgttcggcgacggcgtcgagaaccccagctacaacgagctggtgcagaaggtggcggacggctacttcgacgcggcggtgggcgacatctcgatcgtcacgaaccgaacgcgggtggtggacttcacgcagccgtacatcgactccgggctcatgatcgtgtccacggtgaagtccagcagctccgacgagtgggccttcctcaagcccttcacaccggagctttgggccactgttgtcgccttctgcatcttcgtcggcgccgtggtgtggatcctggagcaccggcacaacgacgagtttcgcgggccgctgaagaagcagatggtcaccatcttctggttcagcttttcctccatgttcttcacgcagagtgagtggtattaagttgcgtgcactaaacggttcaacctaaaataaaagtgatggacaattcagttatattatatttc

SEQ ID NO: 142472 - DNA, 3425 bp, Zea Mays
attttcctccgcttcttcttgattcactggtggtgcacaggtgctgggcactcgcccaagttttcttttttttgccgtcggtgctcgcttgttgagttgttgttcctttctttgtttcccaaaatcgtatctttctgtcaacgctgttgccatgtccggaccggagtcaggggccagctgaggcgacaaccataagccctcacccttaccctcagctgctgcttcttggcttgggcttgaagcagatcaagggaggaggagaaggagatggcgtcgcccttgtcttcctcctcctccagcaccagcaccagcaccagcacgctcctccggctgatctgcctctgcaccgccttgccagtcgccctgcaggcggcggcggcgcgcccgcccaacgtcaccgtcggcgccctcttcaccttcgactccgtcatcggaaggtctgccaggaccgccatccagctcgccgtcgacgacgtcaaccgcgaccccgccgtgctgagggacaccaacctcagcgtcatcttccaggacaccaagtgcagcggattcgtcggcacaatccaagccctggagctgatggagaggcatgtggtggccgtggtgggcccccagtcctcgggcatcgcgcacgtcgtctcccacgtcgccaaccagctgcgcgtcccgctgctgtccttcgccgccaccgacccggcgctcgcctcctcgcagtacccctacttcgtccgcgccacgcacgacgaccgcttccagatggccgctgtcgccgacgtcgtcgcgcaccacggctggcgggaggtcacggcggtctacgtcgacaacgactacggccgcggcggcgtcgtcgcgctcggagacgcgctcgaggccctgcgcgccagggtctcctacagggccgcgttcccgccgggcgccgaccgcgccgcgctcgccgacctcctcgtgcgggccaacatgatggagtcgcgcgtcttcgtcgtccacgccagccctgactcgggactcgacgtcttcgccgccgcgaggtcgctcgacatgatggccaccggctacgtctggatcgccaccgactggctcgccgccgccatcgatgctgctggtgctggtgctgctgctgctgctggtaatatacagggtgtcctcatgctgcgccagtacaccccggactcggacgccaaggcgtcgctcgtctccaggttcgcggccaaacagtacatcaacgcgtacggcctcttcgcctacgattccgtctggatggcggcgcgcgccatcgaccagttcctcgacgacaacgccagcggcggtaacgtctccttctccgccgaccgcaacatccgcgacgccaacggcagcgcgctgggcctcagcgcgctcagggtgttcgaccagggcgagcagctgcttcggaaggtcatgctcgccaacttcactggcgtcacgggcagcgtccggttccagttggacgccgatgggagcgggggcgcgaccctcatcaaccccgcctacgagatcctcaacgtcggtggcacgggcgtccgccgggtcgcctactggtccaactacacgcgcctgtcggtggaggcgcccaggctgctcgccgacggagggccgccgcccaactccaataacacgaccacccagcagcagcagcagatgtacagcgtcatctggcccggtgacaccacggctaagccgcgcggatgggtattccccaacaacggcaagccgctgcggatcggcgtgccgtaccggacgacgtacaagcagttcgtgtccaaggaccggtccagccccgacggcgtcagcggctactgcgtggacgtgttcaatgcggcggtggcgctgctcccgtacccggtgccggcgtcgttcgtcctgttcggcgacggcgtcaagaaccccagctacaacgatctggtgcagagggtggctgacggcttcttcgacgcggcggtgggcgacatctccatcgtcacgaaccggacgcgggtggtggacttcacgcagccgtacgtggagtccggccttgtcatcgtgtccacggtgaaggccaagaactccaacgagtgggccttcctcaagcccttcacgccggggatgtgggccatcatcggcgccttcttcctcttcgtcggcgccgtggtgtggatcctggagcacaggttcaacccagagttccgggggtcaccgaggaggcagatggtcaccatcttctggttcagcttctctacgatgttcttcgcgcacagagagaacaccgtgagcactcttggccgcttcgtcctcatcatctggctcttcgtggtgctcatcatcaactccagctacacggccagcctgacgtccatcctgacggtgcagcagctgtccacgggcatccagggcctggacagcctcctctccagcaacgaccccatcggctaccaggtcggctccttcgcccggagctacatgatggacgagctgggcgtcccagcgtcgcgcctccgggagctggccatcgacggctacgccggcagcctgcagcgcgggcccagcaacggcggcgtggcggccatcgtcgacgagctgccgtacgtggagctcttcctctccaccaactgccagttcaggacggtgggccaggagttcaccaagagcggatggggattcgcgttccagcgagactcccccctggcggtggacctgtcgacggccatcctgacgctgtcagagaacggcgacctgcagcggatccacgacaagtggctcagcccagggacgtgcgcgtcgcagagcaccgacggcgtgggcgccgacaggctcaatctgggcagcttctggggcctcttcctcatctgcggcgtcgcctgcttcgtcgccctcctcatctacttcgccaggatactctgccagttctgcaagtaccacggccacgggaccaccgacggtgccggcccgttccccgtcccggagaggagcctgcggcggcccgccaggctcaccagcatccgggacctcatgtcctttgtcgacatgaaggaggccgaggtgaagagggccatccggagcaggtccgacaggcgactcgacgggtccatgggcggcaggagctacacctccgaagggccgtccttgtcacggccgtcctccatgtcgccggtgtaagacgggccggcggcgttcttcttcaagacacgttttttgtttgtgctgatctgacttaggtagttggagcctggaggcgacgatctgaaatcgatgaaaccgtgcgtatgcacaaattgctattcaacgaacatacacacacacacgatctttcggaagatagaatctgtaggtgctagtatgcaacgtagttctcccctagaattgcaggggtattatgtacaaaagtttcaggtttttatggacagctaaagttgaaatgagaatttcttttctat

SEQ ID NO: 142473 - DNA, 1647 bp, Zea Mays
ggcaatccagagccgcctgacgagctgcactgctcgcctgcgacggctggaggaggaagcggcggcggcggcccttccgcggtcacgctcgacatcctcctgtccgaataagacggcgaccagtcggcagctgtcctcccggtcttcttcctgctctcggtgatggcggacctccagagcctgcgtatgagcgcggtgttcttggttgaacgccggctcgcgcctgacgaacgagcctccgtcgtcaccccgccgttgccgttggccaccgaagctgagcggtcgctggtgccgacccagctgcaggaagccatttccaggtcggccgagctgccaccgtcggcgaacatgtcgtcgtcgtcgtcgtcgtcgccgtcgccgccgtcggccttggccaagaagaggtcggtcgcggggctgacggactgcagcatgtcgctggatttggacgacgcggggctcgcgggcctgctgttcctgcgcccgtcgccgtccctttccctttccgcagcggcagcatgttgcctttcgctttccttgcggcggaagtggtccgagcttgtggctgcagcggcgtcgcttatgaggcgcgcctcccgcagcacggcggagtgggaggctgactcgtcgcccttgttgcggaggaaggcctccatctccgcctgcaagcggttgaggtgcgtgtacttgttctcgagcgcgagcttggcgtcggacagcttcatctgcacgcgctcctcccgccacacctcggccatctgcagcatgcggcgctcctcctccatctcctcccgcatgcgcaggcactccccgcggagcagctccacctcggcctggtcctcctccacctcccgcgtgagctcggagcaggcgtcctccatcagctcccgcgccttgcgctccatctcgtagctctgcgcctgctgcttggccgccgcccgcgcctccgccaggtcgcgcagaagcctggcgttggcctgctccagctgcctccggtgcctccgctctgcgcctagctcgtcctggagggcggccacggcgtggcgggccttgtcccggacccgggacttccacgccgccttctcctcggccagcctccgcaggaagcggtccaggcgcttggtcataaggcgccgctcctcctccagctccctggcttcgcctcgcgccttctccagctccgcctccatgagcagcagcagaggggaagacattgctgatgtcgaggcgaagaagatgttgtccaatcggagtccccgtgctcttcttcccctcagatgcgagtggttggcatcccatttggtggccttctccatggacgaggagccgtccaagcacgcgtcgatctgcagtccatgcggaattgttgagaaagggaatgaggacggctgcccagactgggaggtgtcgattttaccttgtctaggatgccattcctagtgctgctgctagtacatcggcaacggcagaggtggtggcttggcctcgtccggctccgtcccatgagcttttgctgcgggacagacaaaatagatcagtcttcatctacagaaacagatcgatccacataaagatgtcatctccgttcgtcccattatgtatacatgttgggttatcaattatcatggatacagagtgctcttcttg

SEQ ID NO: 142474 - DNA, 1818 bp, Zea Mays
tcactgttagcgtcatgatctgtatatctgatgtgaacaatgtacattggacatcaagactagtatgttatgtaggagtgcaatataatacaatataatataatataatacagggagtagtacatggatgttatggtggtatttatatatgcctattaatctatcaataccatatattcagaatttgtgatctgatgaattttggtagtgttgctcgtcatcaaggtttttgcacacggaggggaggggcttctgatcgtccatcctcgcctccatcagcttctccttgaggctctgcttcagcctgcctccccctccccctacccgctgtggcaatccagagccgcctgacgagctgcactgctcgcctgcgacggctggaggaggaagcggcggcggcggcccttccgcggtcacgctcgacatcctcctgtccgaataagacggcgaccagtcggcagctgtcctcccggtcttcttcctgctctcggtgatggcggacctccagagcctgcgtatgagcgcggtgttcttggttgaacgccggctcgcgcctgacgaacgagcctccgtcgtcaccccgccgttgccgttggccaccgaagctgagcggtcgctggtgccgacccagctgcaggaagccatttccaggtcggccgagctgccaccgtcggcgaacatgtcgtcgtcgtcgtcgtcgtcgccgtcgccgccgtcggccttggccaagaagaggtcggtcgcggggctgacggactgcagcatgtcgctggatttggacgacgcggggctcgcgggcctgctgttcctgcgcccgtcgccgtccctttccctttccgcagcggcagcatgttgcctttcgctttccttgcggcggaagtggtccgagcttgtggctgcagcggcgtcgcttatgaggcgcgcctcccgcagcacggcggagtgggaggctgactcgtcgcccttgttgcggaggaaggcctccatctccgcctgcaagcggttgaggtgcgtgtacttgttctcgagcgcgagcttggcgtcggacagcttcatctgcacgcgctcctcccgccacacctcggccatctgcagcatgcggcgctcctcctccatctcctcccgcatgcgcaggcactccccgcggagcagctccacctcggcctggtcctcctccacctcccgcgtgagctcggagcaggcgtcctccatcagctcccgcgccttgcgctccatctcgtagctctgcgcctgctgcttggccgccgcccgcgcctccgccaggtcgcgcagaagcctggcgttggcctgctccagctgcctccggtgcctccgctctgcgcctagctcgtcctggagggcggccacggcgtggcgggccttgtcccggacccgggacttccacgccgccttctcctcggccagcctccgcaggaagcggtccaggcgcttggtcataaggcgccgctcctcctccagctccctggcttcgcctcgcgccttctccagctccgcctccatgagcagcagcagaggggaagacattgctgatgtcgaggcgaagaagatgttatgcgagtggttggcatcccatttggtggccttctccatggacgaggagccgtccaagcacgcgtcgatctgcagtccatgcggaattgttgagaaagggaatgaggacggctgcccagactgggaggtgtcgattttaccttgtctaggatgccattcctagtgctgctgctagtacatcggcaacggcagaggtggtggcttggcctcgtccggctccgtcccatgagcttttgctgcgggaca

SEQ ID NO: 142475 - DNA, 214 bp, Zea Mays
ggtggcgcggggaggagacggcggcgcggggaggccgcgacacggggaggagactgtggcgcggcgaggcggcggcgtgacgagcgggcgcggcgggcacggccgcgacgaggggccggcgcggggagggcggcaggacgacgcggcgaggggcgctcgcggtggcgcgcggcgaggtggcgtcgcgacgcgagcgggcgggcgcggggaggcg

SEQ ID NO: 142476 - DNA, 3105 bp, Zea Mays
caaatctccctctcccctggtcggtcgtctgtgtctcggctccgttgttgcgctgcgctgccattctcccccctttccaattccatccgaatcgagaggcgcctccacatccacctccaccgatcctcaaaccctagatccgccggccatgtccgcgcgaggggtgcgcccgggggtgctgcaccacaaggagaacaatccggcggacgcgcagcctggaaagcgccagcgcaccgccgctggggccgggaggcagccgctcgccgctgcaccgccgccgcaggaggagcccatggtgttctcgggcagggaggacgtcgacgctctcctcaacgagaaaatgaaggggaagaacaagatggactacaaggggaagagcgagcaaatgatggaatacatcaagaagcttcgagcctgtaccaaatggcttcttgagcgggaagatgcaaatcttgttgaaatcgagaggatcactggtcagcttgacgcgacacacaagcaacactctgagatagtggctgtcttgaagaatactattgaagaaacaaaatcaatatgtgaggaacttcaaaaacaatgtgcatctctacaagaggctctaaagacagtggaggctgaaaaaatggatgccctgaggtctctaggagatgagagggaggccaggatgggtgtggaatctttgcggaatggacttctagaagatctgaacagggcaaagttggaggaaaaacgccttaatgatcagattaagatgcttcaggacacaaataaaaggcttcaagaatataacacaagcctgcaacaatacaattgcaaccttcaagcagatgcaacaaagaatgcggaaacaatagtaaagctgcaaaaggagaagaacactatggtcgagacaatgaatggtctgaaagatcatgctaactcagtaaaaatgcaactagacattgcaaggtctttgcaaaatgaagccacaaaacaaaagaccgatttattaaaggaagttgaaagtattagaatggagcttcaacgtgcaagggaggaccgtgacactaaatctgctcaagtagattctttgctggttgatattggaacatacaaagaaatgactggaaaatccgtcattgagttagatagcgccatggcaaaaacctctgccctagaggaaacatgttcgtctcaaaggaagatgatagagacattggaaattaagcttgcagctgccaatgaaaagttaaagaggtctaatatgacggcctcggaaaccatgaccgagtatgagaacatgaagaaaatgctggaaagtgttcagtctcgccttgaagaggccgagcaaacaattctggaaggagagaatttacgaaaaaagttacataatacaattcttgagttgaagggaaacatcagagtattttgtagagttaggcctttgctgccaaatgaatcaggagcagtatcatatccaaagaatggagaaaacttaggccgaggcattgagttgttacataatgcacagggatattcgtttacttttgataaagtatttgatcattcggcgtcacaagaacatgtgttcatagaaatatctcaacttgtccaaagtgccctagatggctataaggtctgcatatttgcctatgggcaaactggttctggtaaaacatatacaatgatgggcaaccctgagttagaagatcaaaaaggaatgataccacgatctctggagcaaatttttcaagctagccagacacttaactcacagggttggagatataagatgcaggcctcaatgttggagatttacaacgagactatacgcgacttgctagcaacgaatcgcatggctgttcaggatgttggtgcttcaaagtacagtatcaagcatgatactaatggtaacacgaatgtgtcggaccttacgatcattgacgtaactagtatcaacgaagtttcttctctccttaggcgggctgctcagagcagatcagttggtagaacacaaatgaatgaggaatcatcaagaagtcactgtgttttcactcttcggattttcggtgtaaatgagggaacggatcaacaagtgcaaggagtgctgaatcttatagatctagcaggcagtgagcgcctgaacaaaagtggtgccacgggtgatcggttgaaagagacagtggctatcaacaaaagcttgtcatgtttaagtgatgtcatcttctcgattgcaaagaaagaggaacacgttccatttcggaactcaaagctgacatatctgctccagccgtgtctcggaggggactcgaagacactgatgtttgtgaatctgtctcctgaagcgtcctcgacaggggagtctctttgctcattgcggtttgctgcaagggtgaactcctgtgagatcgggatccccaggcgccaaacccagatgcggagctcacaatgatgaaatacggcggaagcgagctgccagtgtaatgcttgtgtgtgtgttgatttggtgatgcaaccgatcatttgcatccccttgtctggaggtggtgtgagttgccaattttatttggtttgtggccttgttgattgcgctaacggctggcagcggtgggtgtgctggcctattatattaatcttaggacctgatctgatttgtatgttgggatgtgttgccattttcaatttttttgctttcattcgtagtcttgatttgtcgtttgcccaatgcccaatgcctctgagctgagctgggcgtgtatgtaaacaactgtgtacccgttgtcggacacgcacacagcctgacatgataattgtatttccctgctctgggaattctgcaataccccttgtgagtttcaagtattcatttacacatcatgatatatgaatgaaaaattgtggttctgctaggccatcttggccatgagctcctggaggatgagctttgtctcggcgtagcggtcgccgatcctggcgtcgtccttggctgtgacggcctcctggagcgtctcgaagctgtcgaagaggcggttggcgaggtcgacgaagggcggcttgtcttcggcggcggagatgagcttgtcgaagtcgtagtacatgaaggtggacttgaggcggaggtacttg

SEQ ID NO: 142477 - DNA, 2639 bp, Zea Mays
caaatctccctctcccctggtcggtcgtctgtgtctcggctccgttgttgcgctgcgctgccattctcccccctttccaattccatccgaatcgagaggcgcctccacatccacctccaccgatcctcaaaccctagatccgccggccatgtccgcgcgaggggtgcgcccgggggtgctgcaccacaaggagaacaatccggcggacgcgcagcctggaaagcgccagcgcaccgccgctggggccgggaggcagccgctcgccgctgcaccgccgccgcaggaggagcccatggtgttctcgggcagggaggacgtcgacgctctcctcaacgagaaaatgaaggggaagaacaagatggactacaaggggaagagcgagcaaatgatggaatacatcaagaagcttcgagcctgtaccaaatggcttcttgagcgggaagatgcaaatcttgttgaaatcgagaggatcactggtcagcttgacgcgacacacaagcaacactctgagatagtggctgtcttgaagaatactattgaagaaacaaaatcaatatgtgaggaacttcaaaaacaatgtgcatctctacaagaggctctaaagacagtggaggctgaaaaaatggatgccctgaggtctctaggagatgagagggaggccaggatgggtgtggaatctttgcggaatggacttctagaagatctgaacagggcaaagttggaggaaaaacgccttaatgatcagattaagatgcttcaggacacaaataaaaggcttcaagaatataacacaagcctgcaacaatacaattgcaaccttcaagcagatgcaacaaagaatgcggaaacaatagtaaagctgcaaaaggagaagaacactatggtcgagacaatgaatggtctgaaagatcatgctaactcagtaaaaatgcaactagacattgcaaggtctttgcaaaatgaagccacaaaacaaaagaccgatttattaaaggaagttgaaagtattagaatggagcttcaacgtgcaagggaggaccgtgacactaaatctgctcaagtagattctttgctggttgatattggaacatacaaagaaatgactggaaaatccgtcattgagttagatagcgccatggcaaaaacctctgccctagaggaaacatgttcgtctcaaaggaagatgatagagacattggaaattaagcttgcagctgccaatgaaaagttaaagaggtctaatatgacggcctcggaaaccatgaccgagtatgagaacatgaagaaaatgctggaaagtgttcagtctcgccttgaagaggccgagcaaacaattctggaaggagagaatttacgaaaaaagttacataatacaattcttgagttgaagggaaacatctcaacttgtccaaagtgccctagatggctataaggtctgcatatttgcctatgggcaaactggttctggtaaaacatatacaatgatgggcaaccctgagttagaagatcaaaaaggaatgataccacgatctctggagcaaatttttcaagctagccagacacttaactcacagggttggagatataagatgcaggcctcaatgttggagatttacaacgagactatacgcgacttgctagcaacgaatcgcatggctgttcaggatgttggtgcttcaaagtacagtatcaagcatgatactaatggtaacacgaatgtgtcggaccttacgatcattgacgtaactagtatcaacgaagtttcttctctccttaggcgggctgctcagagcagatcagttggtagaacacaaatgaatgaggaatcatcaagaagtcactgtgttttcactcttcggattttcggtgtaaatgagggaacggatcaacaagtgcaaggagtgctgaatcttatagatctagcaggcagtgagcgcctgaacaaaagtggtgccacgggtgatcggttgaaagagacagtggctatcaacaaaagcttgtcatgtttaagtgatgtcatcttctcgattgcaaagaaagaggaacacgttccatttcggaactcaaagctgacatatctgctccagccgtgtctcggaggggactcgaagacactgatgtttgtgaatctgtctcctgaagcgtcctcgacaggggagtctctttgctcattgcggtttgctgcaagggtgaactcctgtgagatcgggatccccaggcgccaaacccagatgcggagctcacaatgatgaaatacggcggaagcgagctgccagtgtaatgcttgtgtgtgtgttgatttggtgatgcaaccgatcatttgcatccccttgtctggaggtggtgtgagttgccaattttatttggtttgtggccttgttgattgcgctaacggctggcagcggtgggtgtgctggcctattatattaatcttaggacctgatctgatttgtatgttgggatgtgttgccattttcaatttttttgctttcattcgtagtcttgatttgtcgtttgcccaatgcccaatgcctctgagctgagctgggcgtgtatgtaaacaactgtgtacccgttgtcggacacgcacacagcctgacatgataattgtatttccctgctctgggaattctgcaata

SEQ ID NO: 142478 - DNA, 3729 bp, Zea Mays
ccgatgcggatgcggatgccgatgccgatgccgaagcgcacctgtctcttctccttgccgaccctccacccccagccgaagtgaggccaccaatcacacagccgctccccccgctcgtcctcctcccctgcccctgcctccgcccccgcccccgcccccgccccgccacgccagcatttggattggattgccggcggccgagtggaggcggagatccatccggactccggtgagtccgttcccgctgccgtgcttgatccaggcacgcatgacatcacatcagttcagctagatgcctgaaggagaagttcagtagcacaccactacctcacaaaacagctcttctgctcgtgcaaaagtatccagggtccagatgggttcagacaagcagattggtagcccacgccaactcttggaaacactaaagatgggcagagttaggactatcctgacacatacatacccgtaccctcacgagcactccaggcatattatgactgcagtgattattgcctgtctcttctttatatcgtctgacaacatgcacacgctcatacataaactggataacaatatcaagtggtggtccatgtatgtttgcctcattggcttcttctatttcttctcatctccttttcttggaaggaccattcagcccagctactcaaattttaaccgctggtatgttgcttggatttgctttgcatccctgtaccatcttcctagcttccagtcaatgggggttgatatgcgcatgaacctctcgcttttcttgacaatatatttctcctcagtgcttttcatcattgcctttcatatcatatttattggtctctggtacattgggttggttgcacgcttggcaggaacgaggccaggcgtatggacaattctccagaactgtacagtaatcagcattgcatgttgtgtgttctacagtcattgtgggaatcttgctgtgcacaagagcaaatcttttggtagtagttctgatcccaatttgcttgcttttcttaaaaatgaaaacgggagtacctggatatcaaattttctccgtatgaatcagttgaaagatgagatatgttcgtcttggtttgctcctgttggatctgcaagtgactatcctattctggcaaaatgggttatctacggggagttagtttgcagcggatcctgtgctggcccatcggatgaaatctctcctttgtactcattatgggctacatttgttggcctctatatcgctaactttgttgtggagagatcaactgggtgggctcttacccacccgtcaacagatttggaggatgagaaactgaagaggcatatgaaaccagattttctggacatggtaccttggtattcagggacatcagctgatttattcaagacagcatttgatcttatggtctctgtgactctttttgttgggcgatttgacatgcgcatgatgcaggctgcaatgaaaggaccaacaggcaacactccaaatgatgacctattgtatgaccacttcaatgaaagggaagacctttggtttgactttgttgcagacaccggtgatggagggaattcatcatatacagttgcccgactgttagcccaaccatctattaggactgttatcggtggctctatgcatactcttccacgtgggaacttacttattatcggcggagatcttgcgtacccaaacccttcatcatttacatacgagaggcgcttctttaggccttttgagtatgctctgcaacctccaccttggtacagagatgaacatatagctttggataagcctgagcttcctcctggtgtatcaaagatgactgaatatgatggaccacagtgtttcataattcctggaaatcatgactggtttgatgggcttcatacttttatgagatatatatgtcataaaagctggttaggtggatggtttctgcctcagaagaagagttattttgcattgcatcttcccaagggttggtggatatttggtcttgatttatctctccatggcgatgttgatgtataccaattcaagttctttgctgatgtttgtcagaataaggttggagagaatgattctgtgattgtagtaacacatgagccaaactggcttcttgattggtactggaatgagactacaggcaagaatgtatcacacttaattcaggaatacctgaaaggaagatgtaaacttcgcatggcaggggatttacaccattttatgaggcactctgccactcgatcagaaaagaataattttgtgcaacacttgcttgttaatggatgtggtggtgcctttttgcacccaacacatgttttcagaaactttgagaggttctctggaaccacctatgaatgcaaggcagcttatccatcctatgatgagtctactgggattgcattgggtaacatattgaagttccgcaaaaagaattggcagtttgacatcattggcggttttatatacttcattttggtgttttcaatgttcccacagtgtaatcttgttcgtatcttaaatgaagaaacttggtctgggcgtctgaaaagcttctcaggcacaatatggagtgctttgctttatatttttgagcactcttatgtctcttcagtaggaagtcttactttattgacggcgtcatattcattcgtaccatccaaactatcaaggaggagaagagctattataggcggcctccatgttttggcccatttaactgcagcactacttttaatgttgctgctggagttgggcattgaaatttgtattcgtaaccatttattggcaacttcaggttatcacactctgtatgaatggtatcgatccatggaaagtgagcattttccagatcctactggtcttcgtgctcgtttggagcaatggactctgggactgtatccagcatgtataaaatatcttatggcagcctttgacgtccctgaggtcatggctgtgacaagaataaatatatgcaagaacggaatgatgtctctttcgcggagtgttctgatcatgtactacacttctgtgtttatctatttctggattttctcgactccagttgtttctctcatatttggtagttacctatacatctgcatcaattggttccacatacactttgatgaagccttctcgtcgctgcgcatcgcaaactacaaatccttcacaaggttccatgttaagaaggatggtgatctagaaatatttactcttgcagttgacaaggtcccaaaggactggaagttggatccgaggtgggaatcagagggacgagggcctcatcagctcagccatgaccggaagcatccaagcaagtggaggtcagcctcatcaactgaccctgtgagatctgtacgggttgttgatcatttcaccatcgaaagaacaagaaccccagatatggagccctcttcctgattgtgcagcccttactattataaggagttgctactgctgctagaaaaattaacaataactagcttcaacacacagtattgtttttgtttccacatccagccaataggtggaccgaggtgatctgcccttgtcggcgtccccgctttactgacctcacctgcagcattgtaatctgtatagaaagaaaattcacctgctgcctattgcttgtattcaatcaaaggaactctaaaaaaaagagtgttacagaagaatgttttgagaaagcaaagggatgaatcgattcatcatcatttact

SEQ ID NO: 142479 - DNA, 2769 bp, Zea Mays
ctagtagtattatataaggagggagcaggcagcagcactctcctacagctccagattgtattcaaagagaggcagcgcagggtgcaagaagctgtccctccctccctcccctgtgcttctgctagctaggtgcctgcggaggagagatagggatacgatggccggcggtggcatcgtgaacacgggcggtggcaaggactaccccggcaagctcaccctcttcgtgttgctcacctgcatcgtcgccgccaccggcggtctcatcttcggatatgacatcggtatctcaggcggcgtgacgtccatgaacccgttcctggagaagttcttcccggaggtgtaccggaagaagcaggaggccaagacgaaccagtactgcaagtacgacaaccagctgctgcagaccttcacctcctccctctacctggccgcgctggtcgcctccttcttcgccgccaccgtcacccgcgccgtcggccgcaagtggtccatgctcgtcggcggcctcaccttcctcgtcggcgccgccctcaacggcgccgcccagaacatcgccatgctcatcgtcggacgcatccttctcggagtcggcgtcggcttcgcaaatcagtccgtgcctgtgtacctgtcggagatggcgccggcgcgtctccggggcatgctcaacatcggcttccagctgatgatcaccatcggcatcctggctgcggagctcatcaactacggcaccaacaagatcaaggccgggtacgggtggcgcgtgagcctggcgctggcggcggtgccggcggccatcatcaccctgggctccctcttcctcccggacacccccaactcgctgctggagcggggccacccggaggaggcacgccgcatgctccgccgcatccgcggcacggacgacatcggcgaggagtacgcggacctggtggcggccagcgaggaggcccgccaggtgcgccacccgtggcggaacatcctgcgccgccggtaccgcgcgcagctcaccatggccgtcgcgatccccttcttccagcagctcacggggatcaacgtcatcatgttctacgcgcccgtgctgttcgacacgctgggattcaagaacgacgcctccctcatgtcctccgtcatcacgggcctcgtcaacgtcttcgccaccgtcgtgtccatcgtcaccgtcgaccgcgtcggccgccgcaagctgttcctccagggcggcgcgcagatgatcgtgtgccagctcatcgtgggcacgctcatcgccgccaagttcgggaccagcggcacgggggacatcgccaagggctacgccgcggtcgtcgtggtcttcatctgcgcctacgtcgccggcttcgcctggtcgtgggggcccctgggctggctcgtgccgtccgagatcttcccgctggagatccgcccggcggggcagagcatcaacgtctccgtcaacatgttcttcaccttctgcatcgcgcaggccttcctcaccatgctctgccacttcaagttcggcctcttctacttcttcgccggctgggtcgtcatcatgaccgtcttcatcgccttcttcctgcccgagaccaagaacgtgcccatcgaggagatggtgcttgtctggaagtcacactggttctggaaaaggttcatcgccgacgaggacgtgcacgtcggcattggcaacaaccacccggccaaaaacggcagcgacaccaagggggccgacgcgtgaacgtgatctcaacatctatattccatctacagtcacaactgaaatgtacatttaggcttccattgttccatcaactagtagctacatgtcctcctagtaaagtaccagtgtttgtttgtgtaatgtttgttacgcccattaaattcttcttggattggatgaactacaagcaaagacattccctggatgcagtacaatgataacagcagccagtaggcaaacacattccagatggaagcaaagagattatttgccttttccatcatgtactactaccaactagccatacataaacaacaaaaacagggcatgttcacaaaatttcaccaccaagcaatagtacagtcttatagaagacatcttgaaaaaaaatactaatctttattttgtttctttcaagctttattcataaggcaagtaaatcatacaattcccaattgccatcaataccactcaacaatattagaaaaaaaaatatgggctgatatgaaagcactgctctgtttactgttttgagctttattcacgtgagagagaaaaaaaatccaccagcaaaactggtgcctcgctttacttcacaacaataccatggtagtatatcgatggtcgtgcttgactgatcttactgtgtccttccctctgtctgggtttgcttcgccagatctatggcactcgcatgttcaaggggccttgaccccagcgaggtcttgtgcgtgttgcgggctctcgtgtacttgagcgctgagcttgacacatatccagagcgtccatgccgcgagctctgtggcttgtgagcagacggggcacccaccaacctggaagatctgcggtcgggtctgccaccacggtcagaatggtgcgaagaagagatcttgcgggtatggcggtccgagacgtcttttgatccagtcgccctaataggctgcttgttgtacacagcgaggtttggcaggagaccaagcaggtacttcttcaggtgctcatcgcctacattcttctgtgcagggttgccggcaaggttaatggcttctagagagttg

SEQ ID NO: 142480 - DNA, 2846 bp, Zea Mays
attgtcattatcaatcatgaaagccattttcttaatacaacatttgatggagcagcatagagagcaggaaaatgatctacatttgatggagcatcctacgagtcaggtcaggcagagctgacgagcaactccgcagcagcagtcttgctcggcgccggcacggacgcgtgcacgtccagttgcagcacggcgtgcactgaggactccaccctggccgtgctccacagcacgtggcccgcggcccggcggagcgcccccgtcccgccgaccacggcgagctccctcaccggctgcgaggtgtcgtcgcggccggccaccacgagcgtgctcccgttgtagggccccgcggcgagcatgagcgtgacggcgaccacgaacaccgggcggctcatggagcccgtcatgtaggtcccctgcgcgcggccgacgggcgcggagccggcggcgaggcccgccgtcaggaggtcgtccaccgccaccgtgtcgccgaagcagttgcccgggtgcatcgacgggttctccgggcccggccgggcccttcaccagccgcaccgccgtctgccccggcccgcccacgatgtcgtgcatgtacaggcgcagccgcacggggcgccggcgggccgacaccgccgacggcgacgccaagagggccagagcgacgccggctactacgagcaggaggctcctgttgcttgcggttgcggcgaccgagctgctgacgcggatggccatgggggcatgcatggacgagcccgataagctgagagcctgagagtgatgcgatctgcaagaggaatcggttggtgggctgtctgtctttcaccctctctacctttcctgggaagttgcattgtcactgtctttcacctgaaggtgttcaatgcaagtttaagggctcaagtgattccaaggtgacacacaccatatcaacatctggtttgagtaaatctaattttgaatggacttgctaagttacggcacccgtttttctcgtgcggagaatttgataatctaagtgacttaagtttgagagagtagctacattttattcaatttttttccagggacagagatgggggctagcctgcattaaaaccagtaggacaagggatggccggactcgctctcgctccatccatccatcagtggagtgaagtgaataattcaacaccagcaaaacacacacaagttcgttcgcagcaagtaatggcgagaacgagagagaagctgacgctcctggtggccgcagtcgccgtgggcctcctgctagccggcggcgcgggcgcgggcgtggcgtcggcggcgcgtggccgtgaggggcggcggcgcgtgcacctgcggctgtacatgcacgacgtgatcggcgggccgaaccggacggccatccgcctcatctggggcgtgggcccgccgcacgcgtccatgccggggcgcaccttcggcgacacggtggccatcgacgacctcgtcacggacgggcccggcgtcggcgcagactccaggcccgtcggccgggcgcagggcacctacatgctgagctcgcagcacgaggaggtgatcgtggtcagcatcaccgtcgtcctcaccgcggggccgtacaacggcagcaccctcgtggtggccggccgcgacaggatctacgaccagacgagggagctcgcggtggtcggcggcaccgggggactccgcggggcctccgggtacgtgctgtggacgacggccaaggtgtggtcggaggtgcacatggtgctggagctcgacgtgcacgcgtccgtgccactgcccgacgaggaccacgacgacaacgacgttcttgttcttggcagtagggatgcgtagtaagatagacatggtctgtatctgtccctgtctaccaccgatcccatcaatgaataaataaacaaatataaaaggagcttgaattttagctcagactatatattctcaatgcatgagaaatatattaattacagctttgaagaatctatatctactaattatttagggttttttaaggtggtgccctcgattttggtggtgtgctcagttttacatgcattgagaaccgtctgcagagctaaaattgaagctcattttatatttatttaatcataaatggaatcggaggttctcctagacagagatagatagagaaccacgcatgtctcacgtctactaattaagttactactcatccctgctgccaagaacaaggtcgttgtcgtcgtcgtcgtcgtccggcagtggcagtggcacggacgcgtgcacgtcgatctccagcgccatgtgcacctccgaccacaccttggccgtcctccacagcacgtacccggaggcgccgcggaggtccccggtgccgccgaccaccgcgagctccctcgtctcgtcctgtacgcggtcgcggccggccaccacgatcgtgctgccgttgtatggccccgcggtgagcgcgagcgtgacgtccacgacgagcaccgcccctcccgctgcgagctgagcatgtaggtgccctgcccgcgcgcggccgacgggcgcggagccgatgtctgggccctccgtgaggactgtcgtcgatggccgccgtgtcgccgaaggaccgccccggcatggtcgcgtgcggcgggcccacgccccagaccagctggatcgccgtctgccccggcccccggatcacgtcgtgcatgtacacccgcaggtggacgcgacgccggccgcgcatcgctgctgccgctgccgctgccgctgccgccgccgccgtgtccacggcgacgacgacgaggcacacggctgcgacgagcagcagctgcctgctgcttggtgtgcccatatcttttttgtttggctat

SEQ ID NO: 142481 - DNA, 1067 bp, Zea Mays
ctcctccacgtacagtacataataagctaacagtccattccgtgcgcagccacaaagctagcttatttcccttcccttcacgcggcaagcggcggccggccttccgccgccatggccaccaccaccgcgcccgtcctcctcgtcttcctcgttgccattgccacgtccgtcgccccctcattccccatcctgacgatggcggcggacgcggacaacggcaccacccacctgagcttcttcatgcacgacatcacgtcgggcgccagcccgaccgcggtgaaggtgatcaaggggcccggcgcggggtccaccccgacggcgccggcgctgggcatgacgttcggcgacaccatggtgatcgacgacccgctgacggaggaggcgtcgcccgcgtccgccgcgctgggccgcatgcagggcttctacatgctggcgtcccagaccggggcggcgcttatggtgtgcgccaacctgctgctcacgtcgggggcccacaacgggagcacgctcgccgtgctgggccgcgacgacaccggccaggacgtccgggagatccccgtcgtcggcggcaccgggacgttccggatggccacgggctacgtgctgtggaagacgccggatgggatcaacggcaccgacgccaccgtccagctggatgtctacgtcaccacggacggcaacggcaccacggacgccggcgacgccgacggcggaggcggatccccgtccgcagggtcagggtcgtcggggtcgtcgggaggctccaagtccacctccggtgccgagagtaggaggaggaggatgaccggcgggtgggtcgtcgccgtagtggttgcggtggttggatccttctgggtttggtgagcaacgacctgttgacgaaggatgggggtgggtgggtggtgtgtgagtggggtggtggtcccacatgctggtgggtgagagtgggtgcatgtgctctgctgcggcatgtcggttgccggcatcattcctatctatctgtattggacttgttctagagcttttgcttttcgcaaaaaaaaagacatgcgggtcattatgttaaa

SEQ ID NO: 142482 - DNA, 1463 bp, Zea Mays
ggcggagtgaaggaagcagggaagcatcagcagcgccgccgccatcactgctacgctgccggcgctagagccctaaaccctagctagggctaggccatccatggccgcctctccccagactctgtcagctcccccggcaagcgcaagaggcaacccaagggcaagaagaataagaagaacaaactcgcgcgctccgaccaggatgactccgtccgccgccgccgcaacaagccgagcgccaagttcctcaagctgctccgcaagcgggcccgcgactacaactccgacgacgaggatgaagctggtgacgaccggcagcaggagcacctgccgaatcctcaacgccgcgttgacgaggacgacgacgaggccctctctcactccgagccggaggagggcgaggacgaggacgaagaggagggggcctccagctcggccgtcacgaggttcgagcaaggctgcagggcgttccgcgtcgcctttctcaagatcatggccaagaaactccccgatgatcccctgggtccaatcctgtcagcgcacaagacattggtagccgccaagttagccgaggaggtggaggagcacaagcccaagcgggaggctcggaaggagaagcgcgtggcagcagagaaggggcatgtcatacctaaagaccacttggacagcaaagagaaggagctcatcaaggttgcaaccaagggggttgtcaggcttttcaatgcggtgagcaaggcacagaaatctcgaaaagatttgaacccatcaaggactaaagatgccacagttatagcaaaagaaagaaaaaacaccttcctatcagaactggagatgccatctcatcaagataaaaagaggaatacatcttcaaatttctcaaagcacgccgtcaaagatgaagatgaaccagcatgggcacctcttcgtgacacatacatgcttggttctaaattgaaggactgggacaaaatgaaggattcttccgctgtcagtgaggaaaaaaaggttccttcaatcgactcttctgatgaggaatagaaacatagttagtatggagcttgtatcttgttgtccgttgctggtaaaacgtgttgagatgggtgtatgtgtattcagattatcaattccacacctcactcacccttttctggagattttttttggttgcattgcatttgttctaaatctatagtatatatgcatcctttattatactggcattagtgatggatgtgaacaaaacaccagtatttagaactttgtcctttgtgcaattttatccaatgttggtccttgcctaccatcaaactgtactccatttcaaagtcgttccgatttttctaggtgcgtagttttttttgttatgcacgtatcttgatatgtaataaaattaatgtatcaagtctagaaattctaaaatgtgttttatttagaagaggaagtagtaagctgcagaaatctat

SEQ ID NO: 142483 - DNA, 1534 bp, Zea Mays
ctgcccactccgactaatatcctggggccgcgcggctatgggcggagtgaaggaagcagggaagcatcagcagcgccgccgccatcactgctacgctgccggcgctagagccctaaaccctagctagggctaggccatccatggccgcctctccccagactctgtcagctcccccgcccgccgccgcggccgtcccgaacctcggcggcaagcgcaagaggcaacccaagggcaagaagaataagaagaacaaactcgcgcgctccgaccaggatgactccgtccgccgccgccgcaacaagccgagcgccaagttcctcaagctgctccgcaagcgggcccgcgactacaactccgacgacgaggatgaagctggtgacgaccggcagcaggagcacctgccgaatcctcaacgccgcgttgacgaggacgacgacgaggccctctctcactccgagccggaggagggcgaggacgaggacgaagaggagggggcctccagctcggccgtcacgaggttcgagcaaggctgcagggcgttccgcgtcgcctttctcaagatcatggccaagaaactccccgatgatcccctgggtccaatcctgtcagcgcacaagacattggtagccgccaagttagccgaggaggtggaggagcacaagcccaagcgggaggctcggaaggagaagcgcgtggcagcagagaaggggcatgtcatacctaaagaccacttggacagcaaagagaaggagctcatcaaggttgcaaccaagggggttgtcaggcttttcaatgcggtgagcaaggcacagaaatctcgaaaagatttgaacccatcaaggactaaagatgccacagttatagcaaaagaaagaaaaaacaccttcctatcagaactggagatgccatctcatcaagataaaaagaggaatacatcttcaaatttctcaaagcacgccgtcaaagatgaagatgaaccagcatgggcacctcttcgtgacacatacatgcttggttctaaattgaaggactgggacaaaatgaaggattcttccgctgtcagtgaggaaaaaaaggttccttcaatcgactcttctgatgaggaatagaaacatagttagtatggagcttgtatcttgttgtccgttgctggtaaaacgtgttgagatgggtgtatgtgtattcagattatcaattccacacctcactcacccttttctggagattttttttggttgcattgcatttgttctaaatctatagtatatatgcatcctttattatactggcattagtgatggatgtgaacaaaacaccagtatttagaactttgtcctttgtgcaattttatccaatgttggtccttgcctaccatcaaactgtactccatttcaaagtcgttccgatttttctaggtgcgtagttttttttgttatgcacgtatcttgatatgtaataaaattaatgtatcaagtctagaaattctaaaatgtgttttatttagaagaggaagtagtaagctgcagaaatctat

SEQ ID NO: 142484 - DNA, 3847 bp, Zea Mays
agaccttagttttagacctcctgcacactcaagcctgttagccaaaaagttcaacatcagttccagatccagtggcatgacaatagtatctggattcctagctaatcgggaacaacgacaaatcaggaaaacgatcagtgtacgaaattatcacacaactggaaaaattcatggcgaaaacatcactaccctgagatgatgaaattcagcattgtattcacaggataaaccatctgaggcacagcagctcataaaacagggattgatatggggaattttgtttatatatttctacacagcactgagttactgagaaggaaaacaagacccaagttattttctggtaagctaatataatcctagcacggcaccatgcctagcctgcacctgcattgtctgaatttgctcagattgcctttttctctactctgttcttctctcatgtcaatacctcctaggctagcatttgtctgattaagaaaaaaaaggaagaaactggcaatcagcatggtgtcatggcgctgctcacacactgttgtcaagacagctcacaacttgctcaatcgacgggcgctgccgaggatcagcgctgatgcacttgcacgccgtctcgaggacagacagcagctgcttctcatgcgccttgctccatatcaggctgtcgaaaatctgctcttccttcctctcagacttcatctgaagaacccaggagatcaagtccctggaccctttggacctggacacatccacggggcgcctacccgtgagcagttcgagcaagactacgccaaagctgaagacgtcccctttgggagtggcgatcacagcttggctgtactctggtggaatgtagcccaaggtgccaactagatccgtggtcacatgagtgtcatacggctgtattagccttgcaagcccgaaatcagccagacacgcctcgaagttttcgttcagaagaatgttgctggacttcacgtcccgatggatgatgttgggctcgcagaccttgtgcaagtaagctagccccctggctgagccctgggcgatcctgagcctcgactcccatgtcagcacatagccaccatctgacctctcgtgcagccagtagtccaggctgccgttctccatgtaagagtagatcagcagcctgtcgtctccgtagcggcaatagcccttgagggtcacaaggtttttgtgttgagcctgtgacagtgcttccacctcggcacggaactccctctccatctgcccgcagtcaccggagagtctcttcactgccgccttcgttccatcggggaggtaggccttgtacaccagaccgaatccaccgcaccctattatgttggcttgatcaaagttatttgtcgatctgactaagtcactgacagttagctccttcactgcagaattctgaaagaacagcactggctttgagtaagagccatacaattcatgacaggagccctcggtatcttcttcatgctcaatagcggagacctccctctttgacatgttcaccagaataacagctaaaaacaccgcaagggccaggccgatgcagatggccaccccgagtattttgtttttcttgttcctcatacttggcgcgggctttatgtccgtgtcattaggagttccactggacaaaatcaggtggttgcaggaacttgatctgcatagagcaggattaccctcaaagctcgagttggagaacgtcaggaactgccctccgcttgggatctgccccaccaagtgattgtgagccacgctgaacttggacaggaaggtgagctccgtgagggacgacggaatcacaccgctgaggttattggatgaaaggtcaagaacctccagattctccattctcgacagcgaatcaggaatgctcccagatatgaaattgttgctcaagtccaggacatgcagctccctcaggcttccaaactcaggccagatagtcccattcaggccgttgttgttcaggatcagcgacggcgggaagtttgagagctggttgtactggcggccgctagtgcttctgttatgcttcacatacaatggcatgctagtgaacgccatacccggtgaccgcgtgacagcgacaaggctcttgagctgcgtcaaactctttggaacctcgccgaccaaagtattgttggagagatccaagtagctcaggtactcaaacttgccaatccacgaggggatgacgccaaccaattggttccaggacagatcaagcacctccagcttcttgcactgagcgagccacttgggaacccttcccctgagagcacaatcaccaagggccagcacctccaatccaccgaacccaccaatgccgtcgtccggcagctcctcgccgacaaaattcttggtgaggatcagcgtggtgaggttcttgcaggcaccgagcaccccgagcgcccccgagatgttgtgcaggctgttgttggacagcgagagcatcgacagcgaggcgaggcggctgtaatcctggggcagctggcctgtcagcctgttcctggcgaggctgagcgacttgagctccctgcagccagcgaggctgacagggagcgtgccgttcagctggttcgtggcaaggtcgacggaagcaagcgacgtcatcccggagaagttgaagagagcgattgggccggagagggagttgttccggagatcaagagcacggagagacgagagccgcgacagcgacggcggcagctgccccgagaaggcgttggagtgcgcggccaaattctggagcgacgtgaggccaccgaacgcgtcggggaggtcgccggagaagcagttcccggacaaatccagaaaggtgaggtctttgagcccggcgatgcgaggggtgaggctgccggtgaggcggttgccggcgagggagagcctgcgcaggccggtgagctggaagagcgcgggcgggaggtcccccgcgagcgcgttgccggcgagggcgagctcccggagcgtggcggcgcagggcggcggggacgaggcgttggacgggagcgcgccggcgaggcggttggctgagaggtcgagcacccggagcgcgggcgcgccggcgcagaggtcgggcgcgagcgcgcccgagatggagttgttgctggcgtcgagcgcgtcgaggcggggcgggaggagggccgggagcgcgccgtggagcaggttggaggagaggttggcggcgcggagcgtgcccggcagcgcggcgaggaccgcggcggcggcgcccgtgagcgcgttgcggctgaggtcgaggtcccggaggaacggcagcgccgggggccggagcgggcccgcgaggccacgggccgggagacgcagggcggacacgcggccgccggcgtcgcaggagacgccggcccacgcgcagcatccggcggagtagggccagagggcgtccgcggcgggcgcgaggttcctggcgaaggcccgcagcgcgcgcaggtcgtccgggtggcacggcgccgggtgcgggtgcgggtgcgggtctgcggtggcgcgcgcccgcggaacggacagcggcaggaggagaaggaggaggtggaggaggagcggcagtggcggcgcgcgcttggctgccatggactcggattcggggtctggcacgcacggaggcgcggctgcgggaagggaagggaaggaagccggtcacgcggctggtgcggcggcggcggcggaggatgaggacaggagggggcaatgcggatgcggcggcggcggcatcccgatgcagacgtggcgttgtggaattctgctgcttggcacgttgctctcgtgtggcgtggagggagggaggaagcagtgcgggggtttgtggagtggcgatgat

SEQ ID NO: 142485 - DNA, 2475 bp, Zea Mays
gagtgagcctgcttagggctttgtaccttggtccattttggacctttttcttctataattaaaatgatgcgcagttctcctggctttctaaaaaaaaaatatatgtatagcctatagccggcgtatagggaagggattcctatggctatatatagtggcagtgcgcttgagttagttggcgtgcagatccagtagagacggagcacacacacacacaacacatgatatagcaaattgaagcaacaatgggtgaggaggcaaatgttccgttgctggtaccggccaacaacggtgatgatgatcacctcagactcaccgtcatccatggtgatcaggggaaaactgctgcaggggacacggggctgctgccggcggcgtcgtcggcgtcggcgtggccatgggcggaggtgaaggggcagctggccttcgcggcgcccatggtggccaccagcatggcctactacgccatcccgctcgtctccgtcatgttcgccggccgcctcggcgacctgcagctcgccgccgccacgctcggcaactcctggggcaccgtcaccggcatcgcgctcatgaccgggctgagcggttcgctggagacgctgtgcgggcaagggtacggggccaaggcgtaccggacgatgggcgtgcacctgcaggcgtcgctgctcacctccgcgctggcctccgccgtcgtctccctcctctggatctactcggagccgctgctggtcttcctccgccaggacccggagacgtcgcgcctggccgcggacttcctccgccactccgtcccggcgctgttcgcctacggcttcatccagtgcgcgctccgcttcctgcaggcgcagtccgtggtggcgccgctcgtcgccttctcgctgctcccgctggcggcgcacgtcggcgtcgcgcacgcgctcgtcaacgtgctcggcatgggcttcgccggcgccgccgtggccacgtccgcctcgctctggctgtctttcctcatgctcgcggcgtacgtcatgctgtccgccaggttcagggagacgtggccggggttcacgaccgaggcgttccggcacgtcctgcccggaatgaagctcgccattccgtcagcggtcatggtctggttagtcccatactcatgtcctcaaattcgtgttttttatgacgatgatgatgacgatatatataaaaaaaatggcatggcatggcttgcagcttcgagtactggtcgttcgagatccttgtgctgtttgcagggctgatgcctgactctcagctcagcacttccatcattgccatgtgccaaaacaccgaagccatatcatacatgatcacctatggcttcgccgctgtcatcagcacaagggtatccaacgagctgggagcccggaacatcgccaacgccaagaaggcgctcaccgtgtcgctgacgctgtccctgatgctgggggtggcgttcctgctgctcctgggcctcggccatgacctctgggtgcgcctcttcaccaccagcgaggtcgtggtcagcgccttcgcctccatgacaccgctgctcatcggctccgtcgtgctggactccacgcagggggtgctctgcggcgtcgccaggggctgtgggtggcagcacctggcggcgtggaccaacctggtggccttctatgtcatcggcttgccgctcgccatcctcttcggattcacgctcggcttccaaaccaaggggctgtggatggggcagatatgcggcctcctctgccagaactgcgtcctctttttcatcaccctgcgaaccaactgggaggagttagacctgaccatgttcaacaaggacaacgattttgtctgctaggaatccagaaagagtttttcttttcttttttgccatgtgctgttgctgaaatgttgaaccatcagcaacaggcttcgacagagctgcctggtatgtttgctcatcagccatcatcaattcatcatcagtgtgtaacattacagattgtacctgtagtaatacaatacacaggaattgaagatgcatgcgtccatcaatccctcaagactctcttcctagctagacagtatccaccactaagagaaacatgtctaattcctaccaaggactggacaccctagctctaggtgatgtgtaacttccaaagacgacgtccttcattcactccagagctcagtggtctcatgtttcttgagaatacagccaccttttttttgctctagactccaaggctccaatttagtaacgtaagtagtagtgcagaataactcaagtaccatgcatatagaacaacccagcacgtgaccccaaccaagctccccagctgtggtttacatcaaacagccaaggactgcacaagccatggctgctttcgggccaacaagatgacgtgaagggactgtctcccatgctccgcgcaaagattagctcgcctgttttgatgctccatatgcgaacagtgcagtcctccccac

SEQ ID NO: 142486 - DNA, 2104 bp, Zea Mays
gagtgagcctgcttagggctttgtaccttggtccattttggacctttttcttctataattaaaatgatgcgcagttctcctggctttctaaaaaaaaaatatatgtatagcctatagccggcgtatagggaagggattcctatggctatatatagtggcagtgcgcttgagttagttggcgtgcagatccagtagagacggagcacacacacacacaacacatgatatagcaaattgaagcaacaatgggtgaggaggcaaatgttccgttgctggtaccggccaacaacggtgatgatgatcacctcagactcaccgtcatccatggtgatcaggggaaaactgctgcaggggacacggggctgctgccggcggcgtcgtcggcgtcggcgtggccatgggcggaggtgaaggggcagctggccttcgcggcgcccatggtggccaccagcatggcctactacgccatcccgctcgtctccgtcatgttcgccggccgcctcggcgacctgcagctcgccgccgccacgctcggcaactcctggggcaccgtcaccggcatcgcgctcatgaccgggctgagcggttcgctggagacgctgtgcgggcaagggtacggggccaaggcgtaccggacgatgggcgtgcacctgcaggcgtcgctgctcacctccgcgctggcctccgccgtcgtctccctcctctggatctactcggagccgctgctggtcttcctccgccaggacccggagacgtcgcgcctggccgcggacttcctccgccactccgtcccggcgctgttcgcctacggcttcatccagtgcgcgctccgcttcctgcaggcgcagtccgtggtggcgccgctcgtcgccttctcgctgctcccgctggcggcgcacgtcggcgtcgcgcacgcgctcgtcaacgtgctcggcatgggcttcgccggcgccgccgtggccacgtccgcctcgctctggctgtctttcctcatgctcgcggcgtacgtcatgctgtccgccaggttcagggagacgtggccggggttcacgaccgaggcgttccggcacgtcctgcccggaatgaagctcgccattccgtcagcggtcatggtctgcttcgagtactggtcgttcgagatccttgtgctgtttgcagggctgatgcctgactctcagctcagcacttccatcattgccatgtgccaaaacaccgaagccatatcatacatgatcacctatggcttcgccgctgtcatcagcacaagggtatccaacgagctgggagcccggaacatcgccaacgccaagaaggcgctcaccgtgtcgctgacgctgtccctgatgctgggggtggcgttcctgctgctcctgggcctcggccatgacctctgggtgcgcctcttcaccaccagcgaggtcgtggtcagcgccttcgcctccatgacaccgctgctcatcggctccgtcgtgctggactccacgcagggggtgctctgcggcgtcgccaggggctgtgggtggcagcacctggcggcgtggaccaacctggtggccttctatgtcatcggcttgccgctcgccatcctcttcggattcacgctcggcttccaaaccaaggggctgtggatggggcagatatgcggcctcctctgccagaactgcgtcctctttttcatcaccctgcgaaccaactgggaggagttagacctgaccatgttcaacaaggacaacgattttgtctgctaggaatccagaaagagtttttcttttcttttttgccatgtgctgttgctgaaatgttgaaccatcagcaacaggcttcgacagagctgcctggtatgtttgctcatcagccatcatcaattcatcatcagtgtgtaacattacagattgtacctgtagtaatacaatacacaggaattgaagatgcatgcgtccatcaatccctcaagactctcttcctagctagacagtatccaccactaagagaaacatgtctaattcctaccaaggactggacaccctagctctaggtgatgtgtaacttccaaagacgacgtccttcattcactccagagctcagtggtctcatgtttcttgag

SEQ ID NO: 142487 - DNA, 2943 bp, Zea Mays
ccccctgcttcctgcttttcgtcctcatccacccacaggccacagtccactcacaactcccccggaacggcggcggcggcgacggcggagaaacctctcgactacgaggagctgaacgagaacgtcaagagggtgcagtacgcggtgcgcggggagctgtacctccgcgcctccgagctgcagaaggagggcaagaagatcatcttcaccaacgtcggcaacccgcacgccctcggccagaaaccgctcaccttcccgcgccaggtggtggcgctgtgccaggctccgttcctcctcgacgatccccacgtcggcctcatgttcccggcggacgccatcgctagggccaagcactatctcgccatggcgcccggcggtctaggtgcgtacagtgactcccgcggcatcccgggaatcaggaaggaagttgccgacttcatccacaagcgtgatggatatcccagtgatccggaactcatctacctcacagacggtgccagcaaaggtgtgatgcagatcctgaacaccatcattagaaacgagatggacgggatcttggtccctgttcctcagtacccactttattccgccaccatttccctctatggtggttctctggtcccgtactacttggaagaagaggctaactggagcctcgactttgtgaatatccggcaaacagtggcggaggcacggtccaagggaatctctgttcgagcgatggtgatgataaatccaggaaatcccactggccaatgccttagtgaagcgaatataaaggaacttctgcaattttgctaccatgaaaacttagttctgcttgcagatgaagtgtatcaacagaacatttatcaagatgagcggccatttataagcgcaagaaaggttatgttcgacatgggtccgccaataagcagtgagcttcaggttgtttctttccacactgtgtcgaaagggtactggggagagtgcggacaacgtggtggatacttcgaaatgacaaatcttcctcccaagacagtagatgagatctacaaggttgcatcaatagcactgagtccaaacgttcctgggcaaatttttatgggagtaatggttaaccctcctaaacctggagatatctcgtacctgaagttcgctgctgaaagcaagtccatccatgaatctttgaggaggagagcacgcatgatgacagatggtttcaacagttgccgaaacgtcgtgtgcaatttcactgaaggagctatgtactctttcccccaaatacgtctgccaccgagagctattgaggcggcaagaagagccggcaaatcagcggacgtcttctactgcctcaagctcctggaggcgacaggaatctccactgtcccgggctctggttttgggcaaaaggaaggggtgttccaccttcggaccactatccttccagcggaggaagacttccctgccatcatgtcgagcttcaagaagttcaacgactcgttcatggaacagtacgagggctactccaggctgtgagcaggaagagaaacaagagattacagatctgaagaagagattattgattggaagcttattagttattgcggaggtgaaggggcagctggccttcgcggcgcccatggtggccaccagcatggcctactacgccatcccgctcgtctccgtcatgttcgccggccgcctcggcgacctgcagctcgccgccgccacgctcggcaactcctggggcaccgtcaccggcatcgcgctcatgaccgggctgagcggttcgctggagacgctgtgcgggcaagggtacggggccaaggcgtaccggacgatgggcgtgcacctgcaggcgtcgctgctcacctccgcgctggcctccgccgtcgtctccctcctctggatctactcggagccgctgctggtcttcctccgccaggacccggagacgtcgcgcctggccgcggacttcctccgccactccgtcccggcgctgttcgcctacggcttcatccagtgcgcgctccgcttcctgcaggcgcagtccgtggtggcgccgctcgtcgccttctcgctgctcccgctggcggcgcacgtcggcgtcgcgcacgcgctcgtcaacgtgctcggcatgggcttcgccggcgccgccgtggccacgtccgcctcgctctggctgtctttcctcatgctcgcggcgtacgtcatgctgtccgccaggttcagggagacgtggccggggttcacgaccgaggcgttccggcacgtcctgcccggaatgaagctcgccattccgtcagcggtcatggtctgcttcgagtactggtcgttcgagatccttgtgctgtttgcagggctgatgcctgactctcagctcagcacttccatcattgccatgtgccaaaacaccgaagccatatcatacatgatcacctatggcttcgccgctgtcatcagcacaagggtatccaacgagctgggagcccggaacatcgccaacgccaagaaggcgctcaccgtgtcgctgacgctgtccctgatgctgggggtggcgttcctgctgctcctgggcctcggccatgacctctgggtgcgcctcttcaccaccagcgaggtcgtggtcagcgccttcgcctccatgacaccgctgctcatcggctccgtcgtgctggactccacgcagggggtgctctgcggcgtcgccaggggctgtgggtggcagcacctggcggcgtggaccaacctggtggccttctatgtcatcggcttgccgctcgccatcctcttcggattcacgctcggcttccaaaccaaggggctgtggatggggcagatatgcggcctcctctgccagaactgcgtcctctttttcatcaccctgcgaaccaactgggaggagttagacctgaccatgttcaacaaggacaacgattttgtctgctaggaatccagaaa

SEQ ID NO: 142488 - DNA, 1930 bp, Zea Mays
ccccctgcttcctgcttttcgtcctcatccacccacaggccacagtccactcacaactcccccggaacggcggcggcggcgacggcggagaaacctctcgactacgaggagctgaacgagaacgtcaagagggtgcagtacgcggtgcgcggggagctgtacctccgcgcctccgagctgcagaaggagggcaagaagatcatcttcaccaacgtcggcaacccgcacgccctcggccagaaaccgctcaccttcccgcgccaggtggtggcgctgtgccaggctccgttcctcctcgacgatccccacgtcggcctcatgttcccggcggacgccatcgctagggccaagcactatctcgccatggcgcccggcggtctaggtgcgtacagtgactcccgcggcatcccgggaatcaggaaggaagttgccgacttcatccacaagcgtgatggatatcccagtgatccggaactcatctacctcacagacggtgccagcaaaggtgtgatgcagatcctgaacaccatcattagaaacgagatggacgggatcttggtccctgttcctcagtacccactttattccgccaccatttccctctatggtggttctctggtcccgtactacttggaagaagaggctaactggagcctcgactttgtgaatatccggcaaacagtggcggaggcacggtccaagggaatctctgttcgagcgatggtgatgataaatccaggaaatcccactggccaatgccttagtgaagcgaatataaaggaacttctgcaattttgctaccatgaaaacttagttctgcttgcagatgaagtgtatcaacagaacatttatcaagatgagcggccatttataagcgcaagaaaggttatgttcgacatgggtccgccaataagcagtgagcttcaggttgtttctttccacactgtgtcgaaagggtactggggagagtgcggacaacgtggtggatacttcgaaatgacaaatcttcctcccaagacagtagatgagatctacaaggttgcatcaatagcactgagtccaaacgttcctgggcaaatttttatgggagtaatggttaaccctcctaaacctggagatatctcgtacctgaagttcgctgctgaaagcaagtccatccatgaatctttgaggaggagagcacgcatgatgacagatggtttcaacagttgccgaaacgtcgtgtgcaatttcactgaaggagctatgtactctttcccccaaatacgtctgccaccgagagctattgaggcggcaagaagagccggcaaatcagcggacgtcttctactgcctcaagctcctggaggcgacaggaatctccactgtcccgggctctggttttgggcaaaaggaaggggtgttccaccttcggaccactatccttccagcggaggaagacttccctgccatcatgtcgagcttcaagaagttcaacgactcgttcatggaacagtacgagggctactccaggctgtgagcaggaagagaaacaagagattacagatctgaagaagagattattgattggaagcttattagttattgtaactcccttgaaaagcaggttgtgcggggattattgtttattgaataaaaagtccgccatttgattatactgccataccagtatataattgtgaattgttttgtacttgctggtggtggggagaggtggaaatagctagccctccttgaccgcgcgcgataagaatgtcgcctctcgttctggagattattggagagttgaatagttcataatcagtctacctacaatatattgcagaaaaagtactgatcagtccgactcgtgaattttttttttagctaggtgaaattttctgacttgtccaaggtcctgactcctgactcctgtagcagcacctatgtgt

SEQ ID NO: 142489 - DNA, 5542 bp, Zea Mays
gctcattgaggataagctgcggttactgatcatctagtcccatgtccaccgccgccgtgctcccgtcgccggcgtcgaccagacacccggccggcggtggcgccctgacggcggaccgcgcagcggcgctactggcgggctgcgcgtccgcaagccgcgccgccgagatccacgccgcggcggtgcgcgccagcgtggaccaggacaaagcagtggccttccggctccagcgcgcgtacgcggcgtccggccgcctggacctagccgtggcgctcctccggcgcacgcccgacccgaccgccgtcttctacacgtccgccatccacgcgcactcctcccggggcctccaccgcgcggcgctggcgctcctctccgagatgctgctgtcccaccacggcctcctccccaccgcgcacaccctctcggcctccctcccggcgtgcggcggcctcgcggtcgggcgcgcgctgcacgggtacgccgtgaagctggcgctctccggcgagccgtacgtggccaccgcgctgctgggcatgtacgcgcgcgccggggaggccgccgcggcgcgcgcgctgttcgacgggatgcggccggacccgcacgtggtgtcggtgacggcgatgctgagctgctacgccaagatgggccagctggacgacgcgcgcggcctgttcgacgcgctgccccgcaaggacctggtctgctggaacgccatgatggacgggtacacgcagcacgggcggcccagcgaggcgctccggctgttccggcagatgctgaggtccggggtggagccagacgaggtgtcggtggtgctggcgctctccgcggtggcgcagctgggcacggcggagtccgggaggtggctccactcgttcgtggcgaacggcggccgccgggcccgggtgcggctcaacgccagggtcggcacggcgctcgtcgacatgtactacaagtgcgggagcctggaggaggccgtggccgtgttccgcgacctcggcggcggcggcgacagggacgtggtggcgtggaacgccatgatcaacgggtacgcgatgcacgggcgcagccgggaggcgctggaggcgttcgggcagctgcgggcgcaggggctctggccgaccgacatcaccttcatcggcgtgctgaacgcctgcagccactccgggctcgtcgacgagggccgcgcgctgttggcggcaatggaggaagagtacggcatcgtgcccaaggtggagcactacggctgcatggtggaccttctgggccgcgccgggcgcgtcgaggaagcgttcgacctggtgcggagcatgaaggcgaagcccgacgcggcgatgtgggcgtcgctcctcggcgcctgccggctgcacaagaacctggcgctggggcagcgcgtcgccgactacctcgtggccaacgggctggccaactccggcacgtacgtgctgctgtcgaacatgtacgcggcggcggggaagtggcgggaggtggggcgggtgcggtcgatgatgagggcgagcggcgtgcagaaggagcccgggtgcagcgccgtggaggtcgggcggcgggtggtggagttcgttgccggggaccggagccacccgcggtcggcggagatctacgccaagctagaggaggtgaacagcatcgcgagggcgcgcgggcacgtgccgcacaccgagctggtgctgcacgacctcgacgacgcggccaaggagagggcgctggcggtgcacagcgagaagctcgcgctggcgttcgggctcattagcacgcctccccggacgggcatcaagatcgtgaagaacctccgcgcgtgcgccgactgccacgccgtgctgaagctggtgtcggaggcgacggggaggaagatcgtgttcagggacaggaacaggttccaccatttcgtcgacgggtcgtgcagctgtggggattactggtgaatgctgctagctcttgtgcacaaagtttgcagaaccaaccaaaaaacaaagaaaaagacattgccatccgtcctaaaattagtaaaaccggaggctttttttttttttgcgctggctggttgcaattgcaaagcagcggcgattaatgcagaccaccaaatgaatggcaagcagggatccctatttattaggccgatggaagcagaagctccagtcagtgagggacgaaagaagtcgcctaattctttcgatcgaattaggcgccttcttcgtcccacgctccgtctttatttgtaatctgaagcttacaggaacatttgagtggatcatggacggattggtaggcctcttgaaagtccgggtggtgaggggcatcaaccttgcctaccgcgacgcaagaggcagcgatccgtatgtcgtcctacgacttggcaagaagaaacttaagacgagcgtgaagaagagatctgtgaaccccatctggcacgaggagctaactctgaccgtcacagatcccagcctagctctgaagctggaggtgttcgacaaggacacgttcagcagggacgacccgatgggggacgcggagatcgacgtggcgccgctggtggaggcggcgaacgcgagcccggaggcgagcctgaggaacggcgccatcatcctgtcggtgcggccgagcgccacgaactgcctcgccgacgagagccacgtgtgctggaggaacggcaagttcgcgcaggacatgatcctccgcctcaggaacgtggagagcggggagattcagctgcagctgcagtgggtcagcatccctcctgctgcagccagcaggtgaaggaaggaagaacaggcgacacgaagcaatcgcattttcacctcttgtgaatgtcggattgtaaacttaatggggtctgggtcagtcagggtagttcatgtgttgcctattaatgtacagttggggacagcatgaaatccaagccaagtcactcaagtgttgtaggatccttcctgttcctgtttgtgtctggtctacaacaaaaatggtgcagtgcagtgcagccgtgcaggggataaaaaggccctccagatccagacaaaaggctggaggagtggtaggataccataccatgtggcacaatggaatgcatgcaatgcaagctgagctgagtatagaacaagcttcgttctcgtcagtgccagtgcacgctgatggggcgggcagttcaggttcagtgctgaatgaattgcaaaagctgcatgatctggcacgggtcgtcgtcgtctcgtcgccggccgccgggggcttctccaccgcaggcgcggcgatatcccaaaccagtggccgttgatccgcgtctcctcttatcctctcccacccaaaattctccacggtcgcaacgcgacaagttcacattatttattccaaacctttctgcctccagccagcagtcagcacagcagcggtagagtacaaatcctcgcctgcccccctgcttcctgcttttcgtcctcatccacccacaggccacagtccactcacaactcccccggaacggcggcggcggcgacggcggagtaacgcggccgcgacgcaagatggcgaggaaacctctcgactacgaggagctgaacgagaacgtcaagagggtgcagtacgcggtgcgcggggagctgtacctccgcgcctccgagctgcagaaggagggcaagaagatcatcttcaccaacgtcggcaacccgcacgccctcggccagaaaccgctcaccttcccgcgccaggtggtggcgctgtgccaggctccgttcctcctcgacgatccccacgtcggcctcatgttcccggcggacgccatcgctagggccaagcactatctcgccatggcgcccggcggtctaggtgcgtacagtgactcccgcggcatcccgggaatcaggaaggaagttgccgacttcatccacaagcgtgatggatatcccagtgatccggaactcatctacctcacagacggtgccagcaaaggtgtgatgcagatcctgaacaccatcattagaaacgagatggacgggatcttggtccctgttcctcagtacccactttattccgccaccatttccctctatggtggttctctggtcccgtactacttggaagaagaggctaactggagcctcgactttgtgaatatccggcaaacagtggcggaggcacggtccaagggaatctctgttcgagcgatggtgatgataaatccaggaaatcccactggccaatgccttagtgaagcgaatataaaggaacttctgcaattttgctaccatgaaaacttagttctgcttgcagatgaagtgtatcaacagaacatttatcaagatgagcggccatttataagcgcaagaaaggttatgttcgacatgggtccgccaataagcagtgagcttcaggttgtttctttccacactgtgtcgaaagggtactggggagagtgcggacaacgtggtggatacttcgaaatgacaaatcttcctcccaagacagtagatgagatctacaaggttgcatcaatagcactgagtccaaacgttcctgggcaaatttttatgggagtaatggttaaccctcctaaacctggagatatctcgtacctgaagttcgctgctgaaaggttaaacatgctgcccctcagaagttttagcctgcctccagtttcaacagaaaaaatggacctttgcgagatattgtttctctctctctctctctctctctctctctctctcttttgtacattcttaagtttgatgtggccccaaatgacgttgcagcaagtccatccatgaatctttgaggaggagagcacgcatgatgacagatggtttcaacagttgccgaaacgtcgtgtgcaatttcactgaaggagctatgtactctttcccccaaatacgtctgccaccgagagctattgaggcggcaagaagagccggcaaatcagcggacgtcttctactgcctcaagctcctggaggcgacaggaatctccactgtcccgggctctggttttgggcaaaaggaaggggtgttccaccttcggaccactatccttccagcggaggaagacttccctgccatcatgtcgagcttcaagaagttcaacgactcgttcatggaacagtacgagggctactccaggctgtgagcaggaagagaaacaagagattacagatctgaagaagagattattgattggaagcttattagttattgtaactcccttgaaaagcaggttgtgcggggattattgtttattgaataaaaagtccgccatttgattatactgccataccagtatataattgtgaattgttttgtacttgctggtggtggggagaggtggaaatagctagccctccttgaccgcgcgcgataagaatgtcgcctctcgttctggagattattggagagttgaatagttcataatcagtctacctacaatatattgcagaaaaagtactgatcagtccgactcgtgaattttttttttagctaggtgaaattttctgacttgtccaaggtcctgactcctgactcctgtagcagcacctatgtgt

SEQ ID NO: 142490 - DNA, 5337 bp, Zea Mays
gctcattgaggataagctgcggttactgatcatctagtcccatgtccaccgccgccgtgctcccgtcgccggcgtcgaccagacacccggccggcggtggcgccctgacggcggaccgcgcagcggcgctactggcgggctgcgcgtccgcaagccgcgccgccgagatccacgccgcggcggtgcgcgccagcgtggaccaggacaaagcagtggccttccggctccagcgcgcgtacgcggcgtccggccgcctggacctagccgtggcgctcctccggcgcacgcccgacccgaccgccgtcttctacacgtccgccatccacgcgcactcctcccggggcctccaccgcgcggcgctggcgctcctctccgagatgctgctgtcccaccacggcctcctccccaccgcgcacaccctctcggcctccctcccggcgtgcggcggcctcgcggtcgggcgcgcgctgcacgggtacgccgtgaagctggcgctctccggcgagccgtacgtggccaccgcgctgctgggcatgtacgcgcgcgccggggaggccgccgcggcgcgcgcgctgttcgacgggatgcggccggacccgcacgtggtgtcggtgacggcgatgctgagctgctacgccaagatgggccagctggacgacgcgcgcggcctgttcgacgcgctgccccgcaaggacctggtctgctggaacgccatgatggacgggtacacgcagcacgggcggcccagcgaggcgctccggctgttccggcagatgctgaggtccggggtggagccagacgaggtgtcggtggtgctggcgctctccgcggtggcgcagctgggcacggcggagtccgggaggtggctccactcgttcgtggcgaacggcggccgccgggcccgggtgcggctcaacgccagggtcggcacggcgctcgtcgacatgtactacaagtgcgggagcctggaggaggccgtggccgtgttccgcgacctcggcggcggcggcgacagggacgtggtggcgtggaacgccatgatcaacgggtacgcgatgcacgggcgcagccgggaggcgctggaggcgttcgggcagctgcgggcgcaggggctctggccgaccgacatcaccttcatcggcgtgctgaacgcctgcagccactccgggctcgtcgacgagggccgcgcgctgttggcggcaatggaggaagagtacggcatcgtgcccaaggtggagcactacggctgcatggtggaccttctgggccgcgccgggcgcgtcgaggaagcgttcgacctggtgcggagcatgaaggcgaagcccgacgcggcgatgtgggcgtcgctcctcggcgcctgccggctgcacaagaacctggcgctggggcagcgcgtcgccgactacctcgtggccaacgggctggccaactccggcacgtacgtgctgctgtcgaacatgtacgcggcggcggggaagtggcgggaggtggggcgggtgcggtcgatgatgagggcgagcggcgtgcagaaggagcccgggtgcagcgccgtggaggtcgggcggcgggtggtggagttcgttgccggggaccggagccacccgcggtcggcggagatctacgccaagctagaggaggtgaacagcatcgcgagggcgcgcgggcacgtgccgcacaccgagctggtgctgcacgacctcgacgacgcggccaaggagagggcgctggcggtgcacagcgagaagctcgcgctggcgttcgggctcattagcacgcctccccggacgggcatcaagatcgtgaagaacctccgcgcgtgcgccgactgccacgccgtgctgaagctggtgtcggaggcgacggggaggaagatcgtgttcagggacaggaacaggttccaccatttcgtcgacgggtcgtgcagctgtggggattactggtgaatgctgctagctcttgtgcacaaagtttgcagaaccaaccaaaaaacaaagaaaaagacattgccatccgtcctaaaattagtaaaaccggaggctttttttttttttgcgctggctggttgcaattgcaaagcagcggcgattaatgcagaccaccaaatgaatggcaagcagggatccctatttattaggccgatggaagcagaagctccagtcagtgagggacgaaagaagtcgcctaattctttcgatcgaattaggcgccttcttcgtcccacgctccgtctttatttgtaatctgaagcttacaggaacatttgagtggatcatggacggattggtaggcctcttgaaagtccgggtggtgaggggcatcaaccttgcctaccgcgacgcaagaggcagcgatccgtatgtcgtcctacgacttggcaagaagaaacttaagacgagcgtgaagaagagatctgtgaaccccatctggcacgaggagctaactctgaccgtcacagatcccagcctagctctgaagctggaggtgttcgacaaggacacgttcagcagggacgacccgatgggggacgcggagatcgacgtggcgccgctggtggaggcggcgaacgcgagcccggaggcgagcctgaggaacggcgccatcatcctgtcggtgcggccgagcgccacgaactgcctcgccgacgagagccacgtgtgctggaggaacggcaagttcgcgcaggacatgatcctccgcctcaggaacgtggagagcggggagattcagctgcagctgcagtgggtcagcatccctcctgctgcagccagcaggtgaaggaaggaagaacaggcgacacgaagcaatcgcattttcacctcttgtgaatgtcggattgtaaacttaatggggtctgggtcagtcagggtagttcatgtgttgcctattaatgtacagttggggacagcatgaaatccaagccaagtcactcaagtgttgtaggatccttcctgttcctgtttgtgtctggtctacaacaaaaatggtgcagtgcagtgcagccgtgcaggggataaaaaggccctccagatccagacaaaaggctggaggagtggtaggataccataccatgtggcacaatggaatgcatgcaatgcaagctgagctgagtatagaacaagcttcgttctcgtcagtgccagtgcacgctgatggggcgggcagttcaggttcagtgctgaatgaattgcaaaagctgcatgatctggcacgggtcgtcgtcgtctcgtcgccggccgccgggggcttctccaccgcaggcgcggcgatatcccaaaccagtggccgttgatccgcgtctcctcttatcctctcccacccaaaattctccacggtcgcaacgcgacaagttcacattatttattccaaacctttctgcctccagccagcagtcagcacagcagcggtagagtacaaatcctcgcctgcccccctgcttcctgcttttcgtcctcatccacccacaggccacagtccactcacaactcccccggaacggcggcggcggcgacggcggagtaacgcggccgcgacgcaagatggcgaggaaacctctcgactacgaggagctgaacgagaacgtcaagagggtgcagtacgcggtgcgcggggagctgtacctccgcgcctccgagctgcagaaggagggcaagaagatcatcttcaccaacgtcggcaacccgcacgccctcggccagaaaccgctcaccttcccgcgccaggtggtggcgctgtgccaggctccgttcctcctcgacgatccccacgtcggcctcatgttcccggcggacgccatcgctagggccaagcactatctcgccatggcgcccggcggtctaggtgcgtacagtgactcccgcggcatcccgggaatcaggaaggaagttgccgacttcatccacaagcgtgatggatatcccagtgatccggaactcatctacctcacagacggtgccagcaaaggtgtgatgcagatcctgaacaccatcattagaaacgagatggacgggatcttggtccctgttcctcagtacccactttattccgccaccatttccctctatggtggttctctggtcccgtactacttggaagaagaggctaactggagcctcgactttgtgaatatccggcaaacagtggcggaggcacggtccaagggaatctctgttcgagcgatggtgatgataaatccaggaaatcccactggccaatgccttagtgaagcgaatataaaggaacttctgcaattttgctaccatgaaaacttagttctgcttgcagatgaagtgtatcaacagaacatttatcaagatgagcggccatttataagcgcaagaaaggttatgttcgacatgggtccgccaataagcagtgagcttcaggttgtttctttccacactgtgtcgaaagggtactggggagagtgcggacaacgtggtggatacttcgaaatgacaaatcttcctcccaagacagtagatgagatctacaaggttgcatcaatagcactgagtccaaacgttcctgggcaaatttttatgggagtaatggttaaccctcctaaacctggagatatctcgtacctgaagttcgctgctgaaaggttaaacatgctgcccctcagaagttttagcctgcctccagtttcaacagaaaaaatggacctttgcgagatattcaagtccatccatgaatctttgaggaggagagcacgcatgatgacagatggtttcaacagttgccgaaacgtcgtgtgcaatttcactgaaggagctatgtactctttcccccaaatacgtctgccaccgagagctattgaggcggcaagaagagccggcaaatcagcggacgtcttctactgcctcaagctcctggaggcgacaggaatctccactgtcccgggctctggttttgggcaaaaggaaggggtgttccaccttcggaccactatccttccagcggaggaagacttccctgccatcatgtcgagcttcaagaagttcaacgactcgttcatggaacagtacgagggctactccaggctgtgagcaggaagagaaacaagagattacagatctgaagaagagattattgattggaagcttattagttattgtaactcccttgaaaagcaggttgtgcggggattattgtttattgaataaaaagtccgccatttgattatactgccataccagtatataattgtgaattgttttgtacttgctggtggtggggagaggtggaaatagctagccctccttgaccgcgcgcgataagaatgtcgcctctcgttctggagattattggagagttgaatagttcataatcagtcta

SEQ ID NO: 142491 - DNA, 5262 bp, Zea Mays
gctcattgaggataagctgcggttactgatcatctagtcccatgtccaccgccgccgtgctcccgtcgccggcgtcgaccagacacccggccggcggtggcgccctgacggcggaccgcgcagcggcgctactggcgggctgcgcgtccgcaagccgcgccgccgagatccacgccgcggcggtgcgcgccagcgtggaccaggacaaagcagtggccttccggctccagcgcgcgtacgcggcgtccggccgcctggacctagccgtggcgctcctccggcgcacgcccgacccgaccgccgtcttctacacgtccgccatccacgcgcactcctcccggggcctccaccgcgcggcgctggcgctcctctccgagatgctgctgtcccaccacggcctcctccccaccgcgcacaccctctcggcctccctcccggcgtgcggcggcctcgcggtcgggcgcgcgctgcacgggtacgccgtgaagctggcgctctccggcgagccgtacgtggccaccgcgctgctgggcatgtacgcgcgcgccggggaggccgccgcggcgcgcgcgctgttcgacgggatgcggccggacccgcacgtggtgtcggtgacggcgatgctgagctgctacgccaagatgggccagctggacgacgcgcgcggcctgttcgacgcgctgccccgcaaggacctggtctgctggaacgccatgatggacgggtacacgcagcacgggcggcccagcgaggcgctccggctgttccggcagatgctgaggtccggggtggagccagacgaggtgtcggtggtgctggcgctctccgcggtggcgcagctgggcacggcggagtccgggaggtggctccactcgttcgtggcgaacggcggccgccgggcccgggtgcggctcaacgccagggtcggcacggcgctcgtcgacatgtactacaagtgcgggagcctggaggaggccgtggccgtgttccgcgacctcggcggcggcggcgacagggacgtggtggcgtggaacgccatgatcaacgggtacgcgatgcacgggcgcagccgggaggcgctggaggcgttcgggcagctgcgggcgcaggggctctggccgaccgacatcaccttcatcggcgtgctgaacgcctgcagccactccgggctcgtcgacgagggccgcgcgctgttggcggcaatggaggaagagtacggcatcgtgcccaaggtggagcactacggctgcatggtggaccttctgggccgcgccgggcgcgtcgaggaagcgttcgacctggtgcggagcatgaaggcgaagcccgacgcggcgatgtgggcgtcgctcctcggcgcctgccggctgcacaagaacctggcgctggggcagcgcgtcgccgactacctcgtggccaacgggctggccaactccggcacgtacgtgctgctgtcgaacatgtacgcggcggcggggaagtggcgggaggtggggcgggtgcggtcgatgatgagggcgagcggcgtgcagaaggagcccgggtgcagcgccgtggaggtcgggcggcgggtggtggagttcgttgccggggaccggagccacccgcggtcggcggagatctacgccaagctagaggaggtgaacagcatcgcgagggcgcgcgggcacgtgccgcacaccgagctggtgctgcacgacctcgacgacgcggccaaggagagggcgctggcggtgcacagcgagaagctcgcgctggcgttcgggctcattagcacgcctccccggacgggcatcaagatcgtgaagaacctccgcgcgtgcgccgactgccacgccgtgctgaagctggtgtcggaggcgacggggaggaagatcgtgttcagggacaggaacaggttccaccatttcgtcgacgggtcgtgcagctgtggggattactggtgaatgctgctagctcttgtgcacaaagtttgcagaaccaaccaaaaaacaaagaaaaagacattgccatccgtcctaaaattagtaaaaccggaggctttttttttttttgcgctggctggttgcaattgcaaagcagcggcgattaatgcagaccaccaaatgaatggcaagcagggatccctatttattaggccgatggaagcagaagctccagtcagtgagggacgaaagaagtcgcctaattctttcgatcgaattaggcgccttcttcgtcccacgctccgtctttatttgtaatctgaagcttacaggaacatttgagtggatcatggacggattggtaggcctcttgaaagtccgggtggtgaggggcatcaaccttgcctaccgcgacgcaagaggcagcgatccgtatgtcgtcctacgacttggcaagaagaaacttaagacgagcgtgaagaagagatctgtgaaccccatctggcacgaggagctaactctgaccgtcacagatcccagcctagctctgaagctggaggtgttcgacaaggacacgttcagcagggacgacccgatgggggacgcggagatcgacgtggcgccgctggtggaggcggcgaacgcgagcccggaggcgagcctgaggaacggcgccatcatcctgtcggtgcggccgagcgccacgaactgcctcgccgacgagagccacgtgtgctggaggaacggcaagttcgcgcaggacatgatcctccgcctcaggaacgtggagagcggggagattcagctgcagctgcagtgggtcagcatccctcctgctgcagccagcaggtgaaggaaggaagaacaggcgacacgaagcaatcgcattttcacctcttgtgaatgtcggattgtaaacttaatggggtctgggtcagtcagggtagttcatgtgttgcctattaatgtacagttggggacagcatgaaatccaagccaagtcactcaagtgttgtaggatccttcctgttcctgtttgtgtctggtctacaacaaaaatggtgcagtgcagtgcagccgtgcaggggataaaaaggccctccagatccagacaaaaggctggaggagtggtaggataccataccatgtggcacaatggaatgcatgcaatgcaagctgagctgagtatagaacaagcttcgttctcgtcagtgccagtgcacgctgatggggcgggcagttcaggttcagtgctgaatgaattgcaaaagctgcatgatctggcacgggtcgtcgtcgtctcgtcgccggccgccgggggcttctccaccgcaggcgcggcgatatcccaaaccagtggccgttgatccgcgtctcctcttatcctctcccacccaaaattctccacggtcgcaacgcgacaagttcacattatttattccaaacctttctgcctccagccagcagtcagcacagcagcggtagagtacaaatcctcgcctgcccccctgcttcctgcttttcgtcctcatccacccacaggccacagtccactcacaactcccccggaacggcggcggcggcgacggcggagtaacgcggccgcgacgcaagatggcgaggaaacctctcgactacgaggagctgaacgagaacgtcaagagggtgcagtacgcggtgcgcggggagctgtacctccgcgcctccgagctgcagaaggagggcaagaagatcatcttcaccaacgtcggcaacccgcacgccctcggccagaaaccgctcaccttcccgcgccaggtggtggcgctgtgccaggctccgttcctcctcgacgatccccacgtcggcctcatgttcccggcggacgccatcgctagggccaagcactatctcgccatggcgcccggcggtctaggtgcgtacagtgactcccgcggcatcccgggaatcaggaaggaagttgccgacttcatccacaagcgtgatggatatcccagtgatccggaactcatctacctcacagacggtgccagcaaaggtgtgatgcagatcctgaacaccatcattagaaacgagatggacgggatcttggtccctgttcctcagtacccactttattccgccaccatttccctctatggtggttctctggtcccgtactacttggaagaagaggctaactggagcctcgactttgtgaatatccggcaaacagtggcggaggcacggtccaagggaatctctgttcgagcgatggtgatgataaatccaggaaatcccactggccaatgccttagtgaagcgaatataaaggaacttctgcaattttgctaccatgaaaacttagttctgcttgcagatgaagtgtatcaacagaacatttatcaagatgagcggccatttataagcgcaagaaaggttatgttcgacatgggtccgccaataagcagtgagcttcaggttgtttctttccacactgtgtcgaaagggtactggggagagtgcggacaacgtggtggatacttcgaaatgacaaatcttcctcccaagacagtagatgagatctacaaggttgcatcaatagcactgagtccaaacgttcctgggcaaatttttatgggagtaatggttaaccctcctaaacctggagatatctcgtacctgaagttcgctgctgaaagcaagtccatccatgaatctttgaggaggagagcacgcatgatgacagatggtttcaacagttgccgaaacgtcgtgtgcaatttcactgaaggagctatgtactctttcccccaaatacgtctgccaccgagagctattgaggcggcaagaagagccggcaaatcagcggacgtcttctactgcctcaagctcctggaggcgacaggaatctccactgtcccgggctctggttttgggcaaaaggaaggggtgttccaccttcggaccactatccttccagcggaggaagacttccctgccatcatgtcgagcttcaagaagttcaacgactcgttcatggaacagtacgagggctactccaggctgtgagcaggaagagaaacaagagattacagatctgaagaagagattattgattggaagcttattagttattgtaactcccttgaaaagcaggttgtgcggggattattgtttattgaataaaaagtccgccatttgattatactgccataccagtatataattgtgaattgttttgtacttgctggtggtggggagaggtggaaatagctagccctccttgaccgcgcgcgataagaatgtcgcctctcgttctggagattattggagagttgaatagttcataatcagtcta

SEQ ID NO: 142492 - DNA, 4841 bp, Zea Mays
gctcattgaggataagctgcggttactgatcatctagtcccatgtccaccgccgccgtgctcccgtcgccggcgtcgaccagacacccggccggcggtggcgccctgacggcggaccgcgcagcggcgctactggcgggctgcgcgtccgcaagccgcgccgccgagatccacgccgcggcggtgcgcgccagcgtggaccaggacaaagcagtggccttccggctccagcgcgcgtacgcggcgtccggccgcctggacctagccgtggcgctcctccggcgcacgcccgacccgaccgccgtcttctacacgtccgccatccacgcgcactcctcccggggcctccaccgcgcggcgctggcgctcctctccgagatgctgctgtcccaccacggcctcctccccaccgcgcacaccctctcggcctccctcccggcgtgcggcggcctcgcggtcgggcgcgcgctgcacgggtacgccgtgaagctggcgctctccggcgagccgtacgtggccaccgcgctgctgggcatgtacgcgcgcgccggggaggccgccgcggcgcgcgcgctgttcgacgggatgcggccggacccgcacgtggtgtcggtgacggcgatgctgagctgctacgccaagatgggccagctggacgacgcgcgcggcctgttcgacgcgctgccccgcaaggacctggtctgctggaacgccatgatggacgggtacacgcagcacgggcggcccagcgaggcgctccggctgttccggcagatgctgaggtccggggtggagccagacgaggtgtcggtggtgctggcgctctccgcggtggcgcagctgggcacggcggagtccgggaggtggctccactcgttcgtggcgaacggcggccgccgggcccgggtgcggctcaacgccagggtcggcacggcgctcgtcgacatgtactacaagtgcgggagcctggaggaggccgtggccgtgttccgcgacctcggcggcggcggcgacagggacgtggtggcgtggaacgccatgatcaacgggtacgcgatgcacgggcgcagccgggaggcgctggaggcgttcgggcagctgcgggcgcaggggctctggccgaccgacatcaccttcatcggcgtgctgaacgcctgcagccactccgggctcgtcgacgagggccgcgcgctgttggcggcaatggaggaagagtacggcatcgtgcccaaggtggagcactacggctgcatggtggaccttctgggccgcgccgggcgcgtcgaggaagcgttcgacctggtgcggagcatgaaggcgaagcccgacgcggcgatgtgggcgtcgctcctcggcgcctgccggctgcacaagaacctggcgctggggcagcgcgtcgccgactacctcgtggccaacgggctggccaactccggcacgtacgtgctgctgtcgaacatgtacgcggcggcggggaagtggcgggaggtggggcgggtgcggtcgatgatgagggcgagcggcgtgcagaaggagcccgggtgcagcgccgtggaggtcgggcggcgggtggtggagttcgttgccggggaccggagccacccgcggtcggcggagatctacgccaagctagaggaggtgaacagcatcgcgagggcgcgcgggcacgtgccgcacaccgagctggtgctgcacgacctcgacgacgcggccaaggagagggcgctggcggtgcacagcgagaagctcgcgctggcgttcgggctcattagcacgcctccccggacgggcatcaagatcgtgaagaacctccgcgcgtgcgccgactgccacgccgtgctgaagctggtgtcggaggcgacggggaggaagatcgtgttcagggacaggaacaggttccaccatttcgtcgacgggtcgtgcagctgtggggattactggtgaatgctgctagctcttgtgcacaaagtttgcagaaccaaccaaaaaacaaagaaaaagacattgccatccgtcctaaaattagtaaaaccggaggctttttttttttttgcgctggctggttgcaattgcaaagcagcggcgattaatgcagaccaccaaatgaatggcaagcagggatccctatttattaggccgatggaagcagaagctccagtcagtgagggacgaaagaagtcgcctaattctttcgatcgaattaggcgccttcttcgtcccacgctccgtctttatttgtaatctgaagcttacaggaacatttgagtggatcatggacggattggtaggcctcttgaaagtccgggtggtgaggggcatcaaccttgcctaccgcgacgcaagaggcagcgatccgtatgtcgtcctacgacttggcaagaagaaacttaagacgagcgtgaagaagagatctgtgaaccccatctggcacgaggagctaactctgaccgtcacagatcccagcctagctctgaagctggaggtgttcgacaaggacacgttcagcagggacgacccgatgggggacgcggagatcgacgtggcgccgctggtggaggcggcgaacgcgagcccggaggcgagcctgaggaacggcgccatcatcctgtcggtgcggccgagcgccacgaactgcctcgccgacgagagccacgtgtgctggaggaacggcaagttcgcgcaggacatgatcctccgcctcaggaacgtggagagcggggagattcagctgcagctgcagtgggtcagcatccctcctgctgcagccagcaggtgaaggaaggaagaacaggcgacacgaagcaatcgcattttcacctcttgtgaatgtcggattgtaaacttaatggggtctgggtcagtcagggtagttcatgtgttgcctattaatgtacagttggggacagcatgaaatccaagccaagtcactcaagtgttgtaggatccttcctgttcctgtttgtgtctggtctacaacaaaaatggtgcagtgcagtgcagccgtgcaggggataaaaaggccctccagatccagacaaaaggctggaggagtggtaggataccataccatgtggcacaatggaatgcatgcaatgcaagctgagctgagtatagaacaagcttcgttctcgtcagtgccagtgcacgctgatggggcgggcagttcaggttcagtgctgaatgaattgcaaaagctgcatgatctggcacgggtcgtcgtcgtctcgtcgccggccgccgggggcttctccaccgcaggcgcggcgatatcccaaaccagtggccgttgatccgcgtctcctcttatcctctcccacccaaaattctccacggtcgcaacgcgacaagttcacattatttattccaaacctttctgcctccagccagcagtcagcacagcagcggtagagtacaaatcctcgcctgcccccctgcttcctgcttttcgtcctcatccacccacaggccacagtccactcacaactcccccggaacggcggcggcggcgacggcggagtaacgcggccgcgacgcaagatggcgaggaaacctctcgactacgaggagctgaacgagaacgtcaagagggtgcagtacgcggtgcgcggggagctgtacctccgcgcctccgagctgcagaaggagggcaagaagatcatcttcaccaacgtcggcaacccgcacgccctcggccagaaaccgctcaccttcccgcgccaggtggtggcgctgtgccaggctccgttcctcctcgacgatccccacgtcggcctcatgttcccggcggacgccatcgctagggccaagcactatctcgccatggcgcccggcggtctaggtgcgtacagtgactcccgcggcatcccgggaatcaggaaggaagttgccgacttcatccacaagcgtgatggatatcccagtgatccggaactcatctacctcacagacggtgccagcaaaggtgtgatgcagatcctgaacaccatcattagaaacgagatggacgggatcttggtccctgttcctcagtacccactttattccgccaccatttccctctatggtggttctctggtcccgtactacttggaagaagaggctaactggagcctcgactttgtgaatatccggcaaacagtggcggaggcacggtccaagggaatctctgttcgagcgatggtgatgataaatccaggaaatcccactggccaatgccttagtgaagcgaatataaaggaacttctgcaattttgctaccatgaaaacttagttctgcttgcagatgaagtgtatcaacagaacatttatcaagatgagcggccatttataagcgcaagaaaggttatgttcgacatgggtccgccaataagcagtgagcttcaggttgtttctttccacactgtgtcgaaagggtactggggagagtgcggacaacgtggtggatacttcgaaatgacaaatcttcctcccaagacagtagatgagatctacaaggttgcatcaatagcactgagtccaaacgttcctgggcaaatttttgtaagtgaaacaccgctcgatgttttattctttattcatttgctcttcactaaaccaggtactccgttttggaacgacgtatgtttggattcatctcgggacctcaatctgaagttttcaaatccaaattatgtcaaccactgattttattcatgcagaatcagaaaatcctcaaaagtgttatggatcagtatagctatagatgtgtagataattgcacgagcatctttatattctcttctttttttcgtggtttgtgttagtggcaagcttgttcgttcacattaacctgcgatgttgtac

SEQ ID NO: 142493 - DNA, 633 bp, Zea Mays
cactgctgccaatttcattagcgtttgaatgcagaaattaagtgttgtgtcatggttctgcatgcacgcagaaacttaagacgagcgtgaagaagagatctgtgaaccccatctggcacgaggagctaactctgaccgtcacagatcccagcctagctctgaagctggaggtgttcgacaaggacacgttcagcagggacgacccgatgggggacgcggagatcgacgtggcgccgctggtggaggcggcgaacgcgagcccggaggcgagcctgaggaacggcgccatcatcctgtcggtgcggccgagcgccacgaactgcctcgccgacgagagccacgtgtgctggaggaacggcaagttcgcgcaggacatgatcctccgcctcaggaacgtggagagcggggagattcagctgcagctgcagtgggtcagcatccctcctgctgcagccagcaggtgaaggaaggaagaacaggcgacacgaagcaatcgcattttcacctcttgtgaatgtcggattgtaaacttaatggggtctgggtcagtcagggtagttcatgtgttgcctattaatgtacagttggggacagcatgaaatccaagccaagtcactcaagtgttgtaggatc

SEQ ID NO: 142494 - DNA, 1150 bp, Zea Mays
gcagatgcccgctagtccctcgctttctctcttccacccgctcctcacgccgccacagcgccactgctccttcggcctagttgaggagagatacatccatcctggcctggattggctggtgctggtccttctgctgaatggcagaatttgttctatggactttcacagcaaggctaccaactatctcgtgacagctagcgatgatgaatcaatccgtttatacgatacccaagatgcagtgtgtttgaatactattaatagcaaaaaatatggggttggacttgtgtgcttcactgataacccatctattgtcttatattcatcgaacaatggctgggatgaatctctgcgtctgctctcaatgaatgataaccggtttattagatattataaaggtcaccttgatagggttgtctgcatcgcactttgctctggaaaagaaaactttctctcatgttcgcttgatcgtaccattctcttatgggaccatcgggctgaaaaaccgcagggcttactgcgcgcgcaaaggaggcctacagtttcgtacgacgcccagggcatggggccttttgcgaccttctctgtcggcactgatgattcggaagcccatgtcgtacagttcagcggtgatggcaggcggattctgttaaccactaaagctgggcgtgttcatgtgctagattcttttgaaggcaacagcattgcatcgtttcgcgcgaagccaatattaaccaattcgacactggaggcatcgttctgtcccgagggaaaccatatcgtatctggctccggtgatggtagtgtctatgcttggaacgttgagagcggaaaggttgcatgctgggaaagcacagatgtgaaaccgccgcgggtaaggtggtctccaggatccttgatgttcgtgacaggaacgtcggagctgtcctgctgggtgccggatttgtccaagctggagtccttcaccatcagccacaccaacaccaggtccagctcgtccctgtaggcttggaccgatttgcatgccgtgtggccggttgacgcgaaggaggaacaagaaagcatagcggagcatcttgtaccaattgagtttgtgatctgttcctgatggcccggtaagctactattgcaacgattgtggtctgcggcaacg

SEQ ID NO: 142495 - DNA, 1728 bp, Zea Mays
ggaagggccatgaaaagcacggctcaggaaaaacaacggcggacagcccgcctccaccgccgtggcgccgttcaccccgccccgcgttctctctccctcggcgacggctcgacgaccgccgcgccgccctacgctccagcctccatgtgcttcgcggggcccttcgccgtcgactaacacaccaccaccaccatgtacgaccgccccatctcttcccttcctgctctacgaagcctagcaccaaaccctaactgtttgttttattcggatttgttccaaactacaaatgtggtgtatgtagtattgtgtccactaactttgctctctttttttttccctttttctttttgcaaaaaaacatcgggtgtacatgtgttcacccgtgccgtttactgggtcggcagtcggccggcacctggcccaagggttgagcatggagatcacgaacgagatgcttaagagactgccgagactacgttcttcagttgccaaggccatatccctggtacctgattgactagtcgctgcttattgtcataaagctttttggagggtttgctggttgctgccatgacaagtccacctagggtgagcatggagatcactgatgaggtggtcaagagcatgaagatagggttggtctttcaaggctataatggcagaatttgttctatggactttcacagcaaggctaccaactatctcgtgacagctagcgatgatgaatcaatccgtttatacgatacccaagatgcagtgtgtttgaatactattaatagcaaaaaatatggggttggacttgtgtgcttcactgataacccatctattgtcttatattcatcgaacaatggctgggatgaatctctgcgtctgctctcaatgaatgataaccggtttattagatattataaaggtcaccttgatagggttgtctgcatcgcactttgctctggaaaagaaaactttctctcatgttcgcttgatcgtaccattctcttatgggaccatcgggctgaaaaaccgcagggcttactgcgcgcgcaaaggaggcctacagtttcgtacgacgcccagggcatggtatttgctgtcgcctatggtggccgcataaagatgtttgatattcggaaattcggaatggggccttttgcgaccttctctgtcggcactgatgattcggaagcccatgtcgtacagttcagcggtgatggcaggcggattctgttaaccactaaagctgggcgtgttcatgtgctagattcttttgaaggcaacagcattgcatcgtttcgcgcgaagccaatattaaccaattcgacactggaggcatcgttctgtcccgagggaaaccatatcgtatctggctccggtgatggtagtgtctatgcttggaacgttgagagcggaaaggttgcatgctgggaaagcacagatgtgaaaccgccgcgggtaaggtggtctccaggatccttgatgttcgtgacaggaacgtcggagctgtcctgctgggtgccggatttgtccaagctggagtccttcaccatcagccacaccaacaccaggtccagctcgtccctgtaggcttggaccgatttgcatgccgtgtggccggttgacgcgaaggaggaacaagaaagcatagcggagcatcttgtaccaattgagtttgtgatctgttcctgatggcccggtaagctactattgcaacgattgtggtctgcggcaacg

SEQ ID NO: 142496 - DNA, 1518 bp, Zea Mays
ggaagggccatgaaaagcacggctcaggaaaaacaacggcggacagcccgcctccaccgccgtggcgccgttcaccccgccccgcgttctctctccctcggcgacggctcgacgaccgccgcgccgccctacgctccagcctccatgtgcttcgcggggcccttcgccgtcgactaacacaccaccaccaccattcggccggcacctggcccaagggttgagcatggagatcacgaacgagatgcttaagagactgccgagactacgttcttcagttgccaaggccatatccctggtacctgattgactagtcgctgcttattgtcataaagctttttggagggtttgctggttgctgccatgacaagtccacctagggtgagcatggagatcactgatgaggtggtcaagagcatgaagatagggttggtctttcaaggctataatggcagaatttgttctatggactttcacagcaaggctaccaactatctcgtgacagctagcgatgatgaatcaatccgtttatacgatacccaagatgcagtgtgtttgaatactattaatagcaaaaaatatggggttggacttgtgtgcttcactgataacccatctattgtcttatattcatcgaacaatggctgggatgaatctctgcgtctgctctcaatgaatgataaccggtttattagatattataaaggtcaccttgatagggttgtctgcatcgcactttgctctggaaaagaaaactttctctcatgttcgcttgatcgtaccattctcttatgggaccatcgggctgaaaaaccgcagggcttactgcgcgcgcaaaggaggcctacagtttcgtacgacgcccagggcatggtatttgctgtcgcctatggtggccgcataaagatgtttgatattcggaaattcggaatggggccttttgcgaccttctctgtcggcactgatgattcggaagcccatgtcgtacagttcagcggtgatggcaggcggattctgttaaccactaaagctgggcgtgttcatgtgctagattcttttgaaggcaacagcattgcatcgtttcgcgcgaagccaatattaaccaattcgacactggaggcatcgttctgtcccgagggaaaccatatcgtatctggctccggtgatggtagtgtctatgcttggaacgttgagagcggaaaggttgcatgctgggaaagcacagatgtgaaaccgccgcgggtaaggtggtctccaggatccttgatgttcgtgacaggaacgtcggagctgtcctgctgggtgccggatttgtccaagctggagtccttcaccatcagccacaccaacaccaggtccagctcgtccctgtaggcttggaccgatttgcatgccgtgtggccggttgacgcgaaggaggaacaagaaagcatagcggagcatcttgtaccaattgagtttgtgatctgttcctgatggcccggtaagctactattgcaacgattgtggtctgcggcaacg

SEQ ID NO: 142497 - DNA, 1582 bp, Zea Mays
accaaactagaaaaacaattgcgtggagaaaaggaagggccatgaaaagcacggctcaggaaaaacaacggcggacagcccgcctccaccgccgtggcgccgttcaccccgccccgcgttctctctccctcggcgacggctcgacgaccgccgcgccgccctacgctccagcctccatgtgcttcgcggggcccttcgccgtcgactaacacaccaccaccaccatgtacgaccgccccatctcttcccttcctgctctacgaagcctagcaccaaaccctaactgtttgttttattcggatttgttccaaactacaaatgtggtgtatgtagtattgtgtccactaactttgctctctttttttttccctttttctttttgcaaaaaaacatcgggtgtacatgtgttcacccgtgccgtttactgggtcggcagtcggccggcacctggcccaagggttgagcatggagatcacgaacgagatgcttaagagactgccgagactacaatggcagaatttgttctatggactttcacagcaaggctaccaactatctcgtgacagctagcgatgatgaatcaatccgtttatacgatacccaagatgcagtgtgtttgaatactattaatagcaaaaaatatggggttggacttgtgtgcttcactgataacccatctattgtcttatattcatcgaacaatggctgggatgaatctctgcgtctgctctcaatgaatgataaccggtttattagatattataaaggtcaccttgatagggttgtctgcatcgcactttgctctggaaaagaaaactttctctcatgttcgcttgatcgtaccattctcttatgggaccatcgggctgaaaaaccgcagggcttactgcgcgcgcaaaggaggcctacagtttcgtacgacgcccagggcatggtatttgctgtcgcctatggtggccgcataaagatgtttgatattcggaaattcggaatggggccttttgcgaccttctctgtcggcactgatgattcggaagcccatgtcgtacagttcagcggtgatggcaggcggattctgttaaccactaaagctgggcgtgttcatgtgctagattcttttgaaggcaacagcattgcatcgtttcgcgcgaagccaatattaaccaattcgacactggaggcatcgttctgtcccgagggaaaccatatcgtatctggctccggtgatggtagtgtctatgcttggaacgttgagagcggaaaggttgcatgctgggaaagcacagatgtgaaaccgccgcgggtaaggtggtctccaggatccttgatgttcgtgacaggaacgtcggagctgtcctgctgggtgccggatttgtccaagctggagtccttcaccatcagccacaccaacaccaggtccagctcgtccctgtaggcttggaccgatttgcatgccgtgtggccggttgacgcgaaggaggaacaagaaagcatagcggagcatcttgtaccaattgagtttgtgatctgttcctgatggcccggtaagctactattgcaacgattgtggtctgcggcaacg

SEQ ID NO: 142498 - DNA, 2040 bp, Zea Mays
caaacgggtcctacacattcgaaatatctaaatgagcggtcaagcatggtttctttggacgatgttgaagacttggatcagaaacgccatccgggacaccgtgaccaggtccggcggcgaagcgagatggtgtcatccaagaaagtgtgcgtggtcggcgctggcgtgtcggggctggcgtgtgcccgcgagctgctccgcgagggccacgacgtgacggtcatggagcagagcggcggcgtcggcgggcagtggctgtacgacccgagggcggacggcggcgacccactcggcgctgccggcgcgcacagcagcatgtacgcctccgtccggctcatcagcccgagggagctcacgggcttctccgacttccccttcttccccagagacgacggcaccggcgactcccggcggtacccggggcacgctgagttcctgaggtacatcagggacttctgcgacgcgttcgggctcatggacgtcgtcaggctcaacaccaaggtcctgcgcgtcggcctggcggcgccgcgtgccgctgatgacggtgacggcatcaagcggtggacggtgagttggtctagacatcgtggctgcgatggcgaggtggtcaccacggaggaggaggtgtttgacgccgtcgtcgtcgccgtcggccagtacacccagccacggctcccaaccatcagaggcatggacaagtggagcaggaggcagctgcactcccactcgtatagggtccccgattccttccacggcgaggtggtggtgatcgtgggcttccgtcatagcggcgtggacatcgcgctggagctctccaagttggcgagggaggtgcacgtcagcgtcaagtccatggaggcgctcactcccgccgtgtccaaggccgtcgccaggcacagcgacctgcacctgcacctccagatcgagtgcttgcgcgaggatgggcaggtaacgttcgccgacggctcgcgtgtcgccgccgactccatcatctactgcaccgggtacgactgctcgttcccgttcctggacacgggaggcctggtgaccgtcgacgacagccgcgtcggcccgctgtacgagcacacgttcccgccggcgctggcgccgtcgctgtccttcgtggggttgccgaggatggtgctggtgccgcggttctacgaggcgcaggcgaggtgggtggcgcaggcgctgtcgggctggcggccgctgccgccgtcggaggagatggcgcgctccgccgaggagtaccaccgcgccagggaggcggccggcgtgcccaggcgcctctcgcacgccctcttcttcgacatggactactgcgacgagttcggggccaagcactgcggcttcccgccggtggaggggtggaagagggacctcctgtcgttgtctctcgcaagcgccagcgacggcgccgtggagagctaccgtgacagctaccatgacagcgacctggttcgggagggattgcgctccgagggctggtggccgtggctcccagatccacaatgaagacgacggcgcagagattcacaactaccgccacgcagcgctgctggctgctgcactactctaggtactttttgttacaagatagtgtactgtgatcgagctcatccacccatccattgtaacagttattatccaagggtcatacccttggtaatcctatgtacgtatgtatataaggactactctctgtaataaacaacagttactggcctctgtcattttgtttctctctcaattctcttttgccactgagtatatttcaacacgttatcagcgctgtctcaaagaagatcaagagaagcgagaaaggaaaatgaagaactgtcatagacatcggcgagatgatgcccgttggatcaaccaagatgttcttcatcatgttctagtaaggatcgtttgttcctcttgcaactgcggtgatctggattagcctacctctcacaaacagctagccaaaagggcgctgtggccggtagtgcccgtgcctgggctacgtgtgtccacgctgggtcacccgcactgagg

SEQ ID NO: 142499 - DNA, 115 bp, Zea Mays
aaggactactctctgtaataaacaacagttactggcctctgtcattttgtttctctctcaattctcttttgccactgagtatatttcaacacgttatcagcgctgtctcaaagaa

SEQ ID NO: 142500 - DNA, 1263 bp, Zea Mays
ggacgatgttgaagacttggatcagaaacgccatccgggacaccgtgaccaggtccggcggcgaagcgagatggtgtcatccaagaaagtgtgcgtggtcggcgctggcgtgtcggggctggcgtgtgcccgcgagctgctccgcgagggccacgacgtgacggtcatggagcagagcggcggcgtcggcgggcagtggctgtacgacccgagggcggacggcggcgacccactcggcgctgccggcgcgcacagcagcatgtacgcctccgtccggctcatcagcccgagggagctcacgggcttctccgacttccccttcttccccagagacgacggcaccggcgactcccggcggtacccggggcacgctgagttcctgaggtacatcagggacttctgcgacgcgttcgggctcatggacgtcgtcaggctcaacaccaaggtcctgcgcgtcggcctggcggcgccgcgtgccgctgatgacggtgacggcatcaagcggtggacggtgagttggtctagacatcgtggctgcgatggcgaggtggtcaccacggaggaggaggtgtttgacgccgtcgtcgtcgccgtcggccagtacacccagccacggctcccaaccatcagaggcatggacaagtggagcaggaggcagctgcactcccactcgtatagggtccccgattccttccacggcgaggtggtggtgatcgtgggcttccgtcatagcggcgtggacatcgcgctggagctctccaagttggcgagggaggtgcacgtcagcgtcaagtccatggaggcgctcactcccgccgtgtccaaggccgtcgccaggcacagcgacctgcacctgcacctccaggaaaggaaaccgtgcagctacaaatctatgctccaatattcgctggttcagaatctgatccagcaatccaggtacggacggtgacctgacaaattaaatgtggcttgcatatcgcagatcgagtgcttgcgcgaggatgggcaggtaacgttcgccgacggctcgcgtgtcgccgccgactccatcatctactgcaccgggtacgactgctcgttcccgttcctggacacgggaggcctggtgaccgtcgacgacagccgcgtcggcccgctgtacgagcacacgttcccgccggcgctggcgccgtcgctgtccttcgtggggttgccgaggatggtgctggtgccgcggttctacgaggcgcaggcgaggtgggtggcgcaggcgctgtcgggctg

SEQ ID NO: 142501 - DNA, 1145 bp, Zea Mays
ggacgatgttgaagacttggatcagaaacgccatccgggacaccgtgaccaggtccggcggcgaagcgagatggtgtcatccaagaaagtgtgcgtggtcggcgctggcgtgtcggggctggcgtgtgcccgcgagctgctccgcgagggccacgacgtgacggtcatggagcagagcggcggcgtcggcgggcagtggctgtacgacccgagggcggacggcggcgacccactcggcgctgccggcgcgcacagcagcatgtacgcctccgtccggctcatcagcccgagggagctcacgggcttctccgacttccccttcttccccagagacgacggcaccggcgactcccggcggtacccggggcacgctgagttcctgaggtacatcagggacttctgcgacgcgttcgggctcatggacgtcgtcaggctcaacaccaaggtcctgcgcgtcggcctggcggcgccgcgtgccgctgatgacggtgacggcatcaagcggtggacggtgagttggtctagacatcgtggctgcgatggcgaggtggtcaccacggaggaggaggtgtttgacgccgtcgtcgtcgccgtcggccagtacacccagccacggctcccaaccatcagaggcatggacaagtggagcaggaggcagctgcactcccactcgtatagggtccccgattccttccacggcgaggtggtggtgatcgtgggcttccgtcatagcggcgtggacatcgcgctggagctctccaagttggcgagggaggtgcacgtcagcgtcaagtccatggaggcgctcactcccgccgtgtccaaggccgtcgccaggcacagcgacctgcacctgcacctccagatcgagtgcttgcgcgaggatgggcaggtaacgttcgccgacggctcgcgtgtcgccgccgactccatcatctactgcaccgggtacgactgctcgttcccgttcctggacacgggaggcctggtgaccgtcgacgacagccgcgtcggcccgctgtacgagcacacgttcccgccggcgctggcgccgtcgctgtccttcgtggggttgccgaggatggtgctggtgccgcggttctacgaggcgcaggcgaggtgggtggcgcaggcgctgtcgggct

SEQ ID NO: 142502 - DNA, 2427 bp, Zea Mays
accttaccagcagcttctgcacagcgtccccagtaaaatgtaccccgaaaacccccacctccgcttcctcctcttcctcgccgtcgcggcagttgccgccggcggggctgcggcgaacaccaccctcaccgcgtccctctccggcaaccagatcaagatcatctggtccggactcccggccccggacggcctcgactacgttgccatctactcgccgccgtcctcccgcgaccgcgacttcctcggctatctcttcctcaacggctccgcctcctggcgcggcggctccggggagctctccctcccgctcctcccgacgctccgcgcgccctaccagttccgtctctttcgctggcccgccaaggagtactcctaccaccacgtcgaccacgaccagaacccgctcccccacggcaagcaccgcgtcgccgtctccgccgacgtctccgtcggcgaccccgcccgccccgagcagctgcacctcgcgtttgcggatgaggtcgacgagatgcgggtcctgttcgtgtgcggcgaccgcggggagagggtcgtcaggtacgggctgcagaaggaggacgacaaggagtggaaggaggtgggcacggatgtgagcacgtacgagcagaggcacatgtgcgattggccggccaacagcagcgtcgcctggagggatccgggattcgtcttcgacggcctcatgaagggattggagcccggaaggaggtacttttacaaggttggtagtgacacaggaggatggagtgagatatacagcttcatttcacgtgacagtgaagccagtgagaccaatgcttttctatttggtgacatgggaacttatgtgccttataacacctacattcgcacacaatctgagagcttgtccactgtaaagtggatccttcgtgatattgaagcccttggagataaacccgcctttatttcacacattggggacatcagctatgctagaggttattcttgggtctgggatcatttcttcagccagatcgagcctattgctgccaatactccataccatgtctgtataggaaatcatgagtatgattggccatcacaaccctggaaaccatggtgggctacatatggaacggacggtggaggcgaatgtggaataccttatagtgtcaagttcagaatgccgggcaattctattctacctacaggtaatggtggcccagacaccaggaatctttattactccttcgactcaggcgtggtgcatttcgtctacatgtcgaccgaaacaaattttgttcagggaagtgaccagcacaacttcttgaaaacggaccttgagaaggtgaaccgaagtagaacaccgtttgttgtttttcagggccaccgccccatgtacacctcgagcgatgaaaccagggacgcggctttgaaacagcagatgctccagaatctggaaccgctgctggtgacatacaatgtgaccctcgcgctatggggacatgtccacaggtacgagaggttctgcccgatgaagaattcccaatgtgtcaacacttcatcaagcttccagtactctggcgctcctgtgcatcttgtgatcgggatgggcggccaagactggcaacctgtatggcaaccgaggcctgatcacccagacgtccctatctttcctcagcctgagcgttccatgtaccgcggtggcgagtttggatacgccagacttgtggcaacaagggagaagctaacactgacttatgtggggaaccatgatgggcaggtccatgatatggtggagatattttctggcctggtatcccccagtaacagtagtgttgctgaggcggtggatggaaccaaacttggcacaggagtcagcaccgtgcggaaaatttctccgctgtacttggaaatcggaggcagtgtgatgtttgcgctgctcctgggattttcctttgggatacttgtcaggagaaagaaagaagctgcacagtggactcaagtaaagaatgaggaatcgtagtagtgttgccaataccgtgagcctggtgcagtggtggtgatccaaacttgtgtgggtgtaattactggagtagaacctaacaaagtgaaggcatttctgacttcttggggggctccgcgtcctcttggtacaactagtgtattgatagtcttgggaaatgaaggttctgatcgcatatctgttgttgtaatagttcaatgtataagcatgtaataagtgatataatgttcacattgctttggttgacacaagtgtgtaacatgtgctaccacaagtgattctgggcgtcctttgtagttgaaccatatttgttttatgatcctgcttttctgtatcatctgcctgcttttgttagcagatgtacggaatcttctgtacttggagtttatacctaacaacatacttatatatttatattacaaacc

SEQ ID NO: 142503 - DNA, 243 bp, Zea Mays
atggcgtctccgtcgtatgctctgcgtcaactccagtgcctacgagtctacgacgacaccgtcgtcaacaccgtgccatgggttaccaccatcgccgccaccaccatcgacagggacttccccaacatcctcatcttcggcaacaacgtgtgcctcaggagaacaagcctcgaggccacgcttgactccaacgcgctctatttgatgataggcgcgcctgtgccacacctccaatccgtatga

SEQ ID NO: 142504 - DNA, 2840 bp, Zea Mays
cgcctcgcctcgcctcggcccaccggacctcgtagccgccctctgtcgtgtttgttccttgctagttctcgtcggcgccgtctctcccacgccgccctctgtcaccagcccaccacctcctgcgccggcgctcctccgagacgcagttcgcctccggaattcgatcacttcgccgccgctctcgcctccgcccccaggccgcgaagtggcgagaagccttcccactgagcaaaggtcctaggttcgatgcagcctctcggcaaaatgcaggctggctaaatacaacaatgatggagaacaggatgactttgaatccaactgatcttgatgattttgacaagctgcagcagttcgaacaactgatttgtttacatgttcttttggggacttgagactaaattacattataattttgtccagagaaaattgccatcacctaggttccaggttgaggttgtcctggtagattacgatggctcgcaaccaccaaaaccagccgctggagcagttgataataaatctgatgccgattcctcggctagcacggctgtgaaagaaaatagtgttgcgcctgcagaatccaacaaggggactggaagcaatgataaagatgaagtattctcggacagtgacgacggggaggatggatcatctaaggaaagaaaggagaggactgctggcgcggtggtcaaggcagtgtaaatgctgctaaaccatctcaaacaagcaacgtggagaaggaggcatcggccgctgctagcagacttgataaagtatagctgtaaccaggaaccagcgaacaaggaaccacgaaggcacctgatgtcacatctctcaaaactgaagtcagcagcaagggcagctccaccgcagctgctgactcttccagcatgagcgaattcaaggcgatcgcagcagatgcctcggtgtttatgttcggagatgaagacgatgattatgaaagtgaatagtgcttctatgtgtgttccgttgtacagtttggttccctctagtccccctctcggcctctcccacccacccaaaaaaaaacacagcagctgagaaagagaagtcgaaagaagttatgcctgtttgattgctaaatatgccacatattggctaaaattgaagaactaacattagatagaaaaagttaggcaaagtgtgtcaagttagacagagaaccaaaagcgtcatcagtctgatattgtacccagatgaaacttgctgtaactcaaccagggctgaaccttgttgataactctcctacttcttaacagaaaggaaatcaaatagagcaatcactgctaagagttgaagtgcgcgtgtacaggagtattctgtacttgaacttgtgcgattcatttcttggcttgtttgtatagctaggaaggatttgatgtcaagaggtgtaacgggaggcagtagaatgaatctggggaaggcaagaggtggtgtgtttactacatgtggtgctctgttgcttcttcacagctggtagtaacacttgaacttgttcattctgtctatggtggcggtggcgagggacgcgtacgaagccgccgacggtgcgcatgcacaggcctcctctgcgtgctgacgagttcaggacgctcgactaccgccggcgttcatcttcgacggccgcgacgtccgggagcacctttgcatgctggtaagtgcttgccgattgctattatttgcttgacagttggtaccgtagctatatatataattaatatgtatgtatatgcatatgttacaatcaattcttcctgtctctgtccaattaatcagaaatcaaataaactgatgggcagctccatcgtatgcttcatcattgtactaattagctagccgagtaattaatcaactacccgtgcctcatcgccggcggcaccatgtcgtcaagaagtcccttgtcgacggcggccggagcagcgctactgctagcaggtggcaacgatgacgacgacgtcattgacacggaagccactggcggcgccgccagagcagtagtaggcggcggcaacaacgacgtcgttggcacggaagccactggcatcgacatcgccgcctgcagctcctgctggccgttgtcgagagcgttgtgccgaggcgcgagtgtcgtcgtcgtcgggaggaggggcggcaggtggtggtcgttgacgcagctggcggtgccgctgtaggggttgctgtggtagtggtggtgcgcggaggaggcagcagagaattcgacgaacggcaggtggtggcggccgtcggcggcgtggttggcgcgcgggaagcaggcgacggcggtgtggtggcagtgctggccctcgtaggtggtgatgacgacggaggggtcgtcggaggagcgctccacgcgcttcttcaccgtgcacttgctgttggtgcagcggtagtagctcctgctacgtacactcatccgtgactcgatgattctagagctagctagctagcttgaggggtttaattttcagagctagttccagatgccatgcgtgcagtagccagtaggtacctggggaaggggctgttcttgacggccttctgcccgtacttcctccagcggtacccgtcctccaggtggtccacgtcgctcttggtcatgaaggcgaaccgcggctgccgcgcccgcttctgccccgccgacgacgacttcgtcatcgtcgtcttccccgccgccggtggcttgctcctgcatgcaaacaagcaaacaagcccacaatgatatgggccgggcttaattaatctggcaagggaaggaaggacgactgagatggagacgaaggctactgagcacaggcacttacgctgcttcggtggtggct

SEQ ID NO: 142505 - DNA, 1858 bp, Zea Mays
cgcctcgcctcgcctcggcccaccggacctcgtagccgccctctgtcgtgtttgttccttgctagttctcgtcggcgccgtctctcccacgccgccctctgtcaccagcccaccacctcctgcgccggcgctcctccgagacgcagttcgcctccggaattcgatcacttcgccgccgctctcgcctccgcccccaggccgcgaagtggcgagaagccttcccactgagcaaaggtcctaggttcgatgcagcctctcggcaaaatgcaggctggctaaatacaacaatgatggagaacaggatgactttgaatccaactgatcttgatgattttgacaagagaaaattgccatcacctaggttccaggttgaggttgtcctggtagattacgatggctcgcaaccaccaaaaccagccgctggagcagttgataataaatctgatgccgattcctcggctagcacggctgtgaaagaaaatagtgttgcgcctgcagaatccaacaaggggactggaagcaatgataaagatgaagtattctcggacagtgacgacggggaggatggatcatctaaggaaagaaaggagaggactgctggcgcggtggtcaaggcagtgtaaatgctgctaaaccatctcaaacaagcaacgtggagaaggaggcatcggccgctgctagcagacttgataaagtatagctgtaaccaggaaccagcgaacaaggaaccacgaaggcacctgatgtcacatctctcaaaactgaagtcagcagcaagggcagctccaccgcagctgctgactcttccagcatgagcgaattcaaggcgatcgcagcagatgcctcggtgtttatgttcggagatgaagacgatgattatgaaagtgaatagtgcttctatgtgtgttccgttgtacagtttggttccctctagtccccctctcggcctctcccacccacccaaaaaaaaacacagcagctgagaaagagaagtcgaaagaagttatgcctgtttgattgctaaatatgccacatattggctaaaattgaagaactaacattagatagaaaaagttaggcaaagtgtgtcaagttagacagagaaccaaaagcgtcatcagtctgatattgtacccagatgaaacttgctgtaactcaaccagggctgaaccttgttgataactctcctacttcttaacagaaaggaaatcaaatagagcaatcactgctaagagttgaagtgcgcgtgtacaggagtattctgtacttgaacttgtgcgattcatttcttggcttgtttgtatagctaggaaggatttgatgtcaagaggtgtaacgggaggcagtagaatgaatctggggaaggcaagaggtggtgtgtttactacatgtggtgctctgttgcttcttcacagctggtagtaacacttgaacttgttcattctgtctatggtggcggtggcgagggacgcgtacgaagccgccgacggtgcgcatgcacaggcctcctctgcgtgctgacgagttcaggacgctcgactaccgccggcgttcatcttcgacggccgcgacgtccgggagcacctttgcatgctgcggtacccgtcctccaggtggtccacgtcgctcttggtcatgaaggcgaaccgcggctgccgcgcccgcttctgccccgccgacgacgacttcgtcatcgtcgtcttccccgccgccggtggcttgctcctgcatgcaaacaagcaaacaagcccacaatgatatgggccgggcttaattaatctggcaagggaaggaaggacgactgagatggagacgaaggctactgagcacaggcacttacgctgcttcggtggtggct

SEQ ID NO: 142506 - DNA, 2343 bp, Zea Mays
gattcctacaggggggggtgtgatctagtgctaattagttctagatgcagttttggcagcagcggttgagctcatgtttttttccctctgatcatcttgctagacttgccttgaaacattcttgttttttctctcttccctttttacaggtgcctttgtgctctgagcgagtcagcaggtagaggtccaggattagtggaaaaccttgtcaatattttctacaagcatctgtctggagctaattcagatagtcagttattgggtcgatcactgttttgtcttggactcctccttcggtatggttatcaattgatgcaaacatctgaaaatcagcttgattttcccaagattatcaacttgctccagagaaaatatcttctcagggatgattttagcttgaaggttcgagctttgcagactttgggatacatacttattgcgaagcctgaatttatgctacaaaaggatatgttgaaactcatagagacagcactatcttctgaggttgattatagattaaagattcaaggacttcaaaacctctatgagtatctcagagatgctgaaagccaacttactgccgagagcactgtgaaacctcctgtccggtgtgaaataaatggcagaagtaaagtgcctgttgctgctggtgctggagacaccaacatatgtggtggtattattcaattgtattggagttctattcttgaaaggtgcttggatacaaatgatcaagttcgccagagtgcacttaagattgttgaagttgtactccgccagggtttagttcaccctattacctgtgttcctcaccttatagcacttgaaatggacccactggaggggaactcaaagttggctcatcatctgctgatgaatatgaatgaaaagtaccctttattttttgaaagccgtttgggtgatggactacaaatgtcatttaaattctttgaatccatagtcagcaaccataagatggcagcaaacataaaatcaaatccaattgcatttgtcaaacctggcatatctagaatataccgtcttatccgttcaaatcgaaattccagaaacaaatttgtccactcgatagttcggaaattcgagtctgatagccggagtcgcagcacagttagctttcttgtatactgtgccgaagttcttgcctccctgcctttcacatgctccgatgaaccactttacttgatctatgatataaatcgaattattcaccttaaagctggaggagttgagagcaatttgaaaaggtggacttctatgtctcagtctcaaaatacagtggatatgccaacgttgccaggagagaggcatgttgtcatgcaagagcctggcggatattatgataacgtgggctatgcccatgaaagggtgaatgccaatccttgcagtacttcagacgtggacatggccaaagtgcaggttgacgtggatatggccaaagtgcagggagattgccttgatgcaatagcccttcagctactgctgaaattgaagagacatttgaaagttgtctatagtttagatgatgcccgctgtcagtcattttctctaaaggagcctccgaaatctggagaaacattctccaggcagaatattccttttaatgttagcagcactaacatcagtctgccgagctgcctgcaggacgtagcttctgtttaccaggatttcaagacagtgctccacgaagattccatggactttgctgtgttcatcccttcagtccagattaggaagcgcccaaccccgagaaatacgacaaacccaaccccaagaagtacgacgagggtcaggagaacggctgcctcgagtgttacaaaagcccgtggtggcgcacgtggcgatgactccgacgactccgatgatgacgactggaccgggggcccaagagtgcttgacttcagtgggggtggccgtgtgacaaggcagagggtccaagtatgatgactggtcttggtgcttttgtacattctagggaaacctatagcgggtagcagctgacacgaggagagttagggttgagttttaggtttaaagtcgtttagggtacatagaagcagaaaaggaaaggaagatagcctttttacttagatgccattgatttggagcactccttttcttgctctgcccctgtcctgtttgtaattccggtcgggctttggcaaaactgacaaacagggttgtgctccggcttctgatctgattcaatgggaatgaaattattccttttgctttgcctgtataataacagttaagcctatgtttcgtgtaattgtctgccttgctaatgttatatatctgtacgtgtgctgagccttttttgtt

SEQ ID NO: 142507 - DNA, 5439 bp, Zea Mays
aattggagccctcctccccccgcatctagggtttcgcccatggaccccgccgccggcgggggccggggccgggaccgggcgggcttcgagcgggcgtgccggctgcccaacaccgtccactccgaggtcctgccgtcgctgccgctccccaccctcccgcgcgagctcggcttcgacgcgctccgcgacgacgagcccctcgccgcgcccgaccgccccgacacgatcatgcaggccgccaacatcgcccgcgtcctcgccgacaccgacgtctcccacctgggcttcaccgctgcggacaacgtcgacgtggaccccatccgctgctcctggctctggagggaggtgctcaagcacaaccccgacgctttcaaggtcaaggcgccaagtccgtcttcgcaaggtccatttggaggcccaggatatcaaaatcaagaacatgagaagcactttgagcattttacacctaatacgagcaaagcacgaaatgaatctgcatttcctcaggatgaaattgactcacatagagagcatttttataatgaactgacctcagattcaattgcttcaaagaagccaaaaataaggaagagagaaaataacaattctgtttcaagttctgctcccagcattcctaatactcaagatgttatcactaccttctgtgaggtggtggaggatttctgtggaaaaaccgaaattcctgatgatggagatggcggtgactggttgtcaatcccacttggtgatgttaaggttctcgtgaatgaaattacatctgttcgatccaaaaggatattgcatgaggttcctatggatacagttacaaggttattggatgtgattgaccgtcagattcgatattctcaaggtttgtcgatagatgtgaaagaaaattctgatgtcgttgatgctgaacctctggttttctctgctttggaggccagtcatgctgcgttggcaattatgacccaccatgatatgccaaagcaactgtaccgagaagaacttattgagcggattattgatttctcaaggcatcagatcacagattgtatggcagcaagtaacccaaccttccgagctctctacaaaccagctgaaaatgttgcaaatgatggagatgatgatgaagatgatttggaaaatggacaagttagcaagaggagacgtactgctactaatttgagcatgagaaaatcttcaaacaacagaacctaccatctagcagatgaagaccaaaagcaaatccagatgataacagcactgttagttcacctggttcagtttagtgcaattgttcccaatagcttaaaaggaacagttgattggaccactattgttgatgcctccggagatgctgattattatccaattaaatgccatgaagcggcaacagaggcttgttgccgtttttggactgatgtccttcaacgttttactgctgctaaatctcaagatatgtcggaaaccaaaggaataatagataatcttgttcaggatttcctaatgatactaaacttgccggagtatccagctgctgcttctatccttgaggttctctgtgtgttgctccttcagaatgctggattgaaatctaaggacactaatgttcggtgctttgctattgatcttcttggtggtattgcatcaagattgaagcatgattcggtcatctgtagtgaagagaagctttggatattgcaagatctcactgatgcaggtagcgatggctcaaaaatcttgaaaaacaagtgctgtgtttgtcttggtggaagagattgtatgggggctgctagccaggataacttagagcgtgatagtgtttgccccttgtgtttttgcaaacaacagctcaatgtgctacagacgtactgtcagtcacaaattaaagaaaatggcaaaaaaactgctgcgtctactagtaagaaatctgctaaaccagctgaggtgccagcagtggatattattcaacaaatactactgagttatctccaagaatctggtccacaagatgatgggaacctgtttactcgatggttctatctgtgcatctggaacaaagaaaaccaacattctcaggaggagatcatctactatctcgctagattaaaatcaaaagagattctgcgagattctggcaatggtctggcaatttccagagattcagcaaagaaaatttgcttggcacttggtcagaagaactcattttgcaggggttttgataaaattcttgctcttcttttggctagcttgagagaaaattctcctgtaataagagcaaaagccttgcgtgcggtcagcagtatagttgaagctgaccctgaggtcttgggtgacaaacgtgtccaatctgctgtcgaagggaggttttgtgattcggctatttctgttcgtgaagctgcccttgaacttgttgggaggcatattgcttcacatcctgatgtgggcctgaagtatatagaaaaagttgctgagcgaataaaggacactggagtcagcgttcgcaagcgtgcaatcaaaattataagggatctatgtgcttctaatccaaacacagacacaacacatgcctttgtggagataatttctcgtgttaatgatgaggaatccagtgtacaggatcttgtatgtaaaacattttatgaactatggtttgaagaaccaactgggagccataagcacttggttgctgatggaagttcagttccaatggagatagctaaaaagactgagcaaattgttgacatgttgaggaagatgaccaatcaccaacctctgattaccatcataaaacgtaacttgactcttgatttcctccctcagtcaaccaaggctgcagggattaactcatacatggtggcatcaattcagaagcgttgcgaattaatatgcaaacgcttattagaaagaatattgcaggttgaggagggagctgctaaggagatggaaatccacatgcttccttatattgttgctttgcaagcattttgtattgttgatcccacgctctgcattccagtaactgatccttctaagtttgttgtgacactacaaccataccttaatattcaggttgacagtaaatcagctgcccagttgcttgaaagtattatttttgtgattgatgctgttcttccactcataaggaagccaacacaaaatgttgttgaagaacttgagaaagatctgaaacatatgatagttcgccattcgtatttgacagttgtacatgcctgtatcaagtgcctttgtgctctgagcgagtcagcaggtagaggtccaggattagtggaaaaccttgtcaatattttctacaagcatctgtctggagctaattcagatagtcagttattgggtcgatcactgttttgtcttggactcctccttcggtatggttatcaattgatgcaaacatctgaaaatcagcttgattttcccaagattatcaacttgctccagagaaaatatcttctcagggatgattttagcttgaaggttcgagctttgcagactttgggatacatacttattgcgaagcctgaatttatgctacaaaaggatatgttgaaactcatagagacagcactatcttctgaggttgattatagattaaagattcaaggacttcaaaacctctatgagtatctcagagatgctgaaagccaacttactgccgagagcactgtgaaacctcctgtccggtgtgaaataaatggcagaagtaaagtgcctgttgctgctggtgctggagacaccaacatatgtggtggtattattcaattgtattggagttctattcttgaaaggtgcttggatacaaatgatcaagttcgccagagtgcacttaagattgttgaagttgtactccgccagggtttagttcaccctattacctgtgttcctcaccttatagcacttgaaatggacccactggaggggaactcaaagttggctcatcatctgctgatgaatatgaatgaaaagtaccctttattttttgaaagccgtttgggtgatggactacaaatgtcatttaaattctttgaatccatagtcagcaaccataagatggcagcaaacataaaatcaaatccaattgcatttgtcaaacctggcatatctagaatataccgtcttatccgttcaaatcgaaattccagaaacaaatttgtccactcgatagttcggaaattcgagtctgatagccggagtcgcagcacagttagctttcttgtatactgtgccgaagttcttgcctccctgcctttcacatgctccgatgaaccactttacttgatctatgatataaatcgaattattcaccttaaagctggaggagttgagagcaatttgaaaaggtggacttctatgtctcagtctcaaaatacagtggatatgccaacgttgccaggagagaggcatgttgtcatgcaagagcctggcggatattatgataacgtgggctatgcccatgaaagggtgaatgccaatccttgcagtacttcagacgtggacatggccaaagtgcaggttgacgtggatatggccaaagtgcagggagattgccttgatgcaatagcccttcagctactgctgaaattgaagagacatttgaaagttgtctatagtttagatgatgcccgctgtcagtcattttctctaaaggagcctccgaaatctggagaaacattctccaggcagaatattccttttaatgttagcagcactaacatcagtctgccgagctgcctgcaggacgtagcttctgtttaccaggatttcaagacagtgctccacgaagattccatggactttgctgtgttcatcccttcagtccagattaggaagcgcccaaccccgagaaatacgacaaacccaaccccaagaagtacgacgagggtcaggagaacggctgcctcgagtgttacaaaagcccgtggtggcgcacgtggcgatgactccgacgactccgatgatgacgactggaccgggggcccaagagtgcttgacttcagtgggggtggccgtgtgacaaggcagagggtccaagtatgatgactggtcttggtgcttttgtacattctagggaaacctatagcgggtagcagctgacacgaggagagttagggttgagttttaggtttaaagtcgtttagggtacatagaagcagaaaaggaaaggaagatagcctttttacttagatgccattgatttggagcactccttttcttgctctgcccctgtcctgtttgtaattccggtcgggctttggcaaaactgacaaacagggttgtgctccggcttctgatctgattcaatgggaatgaaattattccttttgctttgcctgtataataacagttaagcctatgtttcgtgtaattgtctgccttgctaatgttatatatctgtacgtgtgctgagccttttttgtt

SEQ ID NO: 142508 - DNA, 1722 bp, Zea Mays
gacaacccaggcctggttcggcccggccttcccgatttagtacaacgtctcctgtgtcctctcgcgcgccgcgccgcccctcaggccgagactcccctcaggccccagctctcgctctccggtctccaccgccgctccggtgctcccttccgggattcccctccggcgagcttgctcagctccgctccaggaacgatcagcctggctggctggattgaaatttcggcccagtggcccacttcacttgcccagcggcccagcccagcttcccttttcccgattcccaccacgtgagcagaagctgcacaaccaagaggcaagagccaacagagcgcagaagctgcacaaccaagaggtaagagccaaccgagcaacgaacgcccaggcacacacgagacacgacacgaaccaggcaaccagctgccgagggaggaaccctagcggaacactgtgcaggtgacggcggcgcgctaccggtgacgggggatacggcggcatcgtccccctcggcccctcctccatccccggcgcggcggcgccagcagccggcctgcagatttccacgtcgtccatggcgctcgtcgtgatgtgtgggcagccgtgcagcggtaaaacagcagccgccgcttgccttgctgtggcgctgcactcctcctcgcctgaccttacagtccgaatcatcgatgagtcatccctccatctcaggcgcaacgatagctacaaagatatggttgtggagaaaaacttgagagggcttcttagatcagaagttgacaggtctgtgtcacgcgacagcataattattgtcgactcgttgaataatattaaggggtaccgctatgagttgtggtgtcttgcgcgtgcatctggtgtaagatattgtgtgcttttttgtgatacagaagtggaccattgtaaggaatggaacagcaaccgccaggagaaaggagaaccagcatatgatactaatatatttgaagatcttgtaagtagatttgagaagccagatagacgcaatcgttgggattcccctctttttgaattgttcccatctagagatgaattagtggaaacagctcctgttattgctgaagctgtgtcatatttgacaaaaaaagtggattccaaaacaagagatgtaaaagttctccagcctacaatagccactcagacggtgcgaacaacagaggctaattccctctatgagatggacaaggcaacacaggaggtggtcaatgcaattgttgaagcacagtcatgcggtcttgggcttgctgtgaataagatctccattgggcccaacttgccaactttgggatgcttaactgattgccacatcaagcttgagagatctgttggcctacctgagctcagaagcctgcggagaactttcatcaagctggcagggcagtacagtctgagtgggccaccaccaccgacagatgctgacagcgcaaagaggatgtttgtcgactacttaaaccgtgaacttggtgcatgataattttcattcgcctgcgttgcatgaacactatgtagcatgtggttaacttgggggaatagataattgaagacaacttgattgtacttgttccttgttttgtggaaatctttatatgactatcttaacgtccttgacgccttggtggacatgcaacatgaatatttttttctctcaaacccgcatgagaggtgctcatcattatattaagaaaataaaaa

SEQ ID NO: 142509 - DNA, 1356 bp, Zea Mays
gacaacccaggcctggttcggcccggccttcccgatttagtacaacgtctcctgtgtcctctcgcgcgccgcgccgcccctcaggccgagactcccctcaggccccagctctcgctctccggtctccaccgccgctccggtgctcccttccgggattcccctccggcgagcttgctcagctccgctccagatttccacgtcgtccatggcgctcgtcgtgatgtgtgggcagccgtgcagcggtaaaacagcagccgccgcttgccttgctgtggcgctgcactcctcctcgcctgaccttacagtccgaatcatcgatgagtcatccctccatctcaggcgcaacgatagctacaaagatatggttgtggagaaaaacttgagagggcttcttagatcagaagttgacaggtctgtgtcacgcgacagcataattattgtcgactcgttgaataatattaaggggtaccgctatgagttgtggtgtcttgcgcgtgcatctggtgtaagatattgtgtgcttttttgtgatacagaagtggaccattgtaaggaatggaacagcaaccgccaggagaaaggagaaccagcatatgatactaatatatttgaagatcttgtaagtagatttgagaagccagatagacgcaatcgttgggattcccctctttttgaattgttcccatctagagatgaattagtggaaacagctcctgttattgctgaagctgtgtcatatttgacaaaaaaagtggattccaaaacaagagatgtaaaagttctccagcctacaatagccactcagacggtgcgaacaacagaggctaattccctctatgagatggacaaggcaacacaggaggtggtcaatgcaattgttgaagcacagtcatgcggtcttgggcttgctgtgaataagatctccattgggcccaacttgccaactttgggatgcttaactgattgccacatcaagcttgagagatctgttggcctacctgagctcagaagcctgcggagaactttcatcaagctggcagggcagtacagtctgagtgggccaccaccaccgacagatgctgacagcgcaaagaggatgtttgtcgactacttaaaccgtgaacttggtgcatgataattttcattcgcctgcgttgcatgaacactatgtagcatgtggttaacttgggggaatagataattgaagacaacttgattgtacttgttccttgttttgtggaaatctttatatgactatcttaacgtccttgacgccttggtggacatgcaacatgaatatttttttctctcaaacccgcatgagaggtgctcatcattatattaagaaaataaaaa

SEQ ID NO: 142510 - DNA, 1332 bp, Zea Mays
gacaacccaggcctggttcggcccggccttcccgatttagtacaacgtctcctgtgtcctctcgcgcgccgcgccgcccctcaggccgagactcccctcaggccccagctctcgctctccggtctccaccgccgctccggtgctcccttccgggattcccctccggcgagcttgctcagctccgctccagatttccacgtcgtccatggcgctcgtcgtgatgtgtgggcagccgtgcagcggtaaaacagcagccgccgcttgccttgctgtggcgctgcactcctcctcgcctgaccttacagtccgaatcatcgatgagtcatccctccatctcaggcgcaacgatagctacaaagatatggttgtggagaaaaacttgagagggcttcttagatcagaagttgacaggtctgtgtcacgcgacagcataattattgtcgactcgttgaataatattaaggggtaccgctatgagttgtggtgtcttgcgcgtgcatctggtgtaagatattgtgtgcttttttgtgatacagaagtggaccattgtaaggaatggaacagcaaccgccaggagaaaggagaaccagcatatgatactaatatatttgaagatcttgtaagtagatttgagaagccagatagacgcaatcgttgggattcccctctttttgaattgttcccatctagagatgaattagtggaaacagctcctgttattgctgaagctgtgtcatatttgacaaaaaaagtggattccaaaacaagagatgtaaaagttctccagcctacaatagccactcagacggtgcgaacaacagaggctaattccctctatgagatggacaaggcaacacaggaggtggtcaatgcaattgttgaagcacagtcatgcggtcttgggcttgctgtgaataagatctccattgggcccaacttgccaactatcaagcttgagagatctgttggcctacctgagctcagaagcctgcggagaactttcatcaagctggcagggcagtacagtctgagtgggccaccaccaccgacagatgctgacagcgcaaagaggatgtttgtcgactacttaaaccgtgaacttggtgcatgataattttcattcgcctgcgttgcatgaacactatgtagcatgtggttaacttgggggaatagataattgaagacaacttgattgtacttgttccttgttttgtggaaatctttatatgactatcttaacgtccttgacgccttggtggacatgcaacatgaatatttttttctctcaaacccgcatgagaggtgctcatcattatattaagaaaataaaaa

SEQ ID NO: 142511 - DNA, 1986 bp, Zea Mays
gtcgagtgacgcggcactccagcggctcaattctaatccagcagcctggcagcagccgccatcgcccactcgccgtcgcaccaaccgccgccccagtgaagggcccatgccgccgtctccgtccgactccagccccgacatggacccgcgcagcggctactgcgcgtcgacgaggacgttctacagcctgcgcgcggcgccgccttcgccgccgccgccgccggacgccccgctctccttcccggctttcgccctgtccttcctccccaccccgctgccctcgcccttggccgcgagccgcccggcgctcgtagacgctggcacgggcgagtccgtcccgctcccggccttcctctccaggctgcgcgcgctcgccgccgcgctccgcgcccggctccgcctcggcccgggcgacgtcgcgttcgtgctcgcgcccgcgggcgtccacgtccccgtgctctactacgcgctcatgtccgtgggcgccgtcgcgtccccggccgacccgtccctacccgccgccgaggtctcccgcctgctcgcgctctccgacccgcgcgtcgccttcgccgtcgcgggcaccaggggcaagctccctcccgggctccccaccgtgctgctcgactcgccgacgttcctctcgttcctgcacgagcccgaggacgcggcggtggtccggcagtcggacccggtggtggtccggcagtcggacccggcggcggtgctgtactcgtccgggaccacggggcgcgccaaggcggtcgtgctgacccacggcaacctcatggccagcaacgtgacgcgggcgcccgcggccggggagaccctcatgctcgccgtgcccctcttccacgtgtacggcttcaccttctgcctgagggcggcgtcggcggcgcacacgctggtgctgcccgcggccaggaggaggttcgacgccgcggcggtcctgggcgcggtggagaggttcgaagtgacgcgcctggcgctggcgccacccgcgctgctcgccatcgtgcgcgccgccgaggaggacgcggcggcgcctgcccgcgcagcctcgctgcaggctgtgaggtgcggcggcgcccccgtcgcggctgacctcatcgcgcgcttctcgcgcgtgttccccggcgtaagcctcgcgcaggggtacggcctcacggagactacagccggattctgccgcgccgtcggggaggaggaaagcgcgcgagtgggatccgtggggcgtctctcatggggcgcccaggtgaaggtcgttgatccggagacgggggcagccctgcctcctggcgtggcaggggagctttgggtccgaggccctttcgtgatgaaaggttaccttggcgacgacgattccacgtctgagatcttggacagccaaggatggctgaggacaggagatctctgctacatcgaccaggatggattcgtcttcatcgtagaccgtctcaaggagttgatcaagtacaaaggctaccaggtgcctcctgcagagctcgaaaacctgctgcagacacaccctgacattgatgaagccgcagttgtcccataccgtagtgacgaggatggtggggagttgccggtagcgttcatcgtcagacgcccaggaagccaccacttgcaggaatcacacatcaaagacttcgtcgccaaacaggtcgcgcactacaagcggatccaccatgttttccttgtggattcgataccgaagaacgcgtcgggcaagattttacgcagggacctggccaagctagcgtcgcggcgcattagctccaagctataggtcaataggtgcattgtatgtgtgacgtccatttctttccttctcttgttgcaatgtactagcagacactgtcagacttgtagttattaccataccggtttatttaatcaagacatggagagtaatcgtgtagcctctcaacaagaaaaaagataagtacacagtactggcttggcaaaccatctgcactataccag

SEQ ID NO: 142512 - DNA, 1991 bp, Zea Mays
gtcgagtgacgcggcactccagcggctcaattctaatccagcagcctggcagcagccgccatcgcccactcgccgtcgcaccaaccgccgccccagtgaagggcccatgccgccgtctccgtccgactccagccccgacatggacccgcgcagcggctactgcgcgtcgacgaggacgttctacagcctgcgcgcggcgccgccttcgccgccgccgccgccggacgccccgctctccttcccggctttcgccctgtccttcctccccaccccgctgccctcgcccttggccgcgagccgcccggcgctcgtagacgctggcacgggcgagtccgtcccgctcccggccttcctctccaggctgcgcgcgctcgccgccgcgctccgcgcccggctccgcctcggcccgggcgacgtcgcgttcgtgctcgcgcccgcgggcgtccacgtccccgtgctctactacgcgctcatgtccgtgggcgccgtcgcgtccccggccgacccgtccctacccgccgccgaggtctcccgcctgctcgcgctctccgacccgcgcgtcgccttcgccgtcgcgggcaccaggggcaagctccctcccgggctccccaccgtgctgctcgactcgccgacgttcctctcgttcctgcacgagcccgaggacgcggcggtggtccggcagtcggacccggtggtggtccggcagtcggacccggcggcggtgctgtactcgtccgggaccacggggcgcgccaaggcggtcgtgctgacccacggcaacctcatggccagcaacgtgacgcgggcgcccgcggccggggagaccctcatgctcgccgtgcccctcttccacgtgtacggcttcaccttctgcctgagggcggcgtcggcggcgcacacgctggtgctgcccgcggccaggaggaggttcgacgccgcggcggtcctgggcgcggtggagaggttcgaagtgacgcgcctggcgctggcgccacccgcgctgctcgccatcgtgcgcgccgccgaggaggacgcggcggcgcctgcccgcgcagcctcgctgcaggctgtgaggtgcggcggcgcccccgtcgcggctgacctcatcgcgcgcttctcgcgcgtgttccccggcgtaagcctcgcgcaggggtacggcctcacggagactacagccggattctgccgcgccgtcggggaggaggaaagcgcgcgagtgggatccgtggggcgtctctcatggggcgcccaggtgaaggtcgttgatccggagacgggggcagccctgcctcctggcgtggcaggggagctttgggtccgaggccctttcgtgatgaaagcgtaggttaccttggcgacgacgattccacgtctgagatcttggacagccaaggatggctgaggacaggagatctctgctacatcgaccaggatggattcgtcttcatcgtagaccgtctcaaggagttgatcaagtacaaaggctaccaggtgcctcctgcagagctcgaaaacctgctgcagacacaccctgacattgatgaagccgcagttgtcccataccgtagtgacgaggatggtggggagttgccggtagcgttcatcgtcagacgcccaggaagccaccacttgcaggaatcacacatcaaagacttcgtcgccaaacaggtcgcgcactacaagcggatccaccatgttttccttgtggattcgataccgaagaacgcgtcgggcaagattttacgcagggacctggccaagctagcgtcgcggcgcattagctccaagctataggtcaataggtgcattgtatgtgtgacgtccatttctttccttctcttgttgcaatgtactagcagacactgtcagacttgtagttattaccataccggtttatttaatcaagacatggagagtaatcgtgtagcctctcaacaagaaaaaagataagtacacagtactggcttggcaaaccatctgcactataccag

SEQ ID NO: 142513 - DNA, 502 bp, Zea Mays
cagttctattgtttttacacaaatttgtttgtgatgcttcaaaccgctaatttattttttaaaaaagttgtgcaatgagcatatcacataataaatgagattcttaggaatatcccaagttgctaatgagtaaaatttcagctttgcttttaaaaaaaatatgggtttaagttgttcctaacattcggacatccgtcaaatcagatgccactgcacaaatggacgttatggtgaccacactgtcacgtgagctaagcaaactacagcctgcaagagctacacgtggtagcctatattcctgccttgctataattttattatttttcttttgttaatgagtgtagtttctctggctaatggtaaaaataatctgttctacaggcatgcttgaccacatcatggtggagaatgcaagtgttaaagttgcattgaatcgcattgccattgtttctgtcctagattcacataccctgtcagtgatgtcttatgaagtttggaggct

SEQ ID NO: 142514 - DNA, 1422 bp, Zea Mays
tcttctccctggcaactgcttccgtcgtctccaccaccgtcccacgttctcctccctccgcctctcgctctgcgcacatccccatgcccacgccgagcgcttgcgccctcaccgcccccgtcgcaaccgcggccgtggcggcgtcgacgacctcccccgacttttccgccgtgggcgccgtcctggggaagcccaggatgctcgtaagtagtggccgagaagatcggagccgcgaggttcatgctgaaggaggtggtgcgatgcccagctcccaggttgtcgtcttcacgctcctcatgctcctgaagttctggtcctggagttctggtcagcgagatgttcgtcttcgtgctcagcctcgacctcgagtcatcgcgcaagcagcgaggtaagcatgtcattggtcgactgccatccgcgacgagccggatctcaaagaggcggtaatactcaggcccttgggccacacctcacacctccgattgaggtgttcatgtagtaaaccatcgacttcaacattatttttagatccaacaaaaagcagatccaaatggatcaagccccggccgtctcgatcccaccatccgagagagctccataggcacaggccaggtccccatcgccgcgacgcttgccgcacctctcccccgcctggtagtagcctcgccgccaccaccgttgccgaaatggggtccgtgtccttcgtcgggagggtgctcttcgtcgccgctttcctcctctccgcctaccaggagttgaatgaattcggtgctaatggtggaccaacatctaaggccattcaacccaaattcaacgtgtttatcaaaaatgtctctgctcatctgggagtagctgtgccacacattgagttgaagcatgtgattgctgctacaattggtcttaagggtcttggaagcctcctttttattttgagcagctctctcggtgcttatctcctactgctgtaccttgctttgatcactcctatcatccatgacttctacaactacgatatggagaaggcagaatttgcaggcctctttgcgaagttcacccaagatttggcgctgatcggagctctgctcttctttctgggcatgaagaactccatcccgaagcggcaggggcggcaagaagtccccaaggcgaagacgaactagggctgcttagatagctgcaccagggtgtatcaggagacaggtctatttcgaagcaggctcagcgtgatgcagcgaatgccatcgagctgcgcttttacatgtttatcatcagattccattttgcggggcacgacccgaacaaaggtgtgaccagggtgggttaggcgactagattgcacgattatgtacttgcgattggtttgttgaactgggttgccgacggttaatcttctccatttgatttaaaaaacggatcaagcag

SEQ ID NO: 142515 - DNA, 3203 bp, Zea Mays
gccagcctgatctccggctcccgtgcggtgagaggaccccaaccccgcggcccacacgtcatccactctagccacagcatctcacgtgccgccccccacctccacccttacctcccggcatttgggttactgacgtgtgggaccagatctaggatggacccacacgtcagtgacccaactgcagaggaaatagctgcaaaggatctcatccccccacctagcacatcaactcggagtcggagattcccctcccagccgtcgaaagtcgaaaccctagccccgcctcaccgccggcggtggtggcagcctcagcaccggcacacagcccgccgtacctctcctcgtacgctcccttccggtgtgccgtcgccccctcgaccggtccatcgttcgtcggctcggtagccgccggatcggatcgggatcggccggcgccatgtccaaggccagggtctacaccgacgtcaacgtgctgcgccccaaggagtactgggactacgaggcgctcaccgttcaatggggtgagcaggataactatgaagttgttaggaaagttgggagagggaaatacagtgaagtctttgagggtattaatgttaacaataatgagaaatgcatcattaagatcctcaagcctgtgaagaaaaagaagatcaaaagagaaattaaaattcttcagaatctttatggaggccctaacattgtgaagctgcttgatattgttagagatcagcattcaaaaacaccaagcttgatctttgagtatgtcaacaacacagatttcaaagtgttgtacccgacactaacagattatgacattcgatattacatctatgagttactcaaggcattagattactgccattcacaaggtattatgcaccgagatgtgaagccccacaatgttatgatagatcatgagcttcggaaactccggctgatagactggggccttgctgaattctatcatcctggcaaggaatataatgtccgtgttgcctccaggtacttcaagggtcctgagcttcttgttgacttgcaagattatgattactctctggacatgtggagtctgggctgcatgtttgctggaatgatttttcgtaaggagccatttttttacggtcatgacaaccatgatcaacttgttaagatagccaaggtacttggaacagatgggctgaatgtctatttgaacaagtacagaattgagcttgaccctcagctcgaagcccttgttggaaggcatagcaggaaaccctggacaaagtttattaatgcagacaaccaacacctagtgtctcatgaggccatagatttcctcgacaagcttttgcgttatgatcatcaggacaggcttactgcacgtgaagctatgacacacccatacttccaacaagtgagggctgcagagaacagcaggacgcgggcatgagaggccaaagaccaaagaggcaaagactggtgctaaccgtggatcagatcatctgctcttggtggagccatgctcttaccagtgatgaatagtggtttgggggtttacttggcaaaaacaaacagtagctatggcgcctgttgtacccttaaccgcgtcgagacgtgactgaattactcaggtcatcggcttgtgggacgtgattgcgaacgagattattcatgtaagatgtttgtcataaaaggtcgtcgttggctgattgtgctgtttgtattgttgagctagtaaagaatatccaaaatttgtttggacttcatcgagctctccaggtttattttctcgtaatctctatggaaattaccgttactagagataaatggcatccttgcaatgtcccaaattctcaccgaagaacacaaggaaaagagaagaaaatattgagcaagcacagcacaggcaggcagcatgaatccacacagaaccaatggtttttagcacagcaggctgacagccaagggttacagtacataatcagacggggcaacacgaacgaagcagccgcatcagcagcagcctagaacccattaattgacacacagcgtatatatatatatgtagtacttgtcttttagctgagcagagcatatgcttctgctgcttactagttcttgaggtgggggaagcactggtagaggtcgttcttgggatgcctcgcctccgcatgttctttgcacttggcctcggaggtggtgcagatgaaggtctgcatgcagatcttgcactgcattcagatggaattatcaaaaggttagtgcatttttggccaatgggaggcatcaacctctgtgctcggcggttaatgcttaattgaaaaggtagtagtactcttgaattacactgctaactagagcttttgtaggtacatacatacggcaatgactgctatacaagcagttcttcggcaatgactgctatacaagcagttcttctgttcaagcgtgtaagcaaaccatctgatacattagatcgtgatacaaccgtagatcatatctaacacttaaacacttccaccaccagctcaataatttttataaaaaaaacctaacaaaccatagttgtatctatggatcagatgttgcatgtgtaacagaagaactgtcgttgcccatacatatataaagcagtataaggtttgatttggtgattcgggatccaccaccaaatcaaccctaaaactagaggcatagccatggttgacaattagggttcgagaatcgcgccgtggctggatctgccgaatccagacggagtagcctgaaacccaagcgaatctgggaaaacccccaaaatctcgacaggaacacagggcaagcaagaggaggaagatacctggatgttcatggccttcttgttggcctccagctggctgcctgcaagcaaatacagagcggaaatacgagacggtgagcaaagggcggcggctggggcgggcgggggacatgcatcggtcgggtacttgcctttgccgcccttgttcttctcggcgttcctctcgcgcgccatcttggacttctgggcgttgccgccgcccatggccgctgaatcctgcgatggaagaggcgaagatagagacgagaggagcgggggcgtggtagtgcgggcggcggaccgacgccagccaacgcgtcccttttatttatgcaacaagtccttcgtcccttacttttaattattagaaaaaaaatcgcatttggattggatatggatg

SEQ ID NO: 142516 - DNA, 2040 bp, Zea Mays
ctcggagtcggagattcccctcccagccgtcgaaagtcgaaaccctagccccgcctcaccgccggcggtggtggcagcctcagcaccggcacacagcccgccgtacctctcctcgtacgctcccttccggtgtgccgtcgccccctcgaccggtccatcgttcgtcggctcggtagccgccggatcggatcgggatcggccggcgccatgtccaaggccagggtctacaccgacgtcaacgtgctgcgccccaaggagtactgggactacgaggcgctcaccgttcaatggggtgagcaggataactatgaagttgttaggaaagttgggagagggaaatacagtgaagtctttgagggtattaatgttaacaataatgagaaatgcatcattaagatcctcaagcctgtgaagaaaaagaagatcaaaagagaaattaaaattcttcagaatctttatggaggccctaacattgtgaagctgcttgatattgttagagatcagcattcaaaaacaccaagcttgatctttgagtatgtcaacaacacagatttcaaagtgttgtacccgacactaacagattatgacattcgatattacatctatgagttactcaaggcattagattactgccattcacaaggtattatgcaccgagatgtgaagccccacaatgttatgatagatcatgagcttcggaaactccggctgatagactggggccttgctgaattctatcatcctggcaaggaatataatgtccgtgttgcctccaggtagctgcagatatactagactttcattgttggttcacagttaatgacctttgaattgtggaattctgaagtggtaattagtgaaactataaaatgttttgtcacaatttatatgtttctgcttctgcccttattttggatccaaatttcagttgatctgaactcacatctgtcatttgtggtttgttcatgtagtttgtttattcagcaaccatataaattaagaacattctgataaatagtatttatgttttaactgcactatagccgcctgacgtcacatattaagttgacagaatgaatgaatgcttttctacagtgaatcatatggcttacatcacatgtctctagaacataaatttccatgttttctctctggcagccctctttccctcactattttctttccaaacattttttcaactggaattcaggtacttcaagggtcctgagcttcttgttgacttgcaagattatgattactctctggacatgtggagtctgggctgcatgtttgctggaatgatttttcgtaaggagccatttttttacggtcatgacaaccatgatcaacttgttaagatagccaaggtacttggaacagatgggctgaatgtctatttgaacaagtacagaattgagcttgaccctcagctcgaagcccttgttggaaggcatagcaggaaaccctggacaaagtttattaatgcagacaaccaacacctagtgtctcatgaggccatagatttcctcgacaagcttttgcgttatgatcatcaggacaggcttactgcacgtgaagctatgacacacccatacttccaacaagtgagggctgcagagaacagcaggacgcgggcatgagaggccaaagaccaaagaggcaaagactggtgctaaccgtggatcagatcatctgctcttggtggagccatgctcttaccagtgatgaatagtggtttgggggtttacttggcaaaaacaaacagtagctatggcgcctgttgtacccttaaccgcgtcgagacgtgactgaattactcaggtcatcggcttgtgggacgtgattgcgaacgagattattcatgtaagatgtttgtcataaaaggtcgtcgttggctgattgtgctgtttgtattgttgagctagtaaagaatatccaaaatttgtttggacttcatcgagctctccaggtttattttctcgtaatctctatggaaattaccgttactagagataaatggcatccttgcaatgtcccaaa

SEQ ID NO: 142517 - DNA, 1606 bp, Zea Mays
ctcggagtcggagattcccctcccagccgtcgaaagtcgaaaccctagccccgcctcaccgccggcggtggtggcagcctcagcaccggcacacagcccgccgtacctctcctcgtacgctcccttccggtgtgccgtcgccccctcgaccggtccatcgttcgtcggctcggtagccgccggatcggatcgggatcggccggcgccatgtccaaggccagggtctacaccgacgtcaacgtgctgcgccccaaggagtactgggactacgaggcgctcaccgttcaatggggtgagcaggataactatgaagttgttaggaaagttgggagagggaaatacagtgaagtctttgagggtattaatgttaacaataatgagaaatgcatcattaagatcctcaagcctgtgaagaaaaagaagatcaaaagagaaattaaaattcttcagaatctttatggaggccctaacattgtgaagctgcttgatattgttagagatcagcattcaaaaacaccaagcttgatctttgagtatgtcaacaacacagatttcaaagtgttgtacccgacactaacagattatgacattcgatattacatctatgagttactcaaggcattagattactgccattcacaaggtattatgcaccgagatgtgaagccccacaatgttatgatagatcatgagcttcggaaactccggctgatagactggggccttgctgaattctatcatcctggcaaggaatataatgtccgtgttgcctccaggtacttcaagggtcctgagcttcttgttgacttgcaagattatgattactctctggacatgtggagtctgggctgcatgtttgctggaatgatttttcgtaaggagccatttttttacggtcatgacaaccatgatcaacttgttaagatagccaaggtacttggaacagatgggctgaatgtctatttgaacaagtacagaattgagcttgaccctcagctcgaagcccttgttggaaggcatagcaggaaaccctggacaaagtttattaatgcagacaaccaacacctagtgtctcatgaggccatagatttcctcgacaagcttttgcgttatgatcatcaggacaggcttactgcacgtgaagctatgacacacccatacttccaacaagtgagggctgcagagaacagcaggacgcgggcatgagaggccaaagaccaaagaggcaaagactggtgctaaccgtggatcagatcatctgctcttggtggagccatgctcttaccagtgatgaatagtggtttgggggtttacttggcaaaaacaaacagtagctatggcgcctgttgtacccttaaccgcgtcgagacgtgactgaattactcaggtcatcggcttgtgggacgtgattgcgaacgagattattcatgtaagatgtttgtcataaaaggtcgtcgttggctgattgtgctgtttgtattgttgagctagtaaagaatatccaaaatttgtttggacttcatcgagctctccaggtttattttctcgtaatctctatggaaattaccgttactagagataaatggcatccttgcaatgtcccaaa

SEQ ID NO: 142518 - DNA, 792 bp, Zea Mays
atgacgctgccacaggacatcattgtcgagcagattttcctccgcgtgccacccgacgaccccgcgcgcctactccgcggcgcgctcgtttgcaagcactgggcccgcctcctcgcccaccgcgacttccgccgccgctcctcctgctacggccaccacctcgactgccgccccggccacttcctcgtcgccttcgtcggcatggacgccaaggagatgttcgcccgcgtctactcatctgagtccgccgcgtggggcaaggtgacctccgcccggcttccaggcagccatttccacgacaagctgtccggcgctctagcgcggaacgcgatctacttcgtactcgggccggaacacgggatggtcaagtatgatctggctacgggcaagctgtctctggtcgccgtaccagagacgcttacgctcgatggttggcgcttgatgactacggaggacggtgggctgggatttgcagagttgaacttgcattcgactctcacgctctggtccatggtggacgaagggagatgggccgtaagcagggccatcgacctgaccgaccgactcccagttattgccctcgcggtatccacttgtatggttgcctttgcggacattgccggtgtcatcttccttaggacgacagatgggctctacacttatgatctcaagactgagcagagcattcttgttatggataatgacttctatggcatcataccctacgcgagcttctacactccagtgttacgggtggccaccacatgcgaggggtctgcctcgacttcttga

SEQ ID NO: 142519 - DNA, 897 bp, Zea Mays
ctcgtctcaatggtggtggtggtgtcagcggcggcagcggaggaggaggaggaggacgtgacggtgcgcgagttcgacggcgccagcgaccacgaccgcgccgccgtggagcgcctggagcgcgcctgcgaggtcggccccagcgccggcaagctctgcctcttcaccgacctcctcggcgacccgctgtgccgcgtccggcactccccggccttcctcatgctcgttgccgagtccggcgcgggcggcgaggtcgtgggcgtggtgcgcgggtgcgtgaagaccgtggcgtgcgggcggcgcgggcgggacgacgagctcgagctcttctccaaggtgggctacctgctgggcctgcgcgtgtcgccggctcaccggcgccgcggcgtggcgcgcgcgctggtggcgcggatggaggagtggttccggcaggcgggcgcggagtacgcgtacgtggcgacggaccgcgccaacgagccctcggtgcggctcttcacctcccgctgcgggtacgccaagttccgcgccccgtccgtgctggcgcacccggtgttccggcacgacctggccccgccgcgccgcgccgcggtggtccggctgtgcccccgcgacgccgagctgctctaccgcgcgcggttcgcgggcgtggagttcttcccgcgcgacatcgacgccgtgctgcgcaacccgctgtcgctcggcacgttcctggcggtcccggacgcgcgcgcgtggcccggcggcggcggcgccggcgccgagccgttcctggcgtcgccgccggcgtcgtgggcggtgtgcagcgtgtggaactgcaaggacgcgttccggctcgaggtgcgcggggcgccgcggctgtggcgggcgacggcgcgctcggcgactggaccaaggcgc

SEQ ID NO: 142520 - DNA, 500 bp, Zea Mays
gatgggacgcgtggtgtagccgtggccgcgcctgaggaggatgtcggtggaggcggagaagaggacggcggcggcggcggcgtcgatttctctggcggcgccgaccgagttaggggtccggatctcagcagcatgagtgcctcctcctcctgggccatatgagccgcctcctgcttgggtcttgtcttgcaatcacgggcctagtggcctgtcttaccgcacttcctacactggtcgcggcccagcttgtggccaggtcccgtgccagttccaccgctcgacgcaggcgcgccgcggcgtggacgccgccgccggtcaccggatttagacgtgccagcgtccactcccttcttctccttccaccgcgcctcccactgctcctccgttaggtacagtttaccccccatcgacggtggaggtgcatcgtcagcatcctcggccgctttcagccggccggtgatgtcctctaccgtgagtgtcgacacatccagtagagtctc

SEQ ID NO: 142521 - DNA, 729 bp, Zea Mays
tccgatcaaacaagcacttcatcatcactctcaaatacaaccagctacatacagtttacaagtatatatattccctttcttgccgctctccatttgtaaaccatggcgtcccaggccatcgagagccaccgcgccggtgcagaggtctgcaccggagacgccgcatgcaggaagaagtccattgagctgctggaggagctgggccttcccaagggcctgcttcctatggaggacatccaggagttcggatacaaccgtgacacggggttcatgtggctggtgcaggggaagaagaaggtcgagcacaccttcaagaagatcaagcagacggtgtcgtacgccgccgaggtgacggcgttcactgagaagggtaagctgaggaagatcaccggcgtcaagaccaaggagctgatgctctggcttagcgtcgtggaggtgtacgtccccgaggcctcgcccgagaaggtcaccttcaagactgggaccggcctctcggacagtttcgatgccgctgcatttgctcttggcgaatgaggaatcaacctaaatgatgtattgatgtgtacgagaaaaaaaatattaaaacatcagtgcttaaggctaaaaaacatgctccatgagcttatatgatcttcttgataccggaatctgtataattgcttgttgttttatttttttcctttcccctttcttatatatccttattgaaatataaaccgaaagtattgt

SEQ ID NO: 142522 - DNA, 236 bp, Zea Mays
atcatgaactcgttgttcattacatagattttggatcatgatatcattaatcattatgatacttattgattatgagaagataattatattggagatgaaacccgcgggtaacccatgggtacccgttaacccgatgggtacgggtttgggcaaaatctcaaacccgtcacgggtacggattttttaatgggcatagatatttttcacgggtacgggtttgggacggcaaaacccag

SEQ ID NO: 142523 - DNA, 549 bp, Zea Mays
agcaatggccctggtggcgtctgcggtggtgcgcgtgccagcggatatggtgcatcgcagcggctgctgctagggatggccgatgggaggtgcgctggtgcggcgcgaggtgctgtcgtcgctcaaccaggaccgtgggcctagtcggaggtggtggcagtcggcgcagctttgcggttgttgtggcagccggcgtgtcgatgaccctctagatgggtatgtgtgggttgtctgggcagcggtggcggcggaagtggttgctttgtctcgggttcctgaccggacgttgtgctgggggttttcttgggcgaaagctttggcgacggcaacgcccatgggcgctgcttcccccattgagggcgtcggctccccagcactatcttctgtgggcgaaaccctggtccatctcggaccggcgacggtggcgtccccgacgtcactcccttcctgaaggcgtcgctactgaagtttgtctcggccacgtcgtagccttcggtggttgctttcgtctttcgggtcccgatttgcgtgtggaggtgggggcttgca

SEQ ID NO: 142524 - DNA, 560 bp, Zea Mays
agccgccgcctccctcacgtctctccctcacctcacgtctctctctccctcacgtctccctctctcctctctgttttctctctcccttgctttttctctctcacgcacaagcaggacaggcagcaggcggccgagcgcccgccccaccgcgacgccgcacaggccccgccctgcgcgagcagcgcgctgccgcgccagcccaccgcgatgccgagcgcgcccgacgaccaaacgccgcgaaccgtccatttgaagtctgcggcaccccatgacctccctggcagactcttcttctcccctccttctctctataaatggggacagcagagctctctcttctctcctgcctacccaagcgccccatctctctagctcaccattgcactgctcgacgccgtcgttcgttgctgttcgccggagttcgccgctcgttgccggagcccgtggagttcgccggagtgtgccgttcgtcgccggagttcaccggagccgcgtactagctgtccgtagtcgagccccgctctccgtcgatccgtccccgtcacacgcacgaacccgag

SEQ ID NO: 142525 - DNA, 104 bp, Zea Mays
taagaactgtgaaaaaaactcactctgtagtctgtattctatgcttcatgtcaaaactccaaggagagcaagggaatatataagaacaattgggctcaagaagc

SEQ ID NO: 142526 - DNA, 1653 bp, Zea Mays
aaaatatatgcctctaactcatgtgtcattatgtagatagacacttacactacagatatgaaaatgtagcacacttcagaattgactctgctgtaacctatgacatcctaccccaaagaagtgaataaaaattatttatcttcctgcataaaccagaaaatgataaaattaactagatgtggttccatctttcatacaacgcttcctcttggcacctgtattttttcgctctcgaatctcacaagcatggacatagctgtagtaggggggtatctgagatctccatactaggacctcaaattttccatttttcttaatgcttccatagaacacatcttgtaatcttatctctggaacctcctcgtggggagagcggtgatactgatgacaaattatgaaatcttcagaaggtgaagccattcttccaagctgaacaggttcgtttttgtttagaagttcaaaaggatgcacaccgaatttgcagatatgcttctggatgaaccctctcaagaagctcagcaccttacaccagaattgtatgctaaaattgtccctcaacaaattagaggtagtatatgcactattgattgaacgaatctgcagtctggctatctccatggccagctgagcaagcctagggtgcatctcgggatccgtgcttccaaatgtaagtgtcttgaagaaataccagtaagcctcaggggacaggtgcttcagagttagagctggtgccattccaaactttacgatcttgtctgaacagcttgtgactatgattttactaccactaagaaagctctgtctggaagcacggtaaaacttattccaggcatcttcacagagattgccatatagttcaatcacaactagaaatctcttgcctttcttaaagtttgacaaaaaaagctgtcgtttcattgcacatccctgtctcaaagttagctcatcatccgtaaaatcagagtcatgcagccacaagatttctgagaaataatcacggactctttcgtccttgcaaacatgagcgattagtgtactcttaccgactctatgtggaccaacaactggcaggacgtccaattcttcagaactatgaggttttgtgtgcaaaaggaaattaatgacaagttgtgcttccatctggcgaccaaacatgcagttacccagaaggatatgcttgttgtatggctggcgatacaggcgagggtagctcatcaagaacatgaccaactcattcatatcaacaatcatggagctcaatttgtcaagtgcctcttgtagttgttcctgaaactgtacagttggaccaaagaaatagagatcctttgcacagggtaccttggataggcgcacaaagcgcctaacagctggattgccatcttctccatagtgaggctggtacctgaatgcatcaagtgtgtaatagcctcggtgcatggcgtccctcagcacgcccagctgcaggagaatgacttgatttgtgatgtgctgtcccatggcctcctcaatgatgacctgtgctcggagaagagccctttgtaggctttcctccatattcacctttgacaacttgttgattatcaaatttattgttaggcaatagaatatgccttctgtggatatcctagctgctatagatagcagatataaatc

SEQ ID NO: 142527 - DNA, 81 bp, Zea Mays
cttcgaaccttggaaaagactttggaaatcgtgggctcctcctaagtgcaagacctttttatggttagccatgcataataa

SEQ ID NO: 142528 - DNA, 551 bp, Zea Mays
gtgttcttgcgcgagagaactccgacgcggctgcggccgtaactgcgtggctactggagctcgcggccgacaacgactccacggcgctcggggacctcctcgcggtacacccgtcacttgccgacgagcccacgccatggtactccccggcgcgcggcgcggagcctatgaccccgctcatggtcgcagcggcgtacggatccgtggcctgcatcgatgtcctactgtcgccgctccacctggtcgatcccaaccgcgcctcaccgtcgtccctctccaccgcgctccacctcgcagccgccggcgccgcctccgctgcgccggctgcggtatcccgtctcctagctgctggcgccgaccccacgctgctcgaccatctccatcgccggtcgtctgacctcgtcgccctcccacccaactcgctcccgcttaagaaccacctcctctccctcttcggagggcgcaaggagtggccgccggatccctccctccccgacatcaagaacggtgcctacgcctccgacgacttccgtatgtactccttcaaggtg

SEQ ID NO: 142529 - DNA, 1598 bp, Zea Mays
tccatctttcatacaacgcttcctcttggcacctgtattttttcgctctcgattctcacaagcatggacatagctgtagtaggggggtatctgagatctccatactaggacctcaaattttccattttttcttaatgcttccatagaacacatcttgtaatcttatctctggaacctcctcgtggggagagcggtgatactgatgacaaattatgaaatcttcagaaggtgaagtcattcttccaagctgaacaggttcgtttttgcttagaagatcaaaaggatgcacgccgaatttggagatatgcgcctgggtgacgtgaagctcagcaccttacacaagaagtgtatgtcaaaattgtccctcaacaaataagagatggtatgtgcactattgattgaaccaatctgcagtctggctatctccatggccagctgagcaagcctagggtgcatctcaggatcaatgcttccaaatgtaagtgtcctgaagacataccagtaggcctcatgagacaggtgcttcagagttagagctggtgccgttccaaactttacgatcttgtctgaacagcttgtgactatgattttactaccactaagaaagctctgtctggaagaacggtaaaacttattcctggcatcttcacagagattcccatatagttcaatcacaactagaaatctcttgcctttcttaaagtttgacaaaaaaaactgtcgtttcattgcacatccctgtctcaaagttagctcatcatccgtaaaatcagagtcatgcagccacaagatttctgagaaataatcacggactctttcgtccttgcaaacatgagcgattagtgtactcttaccgactctatgtggaccaacaactggcaggacgtccaattcttcagaactatgaggttttgtgtgcaaaaggaaattaatgacaagttgtgcttccatctggcgaccaaacatgcagttacccagaaggatatgcttgttgtatggctggcgatacaggcgagggtagctcatcaagaacatgaccaactcattcatatcaacaatcatggagctcaatttgtcaagtgcctcttgtagttgttcctgaaactgtacagttggaccggagaaatagagatcctttgcacagggtaccttggataggcgcacaaagcgcctaacagctggattgccatcttctccatagtgaggctggtacctgaatgcatcaagtgcgtaatagcctcggtgcatggcgtccctcagcacgcccagctgcaggagaatgacttgatttgtgatgtgccgtcccatggcctcctcaatgatgacctgtgctcggagaagagccctttgtaggctttcctccatattcacctttgacaacttgttgatgatcaaatttatggatcgagatatcagctcacccaggactgcagaaaggaaactttccatttgggagttctctcttgctcctgaggagacaacgctgtaagaagggtaagaactatgaaaaaactcactctgtagtctgtattctatgcttcatgtcaaaactccaaggagagcaagggaatatataagaacaattgggctcaagaagc

SEQ ID NO: 142530 - DNA, 2627 bp, Zea Mays
gtcactgacttgtgggcccagaggccaaagcgcgcactgcccatcaccgtctcctgaatctcagaaccttatcccctcctttgctccatccctctcctctcttcctcggcgacctccacgccggtctagagccggcagcgctgcggcggagcaccaaccgagctccgatcccaccccgctcccaaccgcgcggccctgtccatggcgcgcgcggtgcggcggcgagcccccatgcattcccgccgccggagcgcggcctgctaagcgacgacaattcctctccctctcctaaatccactcccccacgtgtcttcatgggccctccggcctacaccgcctccccctgcacggggtctgccctcttctccaacacccgagcgccgccgccgccaccgcggcttcttatccgatggggcccggggccgccgtcggccgtggggaggcacggaggccgcgtaactccgtcgcaggagaggcgcggccccgccccgtcgcaggagaggcgccgacccgctccgtctcaggagaggcgccgccccacggagtcttcgtcccagtctcaccagctccaggaacggaagcggcactggaaggcgggggagttcccggggaccgctgccgatggaggaggtggcggcggaaggcgccccgcactagggaaccggcattcgaaggccggggagtttcccgggacggacggcgtccgccccgcccccgcgccgccgcaggggaagcggcactggaaggccggcgagttcccgggcgccgccgccgcccccggttcggggacgccgaggactcccctcaagaacgtcaagaagcggctggacgcccgcgcggacgccaaggcgtgggcgtgcaccgtcaccgaggccctcgcggaccgcgtcagctccaagaactggcaagaggcgctccaggtctttgagatgctcaaggagcagccgttctaccatcccaaagagggcacctacatgaagctcatcgtgctgctgggccggtcagggcagccgacccgtgcacaccaactcttcgacgagatgttgcagcaaggatgccagcccacccccgagctctacaccgccttgatcggggcctactgccgaagcggcctactggacgaggcactccagctcctcaacgacatgaagagctcccctttatgccagcctgacgtctacacctacagcaccatcatcaaggcctgcattgacgctgccaggttcgacctcaccgacgccatgtacaaagacatggcggagcgctccatatcacccaacacggtcacacagaacatcgtcctcagcggctacgggaaggccgggcggttggacgacatggagcgagtgctctccgacatgctcgacagcgtgtcatgcaaaccggacgtttggaccatgaacatcatcctcagcctcttcgggaaccggggcgaggttgaactgatggagagatggtacgagaagttccgaggctacggggtcgagccggagacccgcacgctgaacatcctgattggcgcctacgggaagcggcggatgtatgacaagatgtccgcagtcatggagcacatgcgcaagctcgcgttcccgtggacgaccgcgacgtacaacaacgtgatcgaagcatttgctgaggccggcgacgccgggaacatggagcacgcgttcaaccagatgcgttccgagggcatgaggccggacactaagaccttctgctgcctgatcgacgggttcagcagggcaggccagttccataaggtggtgggcatggtgaagctcgccgagaggctcgacgtgcccgtgaacacgcctttccacaatgctgttcttggcgcgtgcgctagagcggacgatctcgtggagatggagagggtgttcaggcgcatgaagcatacgcagtgcgagcctgatgcttcgacgtactctatcttggtggaggcttatcgcaaggagggaatgaccgacaagatctatgctctgcatcaggagaacccggctctggttccagctgattttgtcatggtttgaatgacccagtgactgagtcacggtcctgaaattttagagcttggttgcattggttgagaatcttcttgctatccaccaaacagagtggcggccattcttcaactccattttttttgtctgttggtatgcagagctagtatagacgtctcctccaactcaaggggggtgaaagtgcgtcagcaacgtacgggtattcatctagtttgatatattccaagaaaaacaaagaccaatgcaggagaagatggacaatgtgacacagaataatctctggaaaatagatacctggaagcttcctcgtcaaacaagactattatgaagactacaaaagccgcccgcccgttcgacagcgagctatatatgagctgtctggaacacgatttcccccctctgttcctgcgtttttcatgcacgaataaatctgagctgatttctgtgaaatttatatgcgaaccccttgaaattcatgtgttccaaacacggcctaaaagaactttgtctagagaaaccctctaggtaacacagacgcgcaaaccttcaagtatcgatctcagagaggacatgcagaagatgatttgcagtttgctgcggggtagg

SEQ ID NO: 142531 - DNA, 2116 bp, Zea Mays
tacgggactggacccctagaacaaccaccacactctcctccctccctccccgcccacactccaccacccgcgccccgccgcccgccccgccgccgcctcctacttcgcctcggccgcctcggatccggaccgagcgccggccatggcgctcgccttcgacgagttcgggcgccccttcatcatcctgcgggagcaggagaagaagacgcgcctgcgggggctcgacgcgcagaaggccaacatcggcgcgggcaaggccgtcgcgcggatcctccgcacctcgctcggccccaagggcgcggacaagatgctccagtcccccgacggcgacgtcatcatcacaaatgatggggcgaccatcctggagcagatggatgttgacaaccagatcgcaaagctgatggtggagctgtcccgtagtcaagactacgaaatcggggatggtaccaccggtgtggtagtcatggcaggggcgctccttgagcaggccgagaagcttttagaacgtggtattcaccccattagggttgctgaaggctatgagatggcatcaaaggtagcttttgatcacctagaacgaatctccgaaaagtttgagttcagtgcagacaacattgagcccctggttcagacatgcatgacaactctatcctcaaagattgttaaccgttgcaagcgggcattggcagagattgctgtcaaagcagtacttgcggttgcagatttggagaggaaggatgttaacttggatttaattaaagtagaaggcaaggttggtgggaagctggaggacaccgagcttgtatatggaattattgttgacaaagatatgagccatccacaaatgccaaagagaattgaggatgctaagattgccatcctgacatgcccatttgagccaccgaagcctaagaccaagcataaggttgacattgatactgtcgagaaattccagacactgcgtgagcaagagcagaaatacttcgatgaaatggttcagaagtgcaaagatgctggtgcaaccctggttatttgtcagtggggttttgatgatgaagccaatcatttgttgatgcatagaaatctgccagctgtcagatgggttggtggtgttgaattggaattgattgccattgcaacaggaggacgaattgttccgagattccaagagttgagtcctgaaaagcttgggaaggctggattagtcagagagaaatcattcggaacaacaaaggataggatgctttacattgagcagtgtgccaattccagagctgtaactatcttcattcgtggtggaaataaaatgatgattgaggagaccaagcgcagtcttcatgatgctctttgtgtggcaaggaatctgatccggaacaactcaatcgtgtacggcggtggctcagcagagatatcttgctcaattgctgttgaaactgctgcagatcggcaccctggagttgagcagtacgctatcaggtcattcgctgatgcattagacgctgttccactggccttggctgaaaacagtggtttgtcgccaattgataccttgacggcggtaaaagctcagcaagttaaggagagcaacccccactgcggcatagactgcaacgatgtaggcaccaacgacatgaaagagcagaacgtctttgagaccctgattggcaagcagcagcagatcctgctggccactcaggtggtgaagatgatcctgaagatcgacgacgtcatctcaccgtccgagtactgatgaagcctgaaggaaggaggaaaaaaaaagagaggaacaggtggctatgctggatgagagtttagtaggcagcattgctgatgtgttgattggtttactccttgttcaggcgtgctccttgtatcttatgagctgcctagcacctttttgtgtgaggggttgtttgtattgcacgatattgcatcgaggaatacgtatgtacgtgttgtcaagaccctaggcaattctcttcagggctgtgagatggttggggtactgataccttttttttgtattgttttcatttcaccacttagctgaagctgtcctttttgttttatgaatgctgcaatagtttggcgccctcactctgtttggtctgaacaa

SEQ ID NO: 142532 - DNA, 2213 bp, Zea Mays
gtctgtgtggtgtgatgagtgtgtgtgtttgatccccgagacagacaggttgtccgacgctgtccctccctgtcccgctcccggcggccggtgccggacgcggagacgcctctctggctccgctcctcgccaccgcccccgccgctttgctttaccacctcctctcctgtgctgtgcattcatcaaagctccgaacgaatgcgcgtttctctttccgcatgcatttgattaatctgcaacacataccagtccagctataaagcctgcctcgcctcgtcttccccacactccactccactgcctgctggcggctgctgcttccttccagatctaggggatcaagcaaccagccttccccgcgccgccagcaatggcggcacccccgcccgcgccgttcctcctcctgctcgccgtggcagcagcgtcgctcgccggcgccgacgacccttaccgctacttcacctggaccgtcacctacgggccaatcagcccgctcggcaccacgcagcagggcatcctgatcaacggccagttcccgggcccgcgcatcgactgcgtgacgaacgacaacctggtggtgaacgtggtcaacagcctggacgagccgttcctgctcacctggaacggcgtcaagcagcgcaagaactcgtggcaggacggggtagcgggcaccaactgcggcatcccgccgggcgccaactacacgtaccgcttccaggccaaggaccagatcggaaccttcttctacttcccgtccctggccctgcaccgcgccgcgggcggcttcggcgcgctcaacgtgtaccagcggcccgccatcccggtgccctacccgccgccggccggggacttcacgctgctcgtcggcgactggtacgccgccgcgtccccgcacgcggacctccggcgcgcgctggacgacggcggcggcggagcgctcccgccgcccgccgcgctgctcatcaacggcgccgccgcgtccggggccgcgccgttcgtcggcgcccaaggcgggacgtacctgttccgggtgtccaacatcgggctccgcgcctccgtcaacgtccgggtgcagggccacgcgctgcggctggtggaggtggagggcacccacccggtgcagagcgcctacgactcgctcgacgtccacgcgggccagtcgctggcgttcctcgtcacgctggaccaggcgccgctggactacgccgtggtggcgtccacgcgcttcgccgccgccgagctcacggccgtcgccacgctgcattacgcgggggccacggcccgcgcgcccggcccgctgccgccggccccgccgcccggctacggctggtcgctgggccaggcgcggtcgttccggtggaacctcacggccagcgcggcgcgccccaacccgcagggctccttccactacggcgccatcccgacgtccaggacgctggtgctggccagctccgcttccctcgacggcgccgggcgtaggcgctgcgccgtcaacgccgtgtccttcgtcgtgcccgacacgccgctcaagctcgccgacagatacgacatcgccggcgtcatcgactgggacggcctccccgcgcggctcgacggcgccgcggcggtgccgcgcgccgggacgcccgtgctcaggctcggcctgcacgagttcgtggaggtggtgttccagaacacggaggaggagctgcagtcgtggcacctcgatggatacgacttctgggttgtagggtacggcgatggccagtggaatgagacgcagcggcagacgtacaacttggtggacgcgcaggcaagacacaccgttcaggtgtaccccaacgggtggtcggcgatcctggtgtcgctggacaaccaggggatgtggaacctgcggtcggcgatgtgggaccggcagtacctcgggcagcagctctacctcagggtgtggacgccggagcagagcctctccaacgagtacgccatccccgccaacgccatcctctgcgggaaggccgccgccctcccacactgacacgacgacgttcagcagccatactactgcctgctccattcgaccaaccaagtgaaagaagaagaggagaatctatttttgttgctgcaagaattaatgtgaaaaaaaacacaattactgccactggtatacgtatctcctaactcctaattgtccagcaacagttacagcgtttttttatgcaacactgccagacaac

SEQ ID NO: 142533 - DNA, 1802 bp, Zea Mays
acgatggagatgacgaccagtggcgctggtggcgtgacaaagctggacgacgacgactatccatcggcggcggcggcagaccggtgtccgccggggacagagaagaagatgtgccgccgggttttgctcgtgggtagcctggtgacgctgcccctcctcgcgttcttcgtcttcagccgagagaacgcgtcagtggcctggttacaggtcgctattgcccagctcaccgccacgaacgacgacgacggagcagcaggcacgcgggtttatggagggcgacgctcctcatggccacgagcccacgacgagttcctcggcgggctgctcgcgccaggcatggaccggcggtcgtgccggagccggtaccagtcgtcgcggtactacaagcacttccccttcgcgccgtcgccgcacctcttgcagaagctgcgcgggtacgaggctcggcacaggcggtgcgcccccggcacgccgctctacgccaaggccgtcgagcagctccggtctggccacagcgccgagggaggcacggagtgcagctacgtcgtgtggctccccttcgacggcctcggcaaccgcatgctgtccatggtgagcggcttcctctacgcgctgctgacgggccgcgtcctcctcgccgcgctgcccccggactcctccgacctcttctgcgagccgttcccgggcgcgacgtggcggctcccggcggaggacttccccgtcgccaacctgttcggggtcgggcaggacatggagcggtcgtacacgaagctcgttgacggcatggtggccgcgaacgcgacggcgggcgtggcaccgtcgtacgtgtacctgagcctagggtggctgctcagggacggtcttttcttctgcggcgagcaccagctcgcgctccgcagggtcgactggctgctgctgtacagcgacctctacttcgcgccgtcgctgtacgcagtggccgagttccaggacgagctccggcggctgttcccggagaaggagagcgtgcaccacctcctgtcccggtatctgctccacccagccaaccccgtgtggagcatggtcaccaggtactaccgcgcctacctggctccggcggcgagaaggatcggcgtgcagatcaggatgttcgaccacgcctccatcccggctgacgacatgtacggccagatcctcaactgctcccggcaggagcacgtactcccggaaactgacgacgttggcgaggctgcgcctagccctacagcgtcgagcggcggctccaaaaaccccaccacggccatcttcgtcgcgtcgctgtacgctgactactacaggcggctgacgtcgaggtactccgcggcgaagggcggcggcgcgacgaggagggtgggcgtgttccagcggacgcacgaggagcggcaggcgacggagagcctggcgcacaaccagagggcgctggcggagatctacctgctcagcttctgcgaggagctggtgacgtccgggctgtccacgttcgggtacgtgagcagcggcctcgcgggcattcggccggcgatcctgctcaccgcgtttgaccacgttgtccccgagacgccgtgccggcgggctgcgtccatcgagccgtgcaacctcacgccgccccggggcgtggagtgcctgagcaggcccgcggacaaggatgacctggcacgccacgtcagggtgtgcgaggatttcaaggacggggtcaagttctttgactagcgggcgtggcgctgttactttattttccatgcattttcctgcttgctatagctacggtagcgtgtgttgattga

SEQ ID NO: 142534 - DNA, 1486 bp, Zea Mays
atccgccgcccgcgcacttcttccttcgggcacacaggacaccaccgtcgacggattcatcgcgacgatggggctcgacgtcatggagatcgggatgggcgccgatttgagcctggatctgaggcacttcgcctccaaggccgtgaggcagagcaaggacgacacgccggcgccggacatggacgcatgcatccgccgcctcgaggaggagcggggtaagatcgagatgttcaagcgggacctcccgctctgcgcgcgcctcctcgccgacgtaattgatgtcatgaaggaggaggcggggaagaagaagacgacgacgaggaggaggagtgatcgcaggctggcgtctgcggcagctgatgatgaggaggaggaggcggacggcgccaccgcggacaagagcaagtggatgagcacggcgcagctctggacgggcgattccgggcgggaggacgcggaatcagagaagcaagacaaggggcggtgctcgccggaggccaggtcccgcggcgctctcttaccgttcaaggctgatgtgggctctggcgcgccggcgttcgcgccgctcttcttgagaacggacgacaaggctgcggctgcgcgcgtcggggtgccggatctgtcgtccttgctgtcgccgccggcgaccatgcctcctgcggacgccggcgccgaggagagccgtcgccaggttgtgggatttgcgcaagctgcggccagggcggctgccatggcgccgtctgcccctgcgcttgggctccagtcgcagcagcagcagcagcagcagcagcaggcaaggaaggctcggcgttgctggtcgacggagctgcatcgcaagttcgtcgccgccttggatcagctcggtggcccccaagttgccacgccgaagcaaatcagggagctgatgaaggtggatgggctgacaaacgacgaagtgaaaagccatcttcagaaataccggctgcacaaccgcagggcgcctggatccggcgtggtgcgccagccgatcgtgctcgtgggagggctgtggattccccaggagcaaggcagccctcagtctggatctccccacggccccctccaccacctgtccacctcggtggccgccgtctcgtccgccgccaccgccagctgcgaggaggaagacggccggtccgagagctatggctggaaatgatgaagaggctgctgctgctgctgctgcgccaccaatgtgtgttcactgtttagagaggggagggaggtttcttggcatggtggggatcgccatgggccatggcggaggccaccagttgcagcttcaggaatcgggaggggaattgagtgtagtgtagctgtctgtacacatacatacatacatacagtgagatgggatgagatgagagcgggccttgagcgctcgagatcagaactgatggtgcttcgtcgtcgggtttgtacatcccaaagagaaagagatactagctacagttttgcggcttgttaa

SEQ ID NO: 142535 - DNA, 216 bp, Zea Mays
atggtggcgggcgacgacaaggtatccggcgcgaccacgaccacgaccgcgccgccgctcggccacaaggggaacccagtggaggtggacaatgaggacttgttgacatggtcgccagcacgcaagaagatgagggcggcgggcgcgggcgccgagagctctgaagcagcgtcgacggaggctgttaaagttttcatcatgtttcacaacacataa

SEQ ID NO: 142536 - DNA, 228 bp, Zea Mays
atggcgcgggcggaacgacgatatagggacgaagtggatggaattgtggatgttggagatgtagccctgcaaaggtggcgagcggtggaactcacggaatctacggcggaagacggggccggtgatgacgcggtgccagtgcctactgacgagggcggcacgagcgaggctggcggggtcatccgggggaatgcggaggaggaactcctcgacgaggtcttcaattag

SEQ ID NO: 142537 - DNA, 1767 bp, Zea Mays
cctcaatcggtcctaatggcggcggagatggtcggctccgtggttgcccaggagacggtgagccagatcctctccggcctggttcagaggtacgcggaatcgagcgacgcaacccgaaacctcgagaggctagagatggcgcacatcaggctggaggccgccctggacgcgtccgacaggtggcagatcgccgacgcgtccctgcttcgctggcgcaagaagctgaggcgcgtcgctcaggagtgccacgacgtgctgcacaggtgcaggcagcagcaaggcgtggcgcaagcgcaagcgcaagagccggcgacgccgagctcctccctctcccccctggccgccctgcccacccgcatcgcgcgcgcgaccaagtcgctcatcttctccgccttcgtcggcgacgcaggcgcgccgagcaggtccacggtgcaacggttcgagtggttcgcggacggggccggcgagttcctgcgctacgtggaggtcggcggcggcgcggcgccgcgctgccacgtgccgctcagacggtctctcaccaggcacctcttcgcgggcatggagctgctgctgcagcacaagatcgtctggggaggaggccgcgacgagtgcccgtcctacctgctgtggctggtcccttccgtcacgcccgaccacgggatcgaggcctgcctcaagttcatccacagggaccacagtgcgcccgagaacaacttctttcttggcgccatgctgcagatatcggagagcacggacgtcgtcgggaccgtggtgaactgcctgcggctgttccctccgtgcttccagccgacgatcgaggccatcaagaaggagctcacccagctccccacgcaggacttctcgtgggtgccgtacgtcgatctgtggcacaggaagcactgggacaacctccatggcttctgcacccagtggttccgcccggacccgttgtgctgcaagaagcagcagcaccagcagcaaggtccgaacggtagtagtaggccttcttggtgcagcagcggtgacgacccagacatggttgggatcccggatgtttctctggattcggtcattctaatgcacctggagtgccaagtctcggtgccctcggagtacaacggtgcttacaggtacagcaagcagaaggccaccacggcgtcgccgccgtatcgacgacgatgcagcagcagaactagtccgactccgaccacgcaggacagcgagtactccccatgccgccgtctgaaggccgggctccttttcacgccccatggctgtacgaagcacaggctccccgaagagaagagctccgcggtggtcacggtctacggcgaagagcaacgctgcgtgcacacggacattaccctggaccagctgaacgagatcatgctgccaaaggcggcagactacttctaccggaaccccgaggcgacggcctgccagatgctttggaagtctagacatgggaccgagtacatcgagttcgagaagccaaggacggaggaggaggaggaggaaccgccgtgtgcgaggagggcgatctgtaggggaggcagtaggaagaggaagctgcagctgcaggtgcagcaagatcaggtgcaggtgctcgggagctggaaccgcaaggtggcttgcttcctcaactcgtgggttgcccacgcgcctgtccgcctgcgaggtctgatcctggactggattcggagaggcaaggaaagtcagctaccagcgccaccgccggtgcaccagctggaaatctcaaccatgtga

SEQ ID NO: 142538 - DNA, 545 bp, Zea Mays
atgctaaaaccatgtcagcacacttgatttgttcctcgaacacccccgtttcccagtcttgtgtaccccattccccttgtccacgcacgctactacatgatttagaatttctggtgtagccgcagagctgctaccttctcgaccaagaagtcaagaacatacacggcgcctttccaaagcatctggtggactgccgcttcaccgttctcgcggaagtggtctaccgcctttggcagcatcatctcttccggtcgtcccaaggtgaagtctgcgtgcaagaagtgctgccctcgctgtagatcgccggaattgtatccacaggtggatgtatactagaacataaggcgcctttatgggcaccctatcataacctaatttctcatgcaggcacatgtgtacatcatacaaaagaaacagaaaaaaagtgtcacaaaatgtaatacctttttcatagatcccaatatgtttctatagtccatgtttcatcggacataggacatggcaataaagaaccatatgttccctgaaaaagagagaacaccaaa

SEQ ID NO: 142539 - DNA, 1065 bp, Zea Mays
atggatccgccgggctccaaccaagatggagtcgtaaacatgacaagggcaatgcaggctctgtccccttggctaaagcacccaagggcgacgatcaccaaggtggaaggtctggtgctagcggccgctgcgctgctgcttctccagctcttcttcggcatctacaagcggcggtgtcgcaactccttcctcagtactgtcctgcgggcgctttccaaacttatggaggctcttatcatctacacccttggtacgatgcagtcctccccgatcaagaactcgtcgtatcccatctgggctgtttttctcgtcatggcttcggcgggcaccaccgccgtacagcactatgatttctgtgacggcttctacagcaagtacatggagggtggactcgacctaattaagtacggcttctacatgatcatgttcaacctgctcattgatccaaataattataccttgaagacagccctgggcctgaagcggcatctcaacaaatccagagcaagttcaagatgtgtcggcgcactcttttatatcgctttagtgacaaaagtccttggatcctgtggtctagcacttgtgggatacaccatgcagaagaggagtcctttcatcccaaccaagatccgtcgtcgcacacaggccgcaggcgcagaggcagagacggaggagggagctgcaaataacgaacgcacagagcttttcagattggattctacaactaacatttacgacgagatgaaggatttacaagggaccggagaggaagacgacccccggaagatcttccagaaaggcatcaagctcggtaagcagctggggaggatggaggatggtgatcactgggaggtgttgcaagatttctgggccaagacaaccatccatgccgctaagtcgcactacaccaccaagcaacacatgcagcaccttgaaagcggcggggagttcctcacgcacatctgggctctgctcgctcatgcaggcattctcaacctgaatgtgggcaatgaggatcacgaggaccaggctaatctaggctctggaccctcagctgttgtatga

SEQ ID NO: 142540 - DNA, 1173 bp, Zea Mays
atggaggctctgtccccttggctgaagcacccaaggaggacgatcgccagggtggaaggtctgatgctagcggccgctgtgctgctgctcctccaggtcttcttcggcttctacaggcgacggtggtggcgtagctccttcctcagtactgccctgcgggcgtcttccaagattatggaggctctcatcatctacacccttggtacgatgcagtcctccccgatcaagaacttgtcgtatcccgtctgggctgtttttctcgtcatggcctcagcgggcaccaccgccgtacagcattatgagttctgtgacagcttcaacagcaagtacatggagggtatagtcgacatggctaagtacggcttctacatgactatgttcaatctgctcatcgatccaaatacttataccttcaaggcagccttggacctgcagcggcggcatgtcaagaatcccagagcaagttcaagatgtgtcgccgccctcttttctctcgctttatccacaaaggccttggaatcctgtggtctagcatttctgggatacaccaagcagaagtcgggtcttttcatctcaaacaagttccgtcgtcgcacacaggccgcagagacgacggagggaactgcagcagataatggtacgagtgacgacgactctgaccctcagagcatgaagggctacgagtatgcagtctgctaccgtgtgtttgcaggtggacaaattaccgtcgaccagatatgggatcgtctggatggcaactcagcttctctgaaagacctgtgcctgtcctatgcattgttcgtggagctcaagaacagattggattctacaactaacatttacgataagatgaaggatttacaagggaccggagaggaagacgacccccggaagatcttccacaaaggcgtcaagctcggtaagcagctggggaggatggaggatggtgatcactgggaggtgctgcaagatttctgggccaagacaaccatccatgccgctaagtcgcactacaccaccaagcaacacatgcagcaccttgaaagtggcggggagttcctcacgcacatctgggctctgctcgctcatgcaggcattctcaacctgaatgtggacaatgaggatcaggaggataaggctaatctaggctctggaccctcagctgttgtatga

SEQ ID NO: 142541 - DNA, 705 bp, Zea Mays
atgaagctggtgtggtgccccgacacggcctccaaggcctacatcgacggcgtccgcgcgatcgccgccgccgccgactactccgacggcggcggctcggccgagctggtcgccgccatggccggcggatggaacgcccagctcatcgtcgacgccccggccgactccgctccgcctccgccttcagcgcctagccctaataacaacccgcccgccacgagcctcgcgctcgccgccgccgcgcgccacacgggcggccgctacgcccgcctcgacgcccatccggacgagccggcggcggcggccaaggccgccatggcgcggctggagggcgtggacctgctcgtgctggacgcgcggcgccgggacgcggcggccgtgctcagggcggccaggccggggcccaggggcatggtcgtcgtgctgcgccacgccgacaacaccgccgcatccgcctccgccgcgccgttggggaggatggcggccgggaccaggctcgtgcgcgcagcctacctccccatcggcgccggcggcctcgaggtgctgcacgtcggggtcggcgagggccccagcctgccgacgacgaccacgcagcagcacgaccacagcagcaggaggaggaggcacggccccggagggcggtggatccgacacgtcaaccaccgtaccggcgaggagcacgtcttccggcgccagtagcagctc

SEQ ID NO: 142542 - DNA, 657 bp, Zea Mays
tctgcaactccgccgccgccgtatctcacgacccacctggtcggcgagatcctggtccgcatcccgccggacgatcccgcgacactcgtgcgtgcctcccttgtctgcaagccctggcgccgcctgctctgcgaccgcgccttccgccgccgctacggcgccttccaccgagcgccgccccttctcggctacatccacaaccacagcatcagcgggcctcgcttcgtctccaccgccacaccctcttcggtgccgctgaaggcgttcggcggctgcagcaacaacggctggcgcgtcatcgactgccgccatggccgcgtcctctttgaggccgtggacccctaccgcaaccttgccgtatgggatagcggaacctgcgagaagaagctgctgccggaggccccgttcccaggatgacaattcttcaatgcggcggtgctctgtgctgcgcgcggctgtgaccacctcgactgccgcggtggtccattcctcgtcgccctcgtggggtacaacgatgtggcgggggccctgcagtcacacctgtactcatcagagtctggctactggtggagttcgtcttctgcccctccgggccctcgtttctctcccgcccgcacgccgagcgtggtcatcggcgatggcatgtatttaatacta

SEQ ID NO: 142543 - DNA, 403 bp, Zea Mays
ctgctccttgacgcggaggccgccctggatggtggatccgaggcgttccatggcctgccccatggcatcaaggcgacatgctgcgccgaggtggaggccaggttgaacgccgtgtactggcggtgtcggagccttgaccgctccatggtgccgctagagatccgcattgtgtccctcgacgccacaactacaacatcaccatgtccggcgtctgcgcgcaagagcagctgtccttgtggcatcttctctggctctgccactctaattttataaattattccttaatttgctgaaagaaagatgatgataagcctttgttatatagaccagaattggttagtcctttgctgatagtagttcgtatgttgattcaagtgtatttttcttatttgtatatattatg

SEQ ID NO: 142544 - DNA, 797 bp, Zea Mays
cggctcgctgtcccactccgtctcctcctgctccgtctcatcccgctcccgctccttctcgtcgtcgtcgtcgtcccagtccagagtcgctcccctcctccggctaagcgcagccttgatgtgtctgcaactggagtatttgtacgagactgcttgatccagataattttattacacttcaggcgtggcttgtgtgttcagactactactgttgaatacagttacggttggtccttgtggccctcaacagtttggatgctgtcatttagcattgaacagagccagagtctggtaacagtttttaatcatgttcttgataggatggatacatccgttaaatgtgtgaccctgcattcagaattcagatcgacacatttgattggttccaattccctgctgctggcttattatttaactttcctttttgcagtttctataatagcagaggcatgcgctaaccagcatttgctaacccaatcaatttgttggcatcattttattgattgaatccatcccgtctcatgattttgcttcgccctgttaacatgtttttattgctgtcgtgggctcttcacaatttaaagttctctcgtatatgaagtcacatagttacatgacgtacattctacttgaacatggttgtttggtatttttttctcatgaattgtaatgtttcttatgttggttctctttatcctgggtgcatttacttatggataatgttgtatgcccaattcgcctggagcatggaaaggacggtcaccttcaccgccccctaaaaagggttcaccttcaaa

SEQ ID NO: 142545 - DNA, 1446 bp, Zea Mays
acgaacacggcactagctggccgcgtgcaccccgcgacgaagccggcgttggccacccaccaccacagcgcacgcgtcgctgtcgcgcgcctggggttttcctagggttttgtttttaccaaccccagccgggggagcgcggaggtggcggcggcggcggagatggacggggaggagattggcctggtcctcgcccgcgcctcggacctccgcaccaggatatcggcctgcgccgctgccgcggcgggggcgccgggtccgcggcgggacgatgaggaggcagcgaagcggttggacgcggcggagggcgatgaggagggagccgaggaagaggaggatgaggaggaggaggtggagagccttgtcggcatcagcgacgcgctcgagtcgctcgagcggcagctcgccgcccttcaggatctccagcaccaacaaagatacgaacgggaaaccatcttgagccagatcgaccgaagccggaggtccctgcttgccaagctcagagagtacaaagggcaggactgcgaggtgatccacgaggctgccgccttcgctggcgagagaatagagcgcgacgacagcctcgtcctgcctccttactcggaccatgtcaccaactcgttcgcgctcgacgacctgtaccctctgagctacatgtccaagcccaagcgcctgcacactcaaccagactccgaggacgacgggactgcgcaggacgacgcgagaaggaacgggcgtgagagcagagataccagggcctcgaaacgcggctcgggaggcggagggggaggaggaggaggaggaggcatcggagccttcatgggatgggtggctaaaacggcggtcatggtggtgggcgccgtctgtgtcatgaaggccgctggatacgagtccgtgacgtggaggaacggcggcgccaggctggacattgcgggtctgttcggtggcggtggtggtaagcaggcggtggcggcgggcggcggagatgagcggcgcgctcctctgcggtgccctcccggcaaagcgatggtggtcgagaacggcagggcgcgttgtgtcgtgaaggaaagggtggaggtgccgttcgacgccgtcctggcaccgccgagttcgaggtacggtttaggctgaagcccactctcccccgctgcgcccgcgcctgtgtgtgtgaatagtagtagtagggtgtagctctatctatgtggtgcgggagttgcttagtagctgctggggaacggttctttgtagaacgtgttgctgggagctttgtttgttaattctgcgtttggtgctgagcattgggcagcctggagatgttgaggctatgtatcatggagaagaataaacccttgtgctctcacactggcgttgtggtgagcagtgagctcttctattatccggcatgtctggcactatatgagccaatcactgtaccattgaaaattc

SEQ ID NO: 142546 - DNA, 876 bp, Zea Mays
ccacaccatcattgggggtcaaagaacgtgcgtgtgcgcagcgaggagcacgaaaatgcgttgctatgctaacccgtcgcttttgttggtcggtgcatcgatcgcgcgcgcagtggctgcgggctttgctgcgctacccgaggacgacgacgaaggcgagccggcgggcgagcagagccgggggcgaggagtggcgagccttcgccgtccgccagccggagccccttctgcgttttgcgctctgctccgggagccactccgatcccgcggtacgggtgtacttcccgaagcggctggcgcagcagctggaggcggcgcgggaggagtacgtccgggccacggcgggggtgcggaaggacgaccgccgggtgctgctgcccaggctgctggacgcctacgcccgggacgccggcctcaccgcggaccgcctcctcgacgccgtgcagcggtgcctcccggagacgctgcggacggcggtgcagcgatgccgccgccgcggagacgggcccggtgccgcgaaggcagtcgtcgagtgggtgccccaccggcggagcttccggtacctgttggccagggacctcgccttcccgcacctcagcctcagctagctataagctgcacgtacgtcgtgaagatgattcctcgtacggtgactagttgaaagattggtagttgtggtggggtgtggatgacttgatagattttggttctagattaatgataatgatgatgattgcacatggtccattaggcacgggcattcttcatcttaatttgcgtgtgtgtgtgctgtaaacagatgacacatcgagcttagcttgtagatatagcaacaaatgaaagagataaactaagtttgtattattgcattgtaca

SEQ ID NO: 142547 - DNA, 2826 bp, Zea Mays
ctggcgcctagtgtgtgtttgtgcgtcttctgccttctgaaggcacgcacgcaccattctgccctcctgctctctccccctcctccttcccactcctgtctctccccgtcctcctctgcttgagccttgagccattcagcaggtccagcaaaattgtgtgagctcgttttctccgaggttccgcaaccacccctgctatctttgcattgcatgcacctggtttcttgatccgttctgcgttttttctttccagttccagtcagtttcattcattcgcaaggtcggtgtctggagagaagaagagaaatggcggcgctagagaggagaggaggccaccacactgctgctttcatcagagcagcgaaggcctccagtcctcctcctcctccagcgaggcagaggcagaggcagaggcgctccaagaggttggtattggttggtcgggcagtgcacggacacgggctcgccggcgccgctctgcagatttcttccttctcgcctcgctaccttctcgcgatgctcacctaacgatcgaggaaaactcttctcttgttggcctggctctgcgtggcggcggcagcggtgccggtttggacgacgacgacgacgacagagatgccagggccgcgccgcgttctccgcagaaggcgtccagacagaccaagctgcaagagcagaaacgcgaggccgagacggaagttcagcggcgcaggaggaggagcgaggcacacaactccctgaggaaagagattcagcagctggagacgcgcctcagggatcagcaggtggtgcgcggcgcactggagaaagcgctggggcctgagcctgagcctgagcccgacgacgacggcgctggtccacgtccactcactctccagaacgagagcccagcgctaaagctgataagggaggttgcgacactggagctggagatcaagcacttggagcactacctgctggcactctaccggaaagcattcgagcagcagcaagcacccaccaccaccaccgcgctgccgccttcagacgatcgccgggacgcggcgcgcaagctgtcggtgagctcacggcccgacgacgagacgcccagggcgagggcccccgtgatcaggggaggcggcggcaacgggaggaggaacggcggcacggccgacgactgctcgccgtcgtcgacgtgcccccggaggacggccgcggactcggacccggccggcctccggagccagtcggcgctgtcgttccgaggcgcgtggtcgtcgtcgtcgtcgacgtcgtccaggatatcgcccacggaggacagcctcgcgcgggcgctgcggtcctgccactcccagcccttctccttcctggagcaaggcgagacgacggcgccgtcaggaggagtggtgagcctggcggactacctcggcacgagcgtggcggaccacatcccggagacccccagcaacctgtcggaggagatggtgcgttgcatggccggggtgtactgcaggctggccgacccgccgctgctggcgcgccaccgcccgtcggcgtcgtcggcgtcggcgtcgctgtcctcggcggcgagcgcggtctccccaacacagtgcctcggcggcggcgacaacaacacgtggagcccgaccagcagcagcagctaccactgcggcaggagagacgccgcccggctagtcatcaacccgttccgcgtcgagggggtcaaggagttgttcagcgggccctacagcgccatggtcgaggtgccggcgatctcccgcgaccgccccaggctcagggaggccgaggacctgctccagacgtacaagctgattctctaccggctggagacggtggatctgaggcggatgacgggcggggagaagctcgcgttctggatcaacgtccacaacgcgctggtcatgcatgcgtacctcaagtatggagtcccgcagcagaaccagctgaagacgacgacatcactgcttgtcaaggcggagtgcaagatcgcggggcgcgccatcaacgcggcggccatccaggggctggttctcgggtgcacggcgcactgctcctccgggcattggctgcgggctttgctgcgctacccgaggacgacgacgaaggcgagccggcgggcgagcagagccgggggcgaggagtggcgagccttcgccgtccgccagccggagccccttctgcgttttgcgctctgctccgggagccactccgatcccgcggtacgggtgtacttcccgaagcggctggcgcagcagctggaggcggcgcgggaggagtacgtccgggccacggcgggggtgcggaaggacgaccgccgggtgctgctgcccaggctgctggacgcctacgcccgggacgccggcctcaccgcggaccgcctcctcgacgccgtgcagcggtgcctcccggagacgctgcggacggcggtgcagcgatgccgccgccgcggagacgggcccggtgccgcgaaggcagtcgtcgagtgggtgccccaccggcggagcttccggtacctgttggccagggacctcgccttcccgcacctcagcctcagctagctataagctgcacgtacgtcgtgaagatgattcctcgtacggtgactagttgaaagattggtagttgtggtggggtgtggatgacttgatagattttggttctagattaatgataatgatgatgattgcacatggtccattaggcacgggcattcttcatcttaatttgcgtgtgtgtgtgctgtaaacagatgacacatcgagcttagcttgtagatatagcaacaaatgaaagagataaactaagtttgtattattgcattgtaca

SEQ ID NO: 142548 - DNA, 2575 bp, Zea Mays
ctggcgcctagtgtgtgtttgtgcgtcttctgccttctgaaggcacgcacgcaccattctgccctcctgctctctccccctcctccttcccactcctgtctctccccgtcctcctctgcttgagccttgagccattcagcaggtccagcaaaattgtttccagtcagtttcattcattcgcaaggtcggtgtctggagagaagaagagaaatggcggcgctagagaggagaggaggccaccacactgctgctttcatcagagcagcgaaggcctccagtcctcctcctcctccagcgaggcagaggcagaggcagaggcgctccaagagcggtgccggtttggacgacgacgacgacgacagagatgccagggccgcgccgcgttctccgcagaaggcgtccagacagaccaagctgcaagagcagaaacgcgaggccgagacggaagttcagcggcgcaggaggaggagcgaggcacacaactccctgaggaaagagattcagcagctggagacgcgcctcagggatcagcaggtggtgcgcggcgcactggagaaagcgctggggcctgagcctgagcctgagcccgacgacgacggcgctggtccacgtccactcactctccagaacgagagcccagcgctaaagctgataagggaggttgcgacactggagctggagatcaagcacttggagcactacctgctggcactctaccggaaagcattcgagcagcagcaagcacccaccaccaccaccgcgctgccgccttcagacgatcgccgggacgcggcgcgcaagctgtcggtgagctcacggcccgacgacgagacgcccagggcgagggcccccgtgatcaggggaggcggcggcaacgggaggaggaacggcggcacggccgacgactgctcgccgtcgtcgacgtgcccccggaggacggccgcggactcggacccggccggcctccggagccagtcggcgctgtcgttccgaggcgcgtggtcgtcgtcgtcgtcgacgtcgtccaggatatcgcccacggaggacagcctcgcgcgggcgctgcggtcctgccactcccagcccttctccttcctggagcaaggcgagacgacggcgccgtcaggaggagtggtgagcctggcggactacctcggcacgagcgtggcggaccacatcccggagacccccagcaacctgtcggaggagatggtgcgttgcatggccggggtgtactgcaggctggccgacccgccgctgctggcgcgccaccgcccgtcggcgtcgtcggcgtcggcgtcgctgtcctcggcggcgagcgcggtctccccaacacagtgcctcggcggcggcgacaacaacacgtggagcccgaccagcagcagcagctaccactgcggcaggagagacgccgcccggctagtcatcaacccgttccgcgtcgagggggtcaaggagttgttcagcgggccctacagcgccatggtcgaggtgccggcgatctcccgcgaccgccccaggctcagggaggccgaggacctgctccagacgtacaagctgattctctaccggctggagacggtggatctgaggcggatgacgggcggggagaagctcgcgttctggatcaacgtccacaacgcgctggtcatgcatgcgtacctcaagtatggagtcccgcagcagaaccagctgaagacgacgacatcactgcttgtcaaggcggagtgcaagatcgcggggcgcgccatcaacgcggcggccatccaggggctggttctcgggtgcacggcgcactgctcctccgggcattggctgcgggctttgctgcgctacccgaggacgacgacgaaggcgagccggcgggcgagcagagccgggggcgaggagtggcgagccttcgccgtccgccagccggagccccttctgcgttttgcgctctgctccgggagccactccgatcccgcggtacgggtgtacttcccgaagcggctggcgcagcagctggaggcggcgcgggaggagtacgtccgggccacggcgggggtgcggaaggacgaccgccgggtgctgctgcccaggctgctggacgcctacgcccgggacgccggcctcaccgcggaccgcctcctcgacgccgtgcagcggtgcctcccggagacgctgcggacggcggtgcagcgatgccgccgccgcggagacgggcccggtgccgcgaaggcagtcgtcgagtgggtgccccaccggcggagcttccggtacctgttggccagggacctcgccttcccgcacctcagcctcagctagctataagctgcacgtacgtcgtgaagatgattcctcgtacggtgactagttgaaagattggtagttgtggtggggtgtggatgacttgatagattttggttctagattaatgataatgatgatgattgcacatggtccattaggcacgggcattcttcatcttaatttgcgtgtgtgtgtgctgtaaacagatgacacatcgagcttagcttgtagatatagcaacaaatgaaagagataaactaagtttgtattattgcattgtaca

SEQ ID NO: 142549 - DNA, 2595 bp, Zea Mays
ctggcgcctagtgtgtgtttgtgcgtcttctgccttctgaaggcacgcacgcaccattctgccctcctgctctctccccctcctccttcccactcctgtctctccccgtcctcctctgcttgagccttgagccattcagcaggtccagcaaaattgtgtgagctcgttttctccgagttccagtcagtttcattcattcgcaaggtcggtgtctggagagaagaagagaaatggcggcgctagagaggagaggaggccaccacactgctgctttcatcagagcagcgaaggcctccagtcctcctcctcctccagcgaggcagaggcagaggcagaggcgctccaagagcggtgccggtttggacgacgacgacgacgacagagatgccagggccgcgccgcgttctccgcagaaggcgtccagacagaccaagctgcaagagcagaaacgcgaggccgagacggaagttcagcggcgcaggaggaggagcgaggcacacaactccctgaggaaagagattcagcagctggagacgcgcctcagggatcagcaggtggtgcgcggcgcactggagaaagcgctggggcctgagcctgagcctgagcccgacgacgacggcgctggtccacgtccactcactctccagaacgagagcccagcgctaaagctgataagggaggttgcgacactggagctggagatcaagcacttggagcactacctgctggcactctaccggaaagcattcgagcagcagcaagcacccaccaccaccaccgcgctgccgccttcagacgatcgccgggacgcggcgcgcaagctgtcggtgagctcacggcccgacgacgagacgcccagggcgagggcccccgtgatcaggggaggcggcggcaacgggaggaggaacggcggcacggccgacgactgctcgccgtcgtcgacgtgcccccggaggacggccgcggactcggacccggccggcctccggagccagtcggcgctgtcgttccgaggcgcgtggtcgtcgtcgtcgtcgacgtcgtccaggatatcgcccacggaggacagcctcgcgcgggcgctgcggtcctgccactcccagcccttctccttcctggagcaaggcgagacgacggcgccgtcaggaggagtggtgagcctggcggactacctcggcacgagcgtggcggaccacatcccggagacccccagcaacctgtcggaggagatggtgcgttgcatggccggggtgtactgcaggctggccgacccgccgctgctggcgcgccaccgcccgtcggcgtcgtcggcgtcggcgtcgctgtcctcggcggcgagcgcggtctccccaacacagtgcctcggcggcggcgacaacaacacgtggagcccgaccagcagcagcagctaccactgcggcaggagagacgccgcccggctagtcatcaacccgttccgcgtcgagggggtcaaggagttgttcagcgggccctacagcgccatggtcgaggtgccggcgatctcccgcgaccgccccaggctcagggaggccgaggacctgctccagacgtacaagctgattctctaccggctggagacggtggatctgaggcggatgacgggcggggagaagctcgcgttctggatcaacgtccacaacgcgctggtcatgcatgcgtacctcaagtatggagtcccgcagcagaaccagctgaagacgacgacatcactgcttgtcaaggcggagtgcaagatcgcggggcgcgccatcaacgcggcggccatccaggggctggttctcgggtgcacggcgcactgctcctccgggcattggctgcgggctttgctgcgctacccgaggacgacgacgaaggcgagccggcgggcgagcagagccgggggcgaggagtggcgagccttcgccgtccgccagccggagccccttctgcgttttgcgctctgctccgggagccactccgatcccgcggtacgggtgtacttcccgaagcggctggcgcagcagctggaggcggcgcgggaggagtacgtccgggccacggcgggggtgcggaaggacgaccgccgggtgctgctgcccaggctgctggacgcctacgcccgggacgccggcctcaccgcggaccgcctcctcgacgccgtgcagcggtgcctcccggagacgctgcggacggcggtgcagcgatgccgccgccgcggagacgggcccggtgccgcgaaggcagtcgtcgagtgggtgccccaccggcggagcttccggtacctgttggccagggacctcgccttcccgcacctcagcctcagctagctataagctgcacgtacgtcgtgaagatgattcctcgtacggtgactagttgaaagattggtagttgtggtggggtgtggatgacttgatagattttggttctagattaatgataatgatgatgattgcacatggtccattaggcacgggcattcttcatcttaatttgcgtgtgtgtgtgctgtaaacagatgacacatcgagcttagcttgtagatatagcaacaaatgaaagagataaactaagtttgtattattgcattgtaca

SEQ ID NO: 142550 - DNA, 2812 bp, Zea Mays
ccgtctactcgtctcccactcccccctgcaccaacaccaccaatcgggtcccccaccacttccgtcgccctcgcccgctccgccgcgccccgtacagcggcgacatggccgagtaccgcctcggacttcagctgcacggccacaccgacgacgttcgtggcatctgtgtatgcggcgatgctgggatcgcgacatcatcgagggaccgtactgtgaagttctggacccggaacccagaaaaggagagcgaatatgttctctccaagacactcgcaggacattcgagttttgtcggcccattggcttggatacctccttcagaccgttttcctgaaggtggaatcgtctctggtggaatggacacatttgttttcctctgggatctgcaaaaaggagaagttgccgagacaatgaaggggcacagttcgcaagtcactggactcgctgtggacactaacggtgacatcatctcttcatccatggattgtactgtaagacgttggagaaatggcaatgctatagaggtttgggaagcgcacaaggttgcagtgcaaactgttctaaagctgcccacaggggaactcttcactggttcaagtgattccactattaagctatggaaaggaaggacttgcctacagactttctcaggacatgcagacactgttagatttttagcctcaatgccaggtctaggaattctttccgcctcacacgacagcactgtcaagttatgggcgttgtcaggtcagcccctgctggacatgatcggacattcttctcttgtatattctgtggatgcacattcttcaggtctaattgctagtggtagtgaggatcgctctttgaagatatggaaagatggtgtctgcgttcaaagcattgaacacccaggatgtatatgggatgctaagttcttgggaaatggagatattgtaactgcttgttctgatggcactacaaggatatggacagcagattctaacaggttctgcagtgatgaggaaattgcagcttatacagatcttatttctcaatacacacttagcagaaagactgttggtggacttaagttgatggatctaccaggtgtggaggcgctgcaagttccagggaactccgatggacaaacattaatcgttcgagaaggggataatggtgttgcatattcatggaattcagcagagttaaaatgggacaaaattggtgaagtagtggatggacctggtgaagctgctcaaggccaagttcatgatggtgttcggtatgattttgtttttaatgttgatattggagatggagaacccatacgaaaactaccctataatcgttcagatgacccatacacagtcgcggacaagtggctcctgaaagaaaatctgcctttgacatatcgccaacaggttgtagaatttatactgcagaattctggccagaacaactttgttccagatccatcttttcgggatccctatactggggccaatgcatatgtgcctgggcaaccatcatcatcatccaatggtaatactccggaaccaattttcaagcacataccgaagagtggaatgctgtcatttgagacagctcagtttgatggaatcctaaagaaagttgcagagtttaattcaaaactttcatctgactcggaacagaaacaattatctctgtctgagacggagatgtcaagattacctgccatagtgaacgtgttgaaagagacatcattttatcacacaagtaagcttgcagatgctgatatgacattgttggtaaagatattgaagtcttggcctccacaaatgatgtttccagtcattgattttctgagaatgttcgtgttgcatcctgatggagcttctttacttctcaagaccatcgaaactggaaatgatatacttttggaaacctttcgtaaagctgttgcgtcgcctgtacagccagcaaatttgcttacagtcctcaaagctgtgacaaacttgtttggcaactcatgcttgcaccagtggctgaggacccactgtgctgagatcattgattcggtgtcaaactgcaagtcttcttttagcaagaatgcacacttggcatatgccacgcttctactgaactacgctgttctttcgattgaatcaaaggaggaacagagtcaggcgcagattctttctgccgcccttgaaatcgccgaagatgacacccaagatttcgactcaaagtaccgggcacttgtcgcaatcggttctcttatgctcaagggccttgtgaagtcccttgccctcgaccttgatgttaagagcgttgcaagcagcgccaagtcttcaatggaccagaagattgcggaagtaggaggtgacatcgaatcgctaacaagatgactacaataggtttgcgtgcacttggtcgttgcggacattgttgctccttcgctcgaggcgctaccatgcataacttaaagccggtctgtgttgcagaccaattcagacgccctccacgtctctaccgaaaaatcgcaatgggttatgattattttttcacctttgtaaccatcatggaagtgtggattttgggtggtagcgcttagattttgtaaattgaatagctgggctactctgcagatacagttcaatatttctcgcggagggatgcagatcagacacgcaacgaatatttcgatatcatctgcatttctatcaggcacgcaactacacacaaaggacctcctaaacgtgtcacctaaagggcaagaaacgaagcaaatggaagaaaaacgaaaaggaaaataaacaagtaaatcatcacacaaaaaacaaaaata

SEQ ID NO: 142551 - DNA, 1892 bp, Zea Mays
ccgtctactcgtctcccactcccccctgcaccaacaccaccaatcgggtcccccaccacttccgtcgccctcgcccgctccgccgcgccccgtacagcggcgacatggccgagtaccgcctcggacttcagctgcacggccacaccgacgacgttcgtggcatctgtgtatgcggcgatgctgggatcgcgacatcatcgagggaccgtactgtgaagttctggacccggaacccagaaaaggagagcgaatatgttctctccaagacactcgcaggacattcgagttttgtcggcccattggcttggatacctccttcagaccgttttcctgaaggtggaatcgtctctggtggaatggacacatttgttttcctctgggatctgcaaaaaggagaagttgccgagacaatgaaggggcacagttcgcaagtcactggactcgctgtggacactaacggtgacatcatctcttcatccatggattgtactgtaagacgttggagaaatggcaatgctatagaggtttgggaagcgcacaaggttgcagtgcaaactgttctaaagctgcccacaggggaactcttcactggttcaagtgattccactattaagctatggaaaggaaggacttgcctacagactttctcaggacatgcagacactgttagatttttagcctcaatgccaggtctaggaattctttccgcctcacacgacagcactgtcaagttatgggcgttgtcaggtcagcccctgctggacatgatcggacattcttctcttgtatattctgtggatgcacattcttcaggtctaattgctagtggtagtgaggatcgctctttgaagatatggaaagatggtgtctgcgttcaaagcattgaacacccaggatgtatatgggatgctaagttcttgggaaatggagatattgtaactgcttgttctgatggcactacaaggatatggacagcagattctaacaggttctgcagtgatgaggaaattgcagcttatacagatcttatttctcaatacacacttagcagaaagactgttggtggacttaagttgatggatctaccaggtgtggaggcgctgcaagttccagggaactccgatggacaaacattaatcgttcgagaaggggataatggtgttgcatattcatggaattcagcagagttaaaatgggacaaaattggtgaagtagtggatggacctggtgaagctgctcaaggccaagttcatgatggtgttcggtatgattttgtttttaatgttgatattggagatggagaacccatacgaaaactaccctataatcgttcagatgacccatacacagtcgcggacaagtggctcctgaaagaaaatctgcctttgacatatcgccaacaggttgtagaatttatactgcagaattctggccagaacaactttgttccagatccatcttttcgggatccctatactggggccaatgcatatgtgcctgggcaaccatcatcatcatccaatggtaatactccggaaccaattttcaagcacataccgaagagtggaatgctgtcatttgagacagctcagtttgatggaatcctaaagaaagttgcagagtttaattcaaaactttcatctgactcggaacagaaacaattatctctgtctgagacggagatgtcaagattacctgccatagtgaacgtgttgaaagagacatcattttatcacacaagtaagcttgcagatgctgatatgacattgttggtaaagatattgaagtcttggcctccacaaatgatgtttccaggtatatatcctctttggaccataaaaatagtaagcatgatagtgattggtttgattaccctgttgaattgtctcaat

SEQ ID NO: 142552 - DNA, 960 bp, Zea Mays
cttgcgttgcccccgcccgcctctgtcgtctcccgtcgcgccgcgcgcaggctgtccagcatgataagtagctgccgcgccgcgccgtaatcgatccctcctcacaacacaggacgcaacgcatccaacgcgccccgcccgcccggttggattcgattcctcccaaacttgtcgtccccaagcagcagcctttccctctctttcccatggccaccaagcccggcagggcggccgccgcggtgctgctcctcaccctgctcgccgctctacacgcggccgcccgcaacaacaacaacaacgagaaccgcaacccgggcggcggcggcggcgacccgggcgccttcttcgccgggatgccgcggttcagcggcggcggggtgccaggcggcggcgggttcttcggcggctggggcgagggcggtctcgggtaccggcgcggcgctgtggtgccgccctccacggtgtgcccgcaggacgggccctgccgcgggaagcgcctcacctgcccgccgcgctgcttccggaccttcagctacggcggcaagaacgggggcggcggcggaggcggcggaggctgcagcttcgactgcaccgagcgctgcgccgccacctgctgagtgaatctgggatgtattagaggagggcgtggccgtagctatagctaaagctcgtgtactccttcctctactggcatgcggtgcactgcttcttcctgctcgtccactgatacgaattatcgctactactaatagtatcgaggtggtttggtttggtttagctgttggtttgttgcgagttgtgatcggtcgtgatcacgtacgtgatgactgatgagatcatttatgcatgtgtgtctgtaaatttggtgtctgccagtgccagtgccagactgatcaataatagcagaggagaggagatgaataaagagaaatttagatatgtactattaaaagattacaa

SEQ ID NO: 142553 - DNA, 648 bp, Zea Mays
ccaggcgatgccagtccgtccgtccagcgtccactcgcccaccgtttccgctccatccccggcccccacttccccgttcgagagacgaaaaaccgaccattcattccttcttccatggcgaggagggcgacggtgatggtgctcgcggcggcgctcgcggtcctcctgctggcgtcgtcgtcgtcgaagacggcccccgtggccagcgccgcccgggacgacccctcggcagcggcggcggcggccgtcacttcttctcgtgacctgcagaaggatggatcggcggcggcggcggaagggaaggggaaggagaaggagtgcgagggcgccaacgacgaggacgagtgcatgatgaggcgcacgctggccgcgcacaccgactacatctacacccagcagcaccacggctgatccaatagaatccgtcctaggttacatgcgttgctctcgtacgtgtgttcgtgtccgtccgtgctcgtgtcgtgtactcgtgtgtgtgtgtgtgtgtgtgtgtgtgaaacgccagcgcgtgctgcttctgctgcgtcgttattacctgcgtgtcaaataaattcttttttttgtcccaagtcacaccgttgaacgacacacagcgcatgtgtgtaataaagagaagagtctccggcc

SEQ ID NO: 142554 - DNA, 87 bp, Zea Mays
gtttcgactctgcagagaactcggctggtgcttggctgtttgcagggcgcacggagtcggtaccaccagcactcacccaccgtgtgc

SEQ ID NO: 142555 - DNA, 652 bp, Zea Mays
actattttaacctagacgagcaaaactgaagctaaagtgttctactcgtttagtgcttttatctaacctattttactgatcgttctggtttcttatggttatagcaaagtttcgtttcctgtagcattccttccaatttgtccaaatgttaggcatggaagaacatggaggtaggaggtggcaatggtgaatggcaatggagtttattttgttcgtataatacttttcaatcatgttctcatttacattaattaccttcctcaaaccttttaatttatctatgatctatctatggtcatcattttgtgttcaaaaaacagatgcaaattattatggcagcaatcatgttactattgttctacaagaggccagttttttgtagaccgattggcttgctaagttttggtgctactatatctgtggtgatcttttaactggaggaacatatttaaaggcctcaacaaaggagaaccaggccaagctgtcggtcgtgcgttcacaaatatatttaaatcttccgccacgaaattatttaaatcttacagttcaggcaccagctaagcctaagatgctaagtttccatatgtgataatgttggactgtcttgttcatatcggtgtggcgtatcattatgcttgaggtggtggtatgt

SEQ ID NO: 142556 - DNA, 87 bp, Zea Mays
caccacagttgcttctcagtgctcctttcctcttcgtatcttgcattgataactctggtgcttgatcagacacatagcttctccttc

SEQ ID NO: 142557 - DNA, 1407 bp, Zea Mays
cttctactagcccacccaactccaggaaaagacaagggcccacttgcagcccgagccccttgattccctcgccggtgtcacgcgactccagatccccaattcggacagccacctgctcggcgagccatggccggccgccgcgaaggcgagcaccaggcgagcccgtggcgatccgggacgcccgcggcggaggaggactcgggcgccttcccctccgccatcatcttcttcgctctcgttggcgctaccgccaccaccgccgccgtcggacaactgcgccggacggtcagctggttctacactcaacttagtaggtcggaaccatatgttttctgggaagacatacctcgtcgaccaaatcgtcatcggtgcggtgaagcctgggaacgatatcaccagaggatgcgtgacaggaccgaggatcaaagggaaagagtggtagcaatcgcgttggagtcgagccagtcgacaccgaccactgtattggacgaacttgtcaatatcgacccgaacacggaacgcatacggcacatgcaagatgtatttaaaaaggagagaagtaaatgtcgggattatcgaaattgggatagccataatcccaactattatcagcatcatcaaagagatgactggtactggaacgcagaagcattttatgccaatcaaaggacaaatttcagggcaatgaccagggaagccatgacttacactatgtcacaccactattctgttttgggccttgacaggtcaaggtcagagccattttcagatgctgaaatcaagaatgctttcaggagaaaagcaatggagtatcatccagaccaaaaccaaaataataaagaggttgctgaggcaaaattcaaagaggttatggattcttacgaagcaataaaacgagaacgacgagacagaagttgctgaatgtgaaatgtgctcatggttctcaggcggagtgaggaactgttgtatataaattgtttgatgtgggacaaactaaatctagggctagtttggcatccccatttttccatgggatttctaatttcccaagggaaaatgaactaatttcccttgggaaaatgaaaaacccttgggaaaatgaggtttccaaactagcccctaaggtataaaactaccgctctgatccaaaagagcgtgtagcttagtggttacaagggccacaatgccacattagtattttatgttctggcttcgactctctgtagaagggaaaaaaatacgggagataatgaattcagatgggggacgatggcaggtcaattcagccattcttgtttctatttttctcttgggggtgggggccggggcagatatagatgtactcagacgaatgaaggctattgaaagaatgcacggatgagctggacgtgtgttttagagaacaaa

SEQ ID NO: 142558 - DNA, 1329 bp, Zea Mays
cttctactagcccacccaactccaggaaaagacaagggcccacttgcagcccgagccccttgattccctcgccggtgtcacgcgactccagatccccaattcggacagccacctgctcggcgagccatggccggccgccgcgaaggcgagcaccaggcgagcccgtggcgatccgggacgcccgcggcggaggaggactcgggcgccttcccctccgccatcatcttcttcgctctcgttggcgctaccgccaccaccgccgccgtcggacaactgcgccggacggtcagctggttctacactcaacttagtaggtcggaaccatatgttttctgggaagacatacctcgtcgaccaaatcgtcatcggtgcggtgaagcctgggaacgatatcaccagaggatgcgtgacaggaccgaggatcaaagggaaagagtggaacgcatacggcacatgcaagatgtatttaaaaaggagagaagtaaatgtcgggattatcgaaattgggatagccataatcccaactattatcagcatcatcaaagagatgactggtactggaacgcagaagcattttatgccaatcaaaggacaaatttcagggcaatgaccagggaagccatgacttacactatgtcacaccactattctgttttgggccttgacaggtcaaggtcagagccattttcagatgctgaaatcaagaatgctttcaggagaaaagcaatggagtatcatccagaccaaaaccaaaataataaagaggttgctgaggcaaaattcaaagaggttatggattcttacgaagcaataaaacgagaacgacgagacagaagttgctgaatgtgaaatgtgctcatggttctcaggcggagtgaggaactgttgtatataaattgtttgatgtgggacaaactaaatctagggctagtttggcatccccatttttccatgggatttctaatttcccaagggaaaatgaactaatttcccttgggaaaatgaaaaacccttgggaaaatgaggtttccaaactagcccctaaggtataaaactaccgctctgatccaaaagagcgtgtagcttagtggttacaagggccacaatgccacattagtattttatgttctggcttcgactctctgtagaagggaaaaaaatacgggagataatgaattcagatgggggacgatggcaggtcaattcagccattcttgtttctatttttctcttgggggtgggggccggggcagatatagatgtactcagacgaatgaaggctattgaaagaatgcacggatgagctggacgtgtgttttagagaacaaa

SEQ ID NO: 142559 - DNA, 511 bp, Zea Mays
atgtccgccgtagctcagctcgaccgctcggcttcccctagcctcttcccctgcgagctcgactcctgctcgcccatggagttcgcccagctccctgctccggtgactagcgctcggcgtcctgctctctatgccctgctcgtccctgcgcacgcgccgcggtttcccccgagctccctcgccgtggattctttctgcgcgtcctctccggcgctgcggtgccccagcttggcctctgcccattcctcagccgcaccctgctccagtcgctcacccatcggacgctacacgctcgcctctgctcgttccgtgggtgcgcactgccttctctgtccatggtgcgccctcacctctacttctctgctggccggcgtttttccagccgtggatctccttgtgtgccgcgtccggctccctgacgtgccgcggtgcccatcgccctgcgcgcgctctgtttcctcgcgcggcttcgtgctcgcctggccgttgtcttggatgcgcaggagtagtg

SEQ ID NO: 142560 - DNA, 105 bp, Zea Mays
aactacattgatcttaatctgagttgtgtgttgatggtcgatgtagtaaagaagggacacttagacattgttgttcatggatttatgtactgccaacaaaccttc

SEQ ID NO: 142561 - DNA, 821 bp, Zea Mays
cgtccacacatgcttctagatgcctctcctctcctcgcttcatccacctcatctcactccagcgtcttccatttgacctcggtgccttctcctcttgcttgtggccacagtctgagccatgccgcgcgtgcgacgaccagtagaaaccgctctcgagcgcgacgctgcagcaggcacaggcgaggtcccgctcatccagatcacaccagcccatcgacgacagcaacaccttctcgggcgccgccgccgcgacgcagtcctcgcacatgtctccggcgtccacgagctagcggtgggtcccgaagaggctgccgatgccgaggcgggagcagagcgcgcacggcggcgagagatcgaagaagccggcgaaccgagctatgaggattaggattttggttttaagggtaatttttcccaatcactatatgctcctatactcttctcaaatattgatgtggtatgcgagtaacaaaacttcttctcaatataaataggtttggtagtgtggccttactgttacgttactttccttcttttaaaaaaattaaatgtaactacaagatattgaccatggatatctattgtttgtagcatgatatatatttcgaatgtgtgttaatcatggccaggtcgcacaatgtgtcatgctatatagtaaatatcaaataattgcaattgagcttcttttctgtgaataaaattcagctcaacataaataggtttagtagtgtgtgtttactgttaatattttcatgacatttgttattaacaactttggaactaagttgattatatctatactcatacttttattatttccc

SEQ ID NO: 142562 - DNA, 1931 bp, Zea Mays
accccaccagtctctggcaggttctcccccccacccctctccgtctccgatcccgtccgcattgcttcgcgccggaccaaggaggaagggtcggcgtcgcaggcattgcggtctgctagccacgagggccatggacccgtgcccgttcgtgcgggtgctggtcggcaacctggcgctgaagatgccggcatcggcgccccccgccgccgccgcggcgtccggctccggcgtgcacccggccacgccgccctgctactactgccgcatccgcctcaacaagctgccctaccagacggcgcccgcgccgctgctgccggccaccgaggagggctcggcgccggcgccggcgtcgtgcgcggccgccttccacgcctccaaggccgacctggaccgggccgccgccaggcccgcgctcttcctcggcggccgcctccgcaccgcgcgcctcaaggtggccgtgtacgccggccgcgggggcggtgaaggcggcgggaggctgctcggcaagctcgtcttccggttcgacctcaggcgcgccgtggccgagcccttcgtcttcctcagcggctggttcgacatcggcaagcgcggcgccgggaagccggcggcggccaacgccgcgcgcgcgcagctcaacctcaccgtcctgggcgagcctgacccgaggttcgtcttcgagttcgacggcgagcccgagtgcagcccgcaggtgctccaggttaaggggagcatgaagcagcccatgttcacgtgcaagttctcctgccgcagcaacagcgacctgcgctcgcggtccgtgcagtccgactcgggcgccgtcggcccgcgcaactggctggcgaagctgtggtccgagcgcgagcgcgagcgcgcggggaaggagcgcaaggggtggtcggtgacggtgcacgacctgtcggggtcgccggtggcgctggcgtcgatggtgacgccgttcgtggcgtccccggggacggaccgcgtgggccgctccaacccgggcggctggctcatcctccgccgccgcgtggacgggacctggacgccgtggggccgcctcgagtgctggcgcgatcgcggcggcagcgccggggacgcccagctgggctaccgcttcgagctggtgcccgaccacaacagcaacgtcacgggctcgggcgtgtgcgtggccgagtccggcgtcccggcggcccgcggcgggcggttcgccatcgacctgaccacggccggatcccccgggcggggcagcggcgagttgagccgccacgcgctctggcccccgggcggcttcgtgatgtcggccgccgtgcagggggagggccggcgcggcaggccctccgtggagatcggcgtggcgcacgtcgggtgcgccgaggacgccgccgcgttcgtcgctctggcggccgccgtcgacctcagcatggacgcgtgccgactcttctcctgcaagctgcgccgggagctgtcggcgtgaacggcgaggggggagggagattgggtggtgatcggacgaacttgttttcgttgtttgtctgtaatcccgctgaaactggactgttcgtcttctaggtgccttttgtagcctagaagaagccataaaactggggtctggggtgagcgaggcgaggtgtgtgttgttgggtgttttctttttttttttttggattcccagcctctccgcatcgtgctgctaccgaagtggtagagatcaaattttcaaagctgtttgtgctgttcgtcgagtgttcttgttgtgacctctgttgcctgtacctctgaacgcttcccattttgccgccgacgtctcctcctcgtgggagaggggcctgaccgaaggctcctgccgcaagcaaagcgtcgcgtcgcggcgcggcgagtagagaggatccaccgccatcgctcacgtcgtgtggcgtggcatggcaattggc

SEQ ID NO: 142563 - DNA, 106 bp, Zea Mays
taggacaggaggggcgagcccctactgaaaattttattaaaactttaaaacaacagagttataagcaaacagaaaagaagattacaaaggataaaactacaaaact

SEQ ID NO: 142564 - DNA, 2220 bp, Zea Mays
tcctccctacaaaaggagccccggacgctccctcctccctcgccatcaccaccacccaccaccgtctccccgttcctctctatctcacacacagacacaccgagtagaggcggcagttgccagccagcactagcagagcgcaacccgtgggcggcagcggcacgcaatggtgtcggagaggcagcaggcggcggggaaggtggccgccttcaacctcacggaggccgggttcggcgacgggtcggacctgctggacgacgacgggcgcgagaggcgcacggggaccctggtgacggcgagcgcgcacatcatcacggcggtgatcgggtcgggcgtgctgtcgctggcgtgggcgatcgcgcagctggggtgggtgatcggccccgtggtgctgctggccttctccgccatcacctggttctgctccagcctactcgccgactgctaccgcgcgccgccgggccccggccagggcaagcggaactacacctacggacaggccgtcaggtcatacctgggggagtccaagtaccggctgtgctcgctggcgcagtacgtgaacctggtgggcgtcaccatcggctacaccatcaccacggccatcagcatgggggcgatcaagcgttccaactgcttccacagcaggggccacggcgccgactgcgaggcgtccaacaccaccaacatgatcatcttcgcgggcatccagatcctgctgtcgcagctccccaacttccacaagctctggtggctctccatcgtcgccgccgtcatgtccctcgcctactcctccatcggactcggcctctccatcgcaaagatcgcaggtggggtgcacgttaagacgtcgctgactggtgccgccgtgggggtggacgtcaccgcggccgagaaggtctggaagacgttccagtcgctgggggacatcgccttcgcctacacctactccaacgtgctgatcgagatccaggacacgctgcggtcgagcccgccggagaacgtggtgatgaagaaggcgtccttcatcggcgtgtccaccaccaccgcgttctacatgctgtgcggcgtgctgggctacgcggcgttcggcagcgacgcgccgggcaacttcctcacgggcttcggcttctacgaccccttctggctcatcgacgtcggcaacgtctgcatcgccgtgcacctggtcggcgcctaccaggtcttctgccagcccatctaccagttcgtggaggcctgggcgcggggccgctggcccgactgcgccttcctccacgccgagctcgccgtcgtcgccggctcctccttcacggccagcccgttccgcctcgtgtggcgcaccgcctacgtcgtgctcaccgcgctcgtcgccacggtcttcccattcttcaacgacttcctggggctcatcggcgccgtctccttctggccgctcaccgtctacttccccatccagatgtacatggcgcaggccaagacgcgccgcttctcgccggcgtggacgtggatgaacgtgctcagctacgcttgcctcttcgtctcgctgctcgccgccgcgggctcagtgcaggggctcgtcaaggatctcaagggatacaagccattgttcaaggtctcctaaataagggactgctgcatggcatgtgtgcgatgatcgattggaacactgttagttatacattagctagctgcaggaatgatggaacgaattaaccatgagtctgaaacgtgcattcactgcatatatatatagcgatacagccatggaaggatcggaggatatatggtgtgctgtgaaaagccaatgttttgttcaagtacgtacgtagcctactaagtcagtagtgatatggttaatggtttgggtttgaactttaaaatgtatatgtaactccatcgatcttaattacgtactttagcaagtgtaatggcaatctgattggaatggaaataaggttctagaactcagttgtctgaaatgcagagcaatataattaatgtaagagaacatatctggtgaacatggaagtttagtgcacatggtgcacatattaaatcagcatcactcattttagatctaacgtctctagttgtttgatatatttttgctaaggacacccttcgacgtggtgggatgtagtggtagaaggtgttatttataaattgcaatgatcaaccagagacattatatttaagatggatgatgatgatgatttaatatat

SEQ ID NO: 142565 - DNA, 1992 bp, Zea Mays
tcctccctacaaaaggagccccggacgctccctcctccctcgccatcaccaccacccaccaccgtctccccgttcctctctatctcacacacagacacaccgagtagaggcggcagttgccagccagcactagcagagcgcaacccgtgggcggcagcggcacgcaatggtgtcggagaggcagcaggcggcggggaaggtggccgccttcaacctcacggaggccgggttcggcgacgggtcggacctgctggacgacgacgggcgcgagaggcgcacggggaccctggtgacggcgagcgcgcacatcatcacggcggtgatcgggtcgggcgtgctgtcgctggcgtgggcgatcgcgcagctggggtgggtgatcggccccgtggtgctgctggccttctccgccatcacctggttctgctccagcctactcgccgactgctaccgcgcgccgccgggccccggccagggcaagcggaactacacctacggacaggccgtcaggtcatacctgggggagtccaagtaccggctgtgctcgctggcgcagtacgtgaacctggtgggcgtcaccatcggctacaccatcaccacggccatcagcatgggggcgatcaagcgttccaactgcttccacagcaggggccacggcgccgactgcgaggcgtccaacaccaccaacatgatcatcttcgcgggcatccagatcctgctgtcgcagctccccaacttccacaagctctggtggctctccatcgtcgccgccgtcatgtccctcgcctactcctccatcggactcggcctctccatcgcaaagatcgcaggcaagctcatgcatggcagctactgtacgtacgttctatctctcattctgagtcgagacttttaattgactgcaggtggggtgcacgttaagacgtcgctgactggtgccgccgtgggggtggacgtcaccgcggccgagaaggtctggaagacgttccagtcgctgggggacatcgccttcgcctacacctactccaacgtgctgatcgagatccaggacacgctgcggtcgagcccgccggagaacgtggtgatgaagaaggcgtccttcatcggcgtgtccaccaccaccgcgttctacatgctgtgcggcgtgctgggctacgcggcgttcggcagcgacgcgccgggcaacttcctcacgggcttcggcttctacgaccccttctggctcatcgacgtcggcaacgtctgcatcgccgtgcacctggtcggcgcctaccaggtcttctgccagcccatctaccagttcgtggaggcctgggcgcggggccgctggcccgactgcgccttcctccacgccgagctcgccgtcgtcgccggctcctccttcacggccagcccgttccgcctcgtgtggcgcaccgcctacgtcgtgctcaccgcgctcgtcgccacggtcttcccattcttcaacgacttcctggggctcatcggcgccgtctccttctggccgctcaccgtctacttccccatccagatgtacatggcgcaggccaagacgcgccgcttctcgccggcgtggacgtggatgaacgtgctcagctacgcttgcctcttcgtctcgctgctcgccgccgcgggctcagtgcaggggctcgtcaaggatctcaagggatacaagccattgttcaaggtctcctaaataagggactgctgcatggcatgtgtgcgatgatcgattggaacactgttagttatacattagctagctgcaggaatgatggaacgaattaaccatgagtctgaaacgtgcattcactgcatatatatatagcgatacagccatggaaggatcggaggatatatggtgtgctgtgaaaagccaatgttttgttcaagtacgtacgtagcctactaagtcagtagtgatatggttaatggtttgggtttgaactttaaaatgtatatgtaactccatcgatcttaattacgtactttagc

SEQ ID NO: 142566 - DNA, 1870 bp, Zea Mays
cagatggtcaataccaggcggggtggtggaattgatttaccgcccaatcgacacactcggaggatatttagacaaccccagccacaaccagtagagatggatcctccaccaccgcctccaccggcaggagttgacccattggttgcagctcagatgaggatgatgcaacagatggcggatactatgacagatatgcgtgctcagatgcagcaggaacgccaggagatgcgccaagagcgggaggatatacgtcgagagctgcgccaagaacgagaagagatacgtcaggaaaggagggcgcaacaacagcagctgcaacagcaaatgcaacagcaacagcaacaagtaccactgcctccaccaccaccaccagttccaccccgtgataagcatagggagttcatgagtcataagccacctacattcgctagctcacctgatccactggacgcggatgattggctgaagtccgttgagaagatgctgaatattgcacaatgtactgaccgggagaaggttttatatgcttctggacgtctgacaggtcctgctgctgactggtgggattcatatactgccgcccacgatgttgctgatactatcacttgggcagagttcagtacacagttcatgaattatcatataccagctggattgatgaagattaagaagaaggaatttctatcgctgaagcaaggaagcatgacagtcagcgagtaccgcgacaagtttatccagttatccagatatgcccctgatgaagttgctgaagatgagaggaagcaggagcattttattgaaggacttaatggaccactgcagtatgctctagtggcacatacatttccatcatttcagaggctgcttgataagaccctggctattgaacacaagcgtgttcagctgggagatttgaagagaaaggctatatctcaaggacaaggaagcagcagtgttcgacctcgctacagttcaccccagggtacaccagctcgcactggcggaggcccagcgcccaattcagcaatcacctttgaggactccacctcctcgacaggctacccctaccggcaccccgacgaagttttcaggacagagtccaggcactacttgttacaagtgtgggaagactggtcactatgcaaatgtctgcccacagaggattgctactactccagttcagaacaggcagcaaactccaggatctggcaagggatattctattgccaaggttaatcaagtcagcgttgatgctactccagatggtgctgacatcgtgcttggtatgttttatgttaatgctattcctgcaaccatcttatttgattctggtgctacacattcatttatgtctgctagatatgccaacacaaatgaaataccactgctaaatatgagaaaaccaatgatagtaattacacctaaagggcctgttgaggcgaatcaaatgacacgtagattgacattgaccattatgggtagagaatttggagctactgctataatattagagtcaagcagtatagatttgatccttggtatgtcatggctaagaaaggcaaaggccgttatagcatgtggtagaggtaccgtagaactcactaccactaaaggagaaagatttcaagttaatattgcagtaacctcctcatccatgcgtgcaatgttctttatacctgaggagtttgttggtgacaacatccgggtggttagagattttccggatgtctttccagaggagttaccagggatgccacctgatagagaagttgagtttgttattgatctcttacctggaaccgcccctatttctatccggccatataggatgtccgtagaggagttgaaggaacttaagaaacgactccaa

SEQ ID NO: 142567 - DNA, 669 bp, Zea Mays
ctttcctcctcttcaaccattctctttgataagccttacactccatgagctcccacctttggtgagttcatgtcacattattccccacaacttgttgagcgatgatcatgtgtgagctcacccttgctgtctcacaccccctcacaggagaagagcaggtggttcaggaggagccacaaggcgaggagtatgatctgatctaggtggcgtttctcagttgacattggcgccgacgatccttagttcgttttatctttattattttattttgtaataagtcttccgctatgtaataaatactctgatgttttatgacatttatctctatacactctgttattatatatgttgtcttcttggcgcatgtatgagatgcacttggctttgttccttaaagcggggtgtgacagaagtggtatcagaggaaatgttgactgtaggacgagacctagatagaaatggacaaaccctttcctacttccttactctgactcattctatactcatctcatcttgatcttgtctcaccttttgctattctactctgattaatctgatcttttctactctaagacaagatggatttcacaccttggaatcctaccactatgatctttttaagagatagggaacccaagacaaaatttaaaactattttctttatttaaa

SEQ ID NO: 142568 - DNA, 3722 bp, Zea Mays
ctactgagtaggtgtgtcagtgtgtgttgcttcatccaagaacgaccagtcagcctatcataaagctctctccttttctcgcgggccgcggcctcactcccttgtctccactctcccgacggagacggagcctcgaacgaacccaatgccaatgcgcctcctcctcctcctcctcctcaccttcctcgccaccgccgccgcggtggcgggtgctgccggtggcgcggccgcggctggctcggatgcggacgcgctgctggcggcgaaggcggtgctgtcggacccggccggcgcgctcgcgtcctggacgaacgccaccagcaccggcgcctgcgcgtggtccggcgtgacgtgcaacgcgcgcgccgcggtcatcggcctcgacctctccggccgcaacctctcgggcccggtgcccacggcgctgtcccgcctcgcgcacctcgcgcgcctcgacctcgccgcgaacgcgctctgcggccccatcccggcgccgctgtcccggctccagtccctcacccacctcaacctctccaacaacgtgctcaacggcaccttcccgccgccgctcgcgcgcctgcgggcgctccgcgtgctcgacctctacaacaacaacctcaccggcccgctcccgctcgcggtcgtgggcctgccggtgctccgccacctccacctcggcggcaacttcttctccggcgagatcccgcccgagtacggccgctggcggaggctgcagtacctcgccgtctccgggaacgagctgtcggggaggattcctccggagctcggcggcctcaccaccctcagggagctctacattggctactacaacagctactccagcggcctacccccggagctcggcaacatgacggatctcgtccgcctcgacgccgccaactgcgggctctccggcgagattccgccggagctcgggaacctcgccaacctcgacacgctcttcctgcaggtgaacgggctcgccggcgccatcccgccggagctgggccggctcaagagcctcagctcgctcgacctgtccaacaacgcgctcaccggcgagatcccagcgagcttcgcggcgctcaggaacctcactttgctcaacctcttccgcaacaagctgagaggcagcataccggagctcgtcggcgacctgcccagcctcgaggtgctgcagctctgggagaacaacttcaccggcggcatcccgcgccggctcggccgcaatggacggctccagctggtcgacctctcgtccaacaggctcaccggcaccctcccgccggagctatgcgccggtggcaagctggagaccctcatcgcgctcggcaacttcctctttggctcaatccctgaaccactggggaaatgcgaggcactctcccgcatccgcctcggcgagaactacctgaacggttccatcccggatggtctctttgagctgccgaatctgacgcaggttgagctgcaggacaacctcctgtccggcggcttcccggcggtttccggcaccggtgcgccgaatctgggggcgatcactctctccaacaaccagctcaccggcgcactgccggcgtccatcgggaagttctcaggtttgcaaaaactgcttctcgaccagaatgcattcaccggcgcagtaccgccggagatcgggcggctgcagcagttgtctaaggctgacctgagcggcaacacgcttgacggcggtgtgccgccagagatcgggaagtgccggttgctcacctacctggacctcagccggaacaacctgtccggggagataccgccggccatctccggcatgcgaatcctcaactacctgaacctgtcccggaaccacctcggtggagagataccggcaaccattgctgcgatgcagagcctcacggccgtggacttctcctacaacaacctgtccgggctcgtgccggcgactgggcagttcagctacttcaatgccacatccttcgtcggcaacccggggttgtgtgggccgtaccttggaccatgccattctggcggcgccggcacgggccatgatgcacacacctatggcggcatgtccaataccttcaagctgctaatcgtcctcggcttacttgtctgctccattgcgtttgctgccatggcgatcttgaaggcccggtcactgaagaaagccagcgaggcacgcgcttggaggctcactgcgttccagcgcctcgagttcacctgcgacgacgtgctagacagtctgaaggaggagaacatcatcggcaaaggtggagccgggatcgtgtacaaggggacgatgccggacggtgagcatgtcgcagtgaagcggctttcgtcgatgagccgtggctcgtcacacgaccacgggttctctgcagagatacaaaccctcgggaggatccgacaccgctacatcgtgaggttgctcggcttctgctcgaacaacgagacgaatctcctggtgtacgagttcatgcccaacgggagcctgggggagctgctccatggcaagaaaggtggccatctccactgggacactcgctacaagatcgccgtcgaggccgccaaggggctcagctacctgcaccacgattgctcgccgccgatcctgcaccgcgatgttaaatcgaacaacatcctgcttgattccgatttcgaagcacacgttgctgatttcgggctcgccaagttcttgcaggactctggcgcatcacagtgtatgtctgccattgctggctcctatggctatattgccccagagtacgcatacaccctcaaggtggacgagaagagcgacgtgtacagcttcggcgtggtgctcctggagctggtaacgggaaagaagccggtaggcgagttcggggacggcgtggacatcgtccactgggtcaggtcgacgacggcgggcgcgagcaaggagcaggtggtcaaggtcatggaccccaggctgtcgagcgtgccggtgcacgaggtggcgcacgtgttctgcgtcgcgctcctctgcgtggaggagcagagcgtgcagcgccccacgatgcgggaggtggtgcagatgctcggcgagctccccaagccagccgctgccgctgcagctgcagggcaaggagacgaggttcccggcagcggcgacggcgacgaatgttccgccgcgccgtcgggtgctccggcagctgatgaatctgttgaagcgccgcatggcgaagccaccaaagaaccgagctcacagtcttcgccgaccactgatctcatcagcatctgagagctgtgtcgagcttgtttttttttcttctcgttgctatgtttccttccttctccttgcgaagttcagatgtttggatgtttctagattattagggtttggtgttttaggtctcacctgcacttagggtggtctctgagattcagacatcttgtgttcatccatcttcatttaggtaggccccgggattcagacatcttgtgttcatccatcttgtgttcatgcatcttagcctcacttaggacactgctgtgtacagtagtacatatcaagctccctaaatctccattttgctgtcagaactgaaggaccatttagggggggattaaggagcctaggattatggagcagtcaaggtcgttaatgttgctgtttgtacttgtgttaataaggtgggcattgatatgttgctgtactgcacttcgccttcaagcaatcaagcaagcctcagtcaatgcaatgc

SEQ ID NO: 142569 - DNA, 1400 bp, Zea Mays
gcttcttgtggggagaagtattgattatgggaaaaagggggagtttttgagagtttttgaaatcttttgatcaatctcttttggaatgactctctttatgcttcaacatgtgtgtttgacttagagatagagatttgaggttgatttgcaaaaacaaaccaagtggtggcaaaggatgatccatatatgccaaaattgaatcaaaagaaatttgagttttatttgaagtgatattgcacttgttctagttgttttatgttgtgttgacataaatcaccaaaaagggggagattgaaagggaaatgtgcccttgggccatttctaagtattttggtgattgagtgccaacacaagagcttaaatgtgattttatgctcatggatggacaaagtgcaaatcaagagtaaaggtatgtttctaagccttagtacattggttttgtgtactaatatacttgtctaagtgttagaaacagaaagaagaagaaaagaaaagaggtgaaaaaggcttggctgtgtactggcaagactcagctcagtctggcacaccggactgtccggtggtgcaccggacagtgtccggtgcgccaggctgactcgaagtgaagtggccgctctcgggaattcgctgacggcgtacggctaaaattcaccggactgtccggtgtgcaccggactgtccggtgagccaacggtcggccggtccaacggtcggccgggccaacggtcggccacggaatctgcacgcgacacgtggccgggccaacggtcggaagggggcaccggactgtccggtgtgcaccggacatgtccggtgcgccaacggctcccagatctgcaaccgtcggatgcgccattttaggaaggaaatcgggcaccggacagtgttcggtgtgcaccggactgtccggtgcacccgacgacagaaggcaagattggccttccagatttgtgctcaacggctcctagctgccttgggctataaaagggacccctaggcgcatggaggagaataccaagcaaccttagagcattcttgatcatccacactcagtctttgcgcattcgtttgtcattctcagtgattcgagctccgttctagtgagaactttgagatagtcttttgagctcgattcttggccgtgtgtgtgcgcattttgctgtggatttgtgtgtgttgcttccctcccttactccgtgcttctttgtgaacttcaagtgtaagggcgagagactccaagttgtggagattcctcgcaaacgggatattgaaaggcaaagcaaaacaccgtggtattcaagttggtctttggaccacttgagaggggttgattgcaaccctcgtccgttgggacgccacaacgtggagtaggcaagcgttggtcttggccgaaccacggg

SEQ ID NO: 142570 - DNA, 1437 bp, Zea Mays
gtcaaaactcttttgttgtctctcttgtcaaaagttggcttcttgtggggagaagtattgattatgggaaaaagggggagtttttgagagtttttgaaatcttttgatcaatctcttttggaatgactctctttatgcttcaacatgtgtgtttgacttagagatagagatttgaggttgatttgcaaaaacaaaccaagtggtggcaaaggatgatccatatatgccaaaattgaatcaaaagaaatttgagttttatttgaagtgatattgcacttgttctagttgttttatgttgtgttgacataaatcaccaaaaagggggagattgaaagggaaatgtgcccttgggccatttctaagtattttggtgattgagtgccaacacaagagcttaaatgtgattttatgctcatggatggacaaagtgcaaatcaagagtaaaggtatgtttctaagccttagtacattggttttgtgtactaatatacttgtctaagtgttagaaacagaaagaagaagaaaagaaaagaggtgaaaaaggcttggctgtgtactggcaagactcagctcagtctggcacaccggactgtccggtggtgcaccggacagtgtccggtgcgccaggctgactcgaagtgaagtggccgctctcgggaattcgctgacggcgtacggctaaaattcaccggactgtccggtgtgcaccggactgtccggtgagccaacggtcggccggtccaacggtcggccgggccaacggtcggccacggaatctgcacgcgacacgtggccgggccaacggtcggaagggggcaccggactgtccggtgtgcaccggacatgtccggtgcgccaacggctcccagatctgcaaccgtcggatgcgccattttaggaaggaaatcgggcaccggacagtgttcggtgtgcaccggactgtccggtgcacccgacgacagaaggcaagattggccttccagatttgtgctcaacggctcctagctgccttgggctataaaagggacccctaggcgcatggaggagaataccaagcaaccttagagcattcttgatcatccacactcagtctttgcgcattcgtttgtcattctcagtgattcgagctccgttctagtgagaactttgagatagtcttttgagctcgattcttggccgtgtgtgtgcgcattttgctgtggatttgtgtgtgttgcttccctcccttactccgtgcttctttgtgaacttcaagtgtaagggcgagagactccaagttgtggagattcctcgcaaacgggatattgaaaggcaaagcaaaacaccgtggtattcaagttggtctttggaccacttgagaggggttgattgcaaccctcgtccgttgggacgccacaacgtggagtaggcaagcgttggtcttggccgaaccacggg

SEQ ID NO: 142571 - DNA, 2696 bp, Zea Mays
tctttcgcattctttcttgtgatcaaacactcacttgtaattgaggcaagaggcaccaatcgtgtggtggcccttgcgggaagtttgattcccaagtgatttgagaagagaagctcactcggtccaagggaccgtttgagagagggaagggttgaaagagacccggcctttgtggcctcctcaacggggagtaggtttgagagaaccgaacctcggtaaaacaaatccgcgtgtctcactttactatttgcttgcgatttgtttttcgccctctctcgtggactcgattatatttctaacgctaacccggcttgtagttgtgattattttgagaatttcagtttcgccctattcacccccctctaggcgactatcagggagtaaatgctacattctagtgaagaagggtagaaattctaagtttgctcccaaagccgtagaagggtttttgttaggttatgactcaaatacaaaggcgtatagagtcttcaacaaatcatcgggtttggttgaagtctctagcgacgttgtatttgatgagactaatggctctccaagagagcaagttgttgatcttgatgatgtagatgaagaagacgttccaacggccgcaatacgcaccatggcgattggagatgtacggcctcaggaacatttggagcgagatcaaccttcttcctcaacaaccgtgcatcccccaactcaagacgatgaacaggttcatcaaaaggaggcgtgtgatcaagggggagcacaagatgatcacgtgatggaggaagaagcgcaaccggcaccttcaacccaagttcgagcgatgattcaaagggatcatcccgtcgaccaaattttgggtgacattagtaagggagtaactactcgatctcgattagttaatttttgtgaacattactcctttgtctcttctattgagcctttcagggtagaggaggacttgctagatccggattgggtattggccatgcaggaggaacttaacaacttcaagcgcaatgaagtttggacactggtgcctcgtcccaagcaaaatgttgtgggaaccaagtgggtgttccgcaacaaacaggacgagcacggggtggtgacgaggaacaaggctcgacttgtggcaaaaggttatgcccaagtcgcaggtttggactttgaggagacttttgctcctgtggctaggctagaatcaattcgtatcttgctagcatatgccgctcaccattctttcaggttgtaccaaatggatgtgaagagcgcgttcctcaacgggccgatcaaggaggaggtgtacgtagagcaaccccctggcttcgaggatgaacggtaccccgaccatgtgtgtaagctctctaaggcgctctatggacttaagcaagccccaagagcatggtatgaatgccttagagactttttaattgctaatgctttcaaggttgggaaagccgatccaactcttttcactaagacttgcaatggtgatctttttgtgtgccaaatttatgtcgatgacataatatttggttctactaatcaaaagtcgtgtgaagagtttagcagggtgatgacgcagaaatatgagatgtcaatgatgggcgagttgaactatttccttgggttccaagtgaagcaactcaaggacggcaccttcatctcccaaacgaagtacacgcaagatctgctaaagcgatttgggatgaaggacgccaagcccgcaaagactccgatggggaccgacggacacaccgacctcaacaaaggaggtaagtccgttgatcaaaaagcataccgatcaatgatagggtctttactttatttatgtgctagtagaccggatattatgcttagcgtatgcatgtgtgctagatttcaatccgatcctaaggagtgtcacttagtggcggtgaagcgaattcttagatatttggttgctacgccttgcttcgggctctggtatccaaaggggtctacctttgacttggttggatactcagattccgactatgctggatgtaaggtcgataggaagagtacatcagggacgtgccaattcttaggaaggtccctggtgtcgtggaactctaagaaacaaacctccgttgccctatccaccgctgaggccgagtatgttgccgcaggacagtgttgcgcgcaactactttggatgaggcaaaccctccgggactttggctacaatctgagcaaagtcccactcctatgtgacaatgagagtgctatccgcatggcggaaaatcctgttgaacacagccgcacaaagcacattgacatccggcatcactttttgagagaccaccagcaaaagggagatatcgaagtgtttcatgttagcaccgagaaccagctagccgatatctttaccaagcctctagatgagaagaccttttgcaggctgcgtagtgagctaaatgtcttagattcgcggaacttggattgaattgtagcatacatgtgtttatgcctttgatcatgttcattctgcattttgttgcttattgtggtgctcaagttgtacaaacattcactggacctcacaagtccttgtgtaagtgatgcacatatttagggggagatgtgttacaacttgaccctttgagactaaccatatgcttgagtttgcttgattcagtctcgaaggagaattgaaagggaaaaggtggacttggaccatg

SEQ ID NO: 142572 - DNA, 2438 bp, Zea Mays
gatttgagaagagaagctcactcggtccaagggaccgtttgagagagggaagggttgaaagagacccggcctttgtggcctcctcaacggggagtaggtttgagagaaccgaacctcggtaaaacaaatccgcgtgtctcactttactatttgcttgcgatttgtttttcgccctctctcgtggactcgattatatttctaacgctaacccggcttgtagttgtgattattttgagaatttcagtttcgccctattcacccccctctaggcgactatcagggagtaaatgctacattctagtgaagaagggtagaaattctaagtttgctcccaaagccgtagaagggtttttgttaggttatgactcaaatacaaaggcgtatagagtcttcaacaaatcatcgggtttggttgaagtctctagcgacgttgtatttgatgagactaatggctctccaagagagcaagttgttgatcttgatgatgtagatgaagaagacgttccaacggccgcaatacgcaccatggcgattggagatgtacggcctcaggaacatttggagcgagatcaaccttcttcctcaacaaccgtgcatcccccaactcaagacgatgaacaggttcatcaaaaggaggcgtgtgatcaagggggagcacaagatgatcacgtgatggaggaagaagcgcaaccggcaccttcaacccaagttcgagcgatgattcaaagggatcatcccgtcgaccaaattttgggtgacattagtaagggagtaactactcgatctcgattagttaatttttgtgaacattactcctttgtctcttctattgagcctttcagggtagaggaggacttgctagatccggattgggtattggccatgcaggaggaacttaacaacttcaagcgcaatgaagtttggacactggtgcctcgtcccaagcaaaatgttgtgggaaccaagtgggtgttccgcaacaaacaggacgagcacggggtggtgacgaggaacaaggctcgacttgtggcaaaaggttatgcccaagtcgcaggtttggactttgaggagacttttgctcctgtggctaggctagaatcaattcgtatcttgctagcatatgccgctcaccattctttcaggttgtaccaaatggatgtgaagagcgcgttcctcaacgggccgatcaaggaggaggtgtacgtagagcaaccccctggcttcgaggatgaacggtaccccgaccatgtgtgtaagctctctaaggcgctctatggacttaagcaagccccaagagcatggtatgaatgccttagagactttttaattgctaatgctttcaaggttgggaaagccgatccaactcttttcactaagacttgcaatggtgatctttttgtgtgccaaatttatgtcgatgacataatatttggttctactaatcaaaagtcgtgtgaagagtttagcagggtgatgacgcagaaatatgagatgtcaatgatgggcgagttgaactatttccttgggttccaagtgaagcaactcaaggacggcaccttcatctcccaaacgaagtacacgcaagatctgctaaagcgatttgggatgaaggacgccaagcccgcaaagactccgatggggaccgacggacacaccgacctcaacaaaggaggtaagtccgttgatcaaaaagcataccgatcaatgatagggtctttactttatttatgtgctagtagaccggatattatgcttagcgtatgcatgtgtgctagatttcaatccgatcctaaggagtgtcacttagtggcggtgaagcgaattcttagatatttggttgctacgccttgcttcgggctctggtatccaaaggggtctacctttgacttggttggatactcagattccgactatgctggatgtaaggtcgataggaagagtacatcagggacgtgccaattcttaggaaggtccctggtgtcgtggaactctaagaaacaaacctccgttgccctatccaccgctgaggccgagtatgttgccgcaggacagtgttgcgcgcaactactttggatgaggcaaaccctccgggactttggctacaatctgagcaaagtcccactcctatgtgacaatgagagtgctatccgcatggcggaaaatcctgttgaacacagccgcacaaagcacattgacatccggcatcactttttgagagaccaccagcaaaagggagatatcgaagtgtttcatgttagcaccgagaaccagctagccgatatctttaccaagcctctagatgagaagaccttttgcaggctgcgtagtgagctaaatgtcttagattcgcggaacttggattgaattgtagcatacatgtgtttatgcctttgatcatgttcattctgcattttgttgcttattgtggtgctcaagtt

SEQ ID NO: 142573 - DNA, 1120 bp, Zea Mays
cttacatcagtgatacattcgtttaaattaaacatcccaaattagcatcaatgaatctgacgactgtcctaatgccttgtttggaagtgctggcgttgtggtcaataatatgggacatagttctatccaagtggacctgatgtgaaccttgcagcaatgatgtgcacttcttgaaattaaacctccaaagttagcaacagtgaactatagaataagataactgttctactgttttgtttggaaatgctggtgttgtggccgacaacaagggacgaagttggcaatgcacagtgtttactttcaaattttaaagaactattacttactctgtaagctactcccatctgtctcacatgtgtgtaaatcgcaggttatattcctgctgacgaaaggtggagtaaaacaggatgacatcggaaaggttatcgccttggatccacagctcttgggctgtagtatcgcacataagctagaagttagtgtcaagtacttccggtcgctgggcatctaccactttgtgctgggtcagatgattgccgacttcccaacgcttctcaggtacaatgtggatatcctgagaccaaaataccagtacttgaggcgtgtaatggtgcggccgctgaaagatctcattgagtttccacggttcttcagttactccctggaggacaggatagaacctcggcaccgaactttggtggcgaacaggatcaacatgaagctgcgttacatgctgactggttctgatgaagagtttgcgcagagggtgcgagaggctgttgagaggagagcgagatttgaagctggaaaggctgctggtctggagacattctcatgttcttcagagacatctagtgatgcagaagctacagaagcagcagcatgccaaaacagcacggatgtggtcggggttctgcaaaaacaagcatagcattgcttccttaccgtgtgcatgttctaaatgggaaggaaaagattacatatatttcactgtgggtaagaatgcaaaaatgctaatgttgtgacaaaataataaagtagagaatggaatagcaacgtccacgagtaaagtgaaaccctagcgattcgtgcatcccctttttatagtcacaataaaaaa

SEQ ID NO: 142574 - DNA, 910 bp, Zea Mays
ggcgtaccatccggtccacccaccataatgtttacgcttagttatacacagtggtggcggttgcacgacatgagcgagcacagtgaagccagcacaaccgcgatggacaagcgtccccatagacgagatccatggcggagcgccggaagagcatctcctctgtgtcgtttgcttcggcgagcgccgggaggggataatggcagcagtgagctcggtctctgttctgctcgccgctgaggcctcttccgttgaggcgtgctgctaggaatgtgttggagggaggagggagaagggcttcgagtcccctgctcctcgcgaggtatgggcagcggcgcggacgcccggctgctgctgctatggccgacgaagcggagttggccctcgaagatgcagatgccgcaatgagggtggccgccgacgacgacagcatcacggccacggtggtgtccgtgctgctcacacttgcattcgtcggcctctccatcctcacactcggggtgatctacctgtcggtgcaggacttcttgcagaagagggaaaaggagaagtttgagaaggaggaggccaaaaagcagaaagaggaggcgaggaagaagagggctaagtccaggcagaagagaagaaattattgatctcaggatgaactacccccaccaatgcttacacatacctgttttgacaagagccgagcagcgatgcttccatttcggaccacgacgtagctaaaggctaatggttccaaatgtctgaagtaccgaagacagggctagctcctcgttttttgtcatttcaaaaaaaatcatgtatgattgcaacaatattggcaaaatatcgttgtactttatattttgatatactgtgaacaaaacaagtgccctatgagaccatcgtgatttatgcattttcaaac

SEQ ID NO: 142575 - DNA, 1035 bp, Zea Mays
atgacgagggcaatgcaggccctgtccccttggctgaaccacccaaggaggacgatcgcccaggtggaaggtctgatgctaacggccgctgcgctgctgctgatccagctcttcttgggcttctacaggcggcggtgtcgcaactccttcctcagtactgtcctgcgggcgtcttccaagatcatggaggctctcatcatctacactctcggtacgatgcagtcctccccgatcaagaactcgttgtatcccgtctgggctgcttttctcgtcatggcttcggcgggcaccaccgccgtacaggactatgatttctgtggcagcttctacaacaagtacatggagggtttcgtcgacttaattaagtacggcttctacgtgaccatgttccgtctgctcattgatccaaacccttataccttgaaggcagccctgggcctgaagtggcatctcaagaactccagggcaagcagttcacgctgtgtcgtcgccctcttctttttcgctttagtcacaaagggcattgaatcctgtcttctagcacttctggtatacaagcggaagtcgaatcttttcacacaggccggagaggcggaggaaggaactgcaaataacagtacgacgagaagtcaccctcggagcatgaatggctacgaatatggagtctgctaccgtccgtgtggaggtggagtcgtcaccatcgcccagatatgggatagtctggggaccggagaggaagacaaccctcggaagatcttgcagaaaggcatcaagctcggtaagcagctggagaggatggcggatggagatcgctggaaggcgctgcaagatttctgggccaagacaaccatccatgctgctaagtcgcactacaccaccaagcaacacatgcagcaccttgaaagtggcggggagttcctcacgcacatctgggctctgcttgctcatgcaggcattctctaccttaattctgtgaacaatgaagatcaggaggaccaggctaatctaggctctggaccctcagctgctgcatga

SEQ ID NO: 142576 - DNA, 375 bp, Zea Mays
gtagccagaatctctgttggcgtcgcctgtttcattgtgttcatgatgatcctttcagtaataggcctttttaggaagtaaaggaaacgtttgtgctctggtttctacaagaggcttacacagacctgttttgacaagagccgagtagcgatgcttccatttcggaccacgacgtagctaaaggctaatgattccaaatgtctgaagtatcgaagatagggctagctcctcgttttttgtcatataaaaaaatcatgtatgattgcaacaatattggcaaaatatcgttgtactttatattttgatatactgtgaacaaaacaagtgccctatgagaccatcgtgatttatgcattttcaaactaaattttacga

SEQ ID NO: 142577 - DNA, 399 bp, Zea Mays
gctcggtctcttccgttgaggcgtgctgctaggaatgtgttggagggaggagcgagaagggcttcgagtcccctaatcctcgcgaggtatgggctgcggcgcggacgcccggctgctgttgctatggccggcgaagtggagttggccctcgaagatgcagatgtcgcaatgagggtggccgccgacgacgacagcatcacggccatggtggtgtccgtgctgctcacacttgcgttcgtcggcctctccatcctcaccctcggggtgatctacctgtcggtggaggacttcttgcataagagggaaaaggagaagtttgagaaggaggaggccgaaaagcagaaagaggaggcgaggaagaagagggctaagtccaggcagaagagaagaaattattga

SEQ ID NO: 142578 - DNA, 181 bp, Zea Mays
ttttctcttattcgggtgtcgcgctttggggatttagaatttgtggaaaacattcaccagtatagcagtagagtggttggtcgggagctgtcgtgcaagcgagttgggccgcgaatcgcaatccggcccactaaccctcccctaaccctagccgcccccctttttcccccttgggttgttg

SEQ ID NO: 142579 - DNA, 279 bp, Zea Mays
tttttttttccttttatttacttgattcaaggactgccagtggccaaagggcactgccaccttcttttgcttttacgattattattacttcgaacatggctagaatacaatggttcagcttaatccatgaaatgtacggggatggattgttctcagctattgatcgattaatcctgcagcacgtcctttgctgactattgtgtttcaatggacaaggatggtggagatacagtgagcatgaaagtcattattatttttagccttggcactatatgtttg

SEQ ID NO: 142580 - DNA, 960 bp, Zea Mays
atggaagcgatcctgatggccgacgacgaagactgggtttacgtcctctcacctgaggagagggtggaggctgttgctgtcgccgttgaggagacggtggacgaggaagtggaggctgttgctgtcgccattgaggagacggtggacgaggatgtggaggatgttgctgtcgccgttgaggagacagtggacgaggatatggaggatgttgccgttgaggagacggtggaggaggacgcggaagctgttgccgttgccgacgccgtcaccgtgaccgtcaccgccgccattgcaggagaggacaatccacaggacgccgccgccgccgaggagcaggaggagagcgacgaggaggaggaggaagcgaaggtcggagcgcagccagcggcggaagagctcctgcccaacatcgacgagcaaggagaagacgaggagccggcggctgccctcgacgacgtcttgccgtatcttctgtaccactacttcggctaccgcggcgcgtacggccccgctacacgatctgggtacggctactactactacggcggcgaggctacaggatctggttacggctacagcgagacgtaccggtacctgccgggatacgagacgatggtggtgtaccaggcgccgccacatgccttcagcgccagcttcttgtacccgtacgggtacccgggccccgcgtacgtgccgtcggtccgtcgccgtcgagccgtcctcgcacgccgtggctcctacgcagccggagcccggatcttggcattagtcatgatttaaattcagttttttttagagtagtagtagtagtatacaacagataagactttgctagggtcgatttgatggatcgaatttaagtgtcgttattgtttcgtgtgcaaactgcggttaatacaaatagatcgtgagttttcaccatgctgtttgtgcattctgtcacttgttccgtgtcgtcgc

SEQ ID NO: 142581 - DNA, 988 bp, Zea Mays
acgacggccattatatatattgagcgcccgggaagcttcgtcgccgaacccatgtcgacgagcggcgcgaggtcgtggtcgccgccgccgcggccgagccggtacgagtcgcagaagcggcgggactggcagaccttcacgcggtacctgggcgcgcaccgcccgccgctggagctgtgccgctgcagcggcgcgcacgtgctcgagttcctgcgctacctcgaccgcttcggcaagacgcgcgttcacgcgccgtcctgcgcggcgtacggcggcggcggcggcggacggccggtggaggccgccgtggcgtgccagtgcccgctgcgccaggcgtggggcagcctcgacgcgctcgtcggccgcctccgcgccgctttcgaggagcgccacggcgcgcgtgggatctggacgtcgtcgcaacagcccgacggcggcgttggcgtcggcgtcggtggcggcgacggcgccaaccccttcgccgcgcgcgccgtcaggctgtacctgcgcgacgtccgcgacgcgcagtccagggcgcgcggcatctcctacagcaggaagaagaagaagaggagcaagcagcaggacggcgccgccgcagccgggtgcgcccgcccgcccgtgaccagcgtgacgttaatgcctgctgctgctctgccgcacgcaccgcctccaccatgtccgccgccgccgctgccgccgccgtactgcctcaccggtgtgcccttcgagttctgtgactatggcagcgtcctcggaggagttaccgccaacggtgcgcctggcttctacttgccatcgctgttcaacaccttcggctagctagggcatgctgcctgccatgtttgccgccatgcgtatccttgctttcggttgttcttgtgttcagacttcagagacgttattaattcatgccctagagtgtccttcctttcgcttggtgaatatggcatccaaataatataattaatttctctgttgacagcgc

SEQ ID NO: 142582 - DNA, 3813 bp, Zea Mays
cgtctccccgaccctgcattctcctctctgggaagattcaaatcccccacgggccacggcccacgccacgccatctctacccagccacggcgagcgccaccggccccgccgcgccgcaagaactctaccgtaacgtaaccgagaaaccccgccgccggcgcgatggactggtactccgacgactcggaccccgacatcgacgaggacctgcgggaggacctcgacgcgctgcgccgctcctgcatcctctccggggccgacccggacgctgccgtagcgcaggtctcctccggcctcgcgggcccctccaccccagccctcgccgcggcgccgggggcggcggccgaccatcatcatcatgcctcctcttcggacgacgaggaggacgaggacctcgccctcgtccgcagcatacgcgccaacctccaccacctccataatagtaaggcctcgaccgtcctcccggacgccgcccccgcgccccgggacgacgacgacccgtcctcgcgcccgatctgcacgtggccgccgtccgacactgacgaggaagaggatgacctcgagacgctccgcgccatccagcgccgcttctcgcattaccagtcaagtacctccactgcatcgccaaagaccatgaaacctgaggcgtcacagggagtccacagtgacctttttgccgacaggtctggtgatgattttgctgtgcagaagcaaaatgcaattgttcctcatggagatgggtttccaaaggctgcgctattgttagtggatgctctcaagaagaacagagcataccagaagttcattagaagaaaaatggtaaacattgaagcgaaaattgaagaaaacaaagatctcagggatcgtgtaaaatgtcttttgggctatcagttaagctgccgaaaatcagtcagcagatctttaggacagaaggaggatcctcgtgtcaggttgatttcccccctgaaatcaactcagccgtgtacaaagaacaaatacaggaagattcctgcactatttctcggcccagctgagaacccacatgtttcaaagtatgaaatggcgctgaagcaatttccaatgtcatttaagaagcaaccatggtcagatgcggagaaagataaacttgccagaggaataaagcagcaataccaagaaacattgattttggattcgctgaataatggaagtgctgatggtgacttcagtgcacttgatatggcatatgcactgacaaatggtgctggtaattttgaggtgactccggaaaatcttagatcggttctaccattaataaactgggataagatttctgccatgtaccttcctggtcgatctggtgctgaatgtgaatcgaggtggctaaactgtgatgatccattgattaaccatgaagcctggactgcagacgaggaaacaagacttctactaattattcaagaaaagggaatgtgcaactggattgacattgcagtcacattgggtacttaccggactcctttccaatgtcttgttcgttatcaacgaagtttgaatccccacatactgaacaaggcctggacaaaggaggaagaccttcaactccaagcagctgttgagacctttggtcagaaatggcaacttgtatcggctagtctggatggtcgcactggcactcagtgctctaataggtggagaaaaaccttgcaccctgaaaagaccagtgtgggaagatggcttctggatgaggacaaacgcctcatggtcactgttaaactaattggacctggcaggtggagtttgattgctccgtttattcctggccgaacacaaacacaaatctttgagaggtggtgcaatattcttgatccagatctatatcttgatgactggcggcctgacgaagattccacattattggctgcagtatctgagtttgggccttgctggtcgaagatttctaaaacgataattcctggacgtaatgatagtatgtgctatagacgatggagaaaactttgtaaacatgaagtccagaaagctagagaagccagacaattgaagaaagctatttttcagaacaattttgttgatagagaaaaagagcggcctgcaatttgccctcgtgacctaatatcacttttaccctcgaaaggtgacggatgtgatgtggccattgtaaggtattgcaaatttctatgtagtagttgtatacttatctcattgggtggatctgaaaagcaaggggaagagaaccacctagctctgtccaatattgtcaacatttcatctggtcttgattgtgttgctgctaattctgttttgaatgctagctcaaggaggccaaggagagtatcgtcaggacgtagatcaaaaaagcataccgaagggaataatattgctgcgcctgatgatctcaatgcttcatccagcgcccctagcagttccataaagagaaaatctactactggtaacaatgtagctgcaaaaaagagatcgagggtatctatcagtgttaatgctgataacgaggtagagaaaaatagaataacagactctgtggctgttagtgaagaggggttagtcaaaaagagaacaaggcgtccaaaacctgttggcaatgagggggctgtcagaaagagaggaggctctaataatgaggtagggacaaatatcataacggaatctgtggctgttggtgaagagggagtagtcaaaaagagaacaagacgttcgaaacccgtagggaatgagggggctgataatgaggtaggaacatatagaataacgggctctgtggttgttggtgaagagggagtagtcaaaaagagaacaaggcgtagttcaaaacctgttgacaatgaggaggttgtcagaaagatgaggggctctatcaataattatgatgaggcaggaacaaatacaatgatgaattctgcgtttggggaggaggaagtagtcaaaaagaaaacgagacactcaaaacctgttggcactgaaggggctgcctctattggtggtgatggcatggtcaacaagagaaggacaggttctgtctccaccgagaatcttggtgctgtgagaaaaaggaagatagtgtcatcaaggaggaaattagctgaagttaatttgccaacagaggagggtgtaccgaatgctgtccctgacttggactttccttgtgcaatttctgaagaaagagctgttgatgttggaaatatggataaaggcagaagaaaatcaactccgagacccaagcagataaacatgcctgaagaggatgctgataaaaactccacattcacacgacttgtcaattgcctgtcgtttgcccgtatgaaaggaatcgacaggaacaaaagataattgaagttgagaaaccgtcgcttgaaaagggtttagtttcacctgtgatgatggttttgcgcgtggaggttgcagtcagtacgcgtggaatgcccaaaggatgacgctttttaagctggagtgtcatcaggcacattgccttgtgtgtgagcagctccacagtagattcccttacacaaggtctcttttaactactggaggacatctattataatgagcttgttttgccgatgcgttactgtgctgcctcgctcttatgcagggatgttttttttagacagaaccagggtcatctggatgtcatctgttgattcgaaaactggcaccacatatacaggtagtaataacttgtaagtgcatgcaaagagtatcacatgaggtttggattggatctaattgatatacgttctccattgcgattctttgttttttggtggcttattgctaaacagaggtcatttctatctt

SEQ ID NO: 142583 - DNA, 714 bp, Zea Mays
ctgctagggttaatccactggctctcctatatagaagcgcggcgagagctcgcaccgccgccgccgccgctgtcgcatcacaggcctctcttccggtttccccccaaacccgtccgagaggcagtcatcccgccgcgatgagggccaagtggaagaagaagcggatgaggcggcttaagaggaagcgccgaaagatgaggcagaggtccaagtaggcagattcatggagtgtccccgcctggagtctctctgcgttcggttgttgtttactgagtaattttagtttttttactaagacagtctgttatggatcagaaattccttgcgtttgtccgtggtctagatattgcatcaagtgttctgcactttattctttagttgttagttgatgcgagtgcttgtcaatggttgtggacttcgaaattgctatatgtaggtagggcctgagcctgacgtgcatatatagggacactcgttaccaaagtcgtttagaaaaccgtttgttgctaccaaatcgttagcagacaatggtaagctgacctgacatgcatatatgttcgtggcttgtggtcggaattaggcaactatgaatcagtttttggcagctaaatgtttcccaacttaggccggagtactttaaattttattcctttctagtttcttctataaaaaaggtccagctccatgtgctttgttgtaacttaaaaaatgaaa

SEQ ID NO: 142584 - DNA, 1653 bp, Zea Mays
tccaaactccatctgccggggcgccacgcaccacaggcacaggtacggtatgcgaccccacggccgcctcccctcgttaacacgtcgcggcctcgctaacgcgcccgcgctagcgcgagtggtggcacccacgcacactcttctcccccacgagtccggaccccggaggagccaagccatggcgtccacctcctgctgcctcctccaccagtcaaccgcccgcctcggcgcgtcgccgcgcctggccgccgccccgccgcgcagcgcccagctgctcgtctgcaaggcccggaagcaggaagccgccgcggaccagagcgacgtctcgcgccgcgccgcgctcgcgctcctcgccggcgtcacggccgccgccggcgccaaggtgggtcctgccgccgcggcatacggagaagcagccaacgtgttcggcaagcccaaggcgagcacggagtacatcgcgtacagcggcgacggcttcaagctgctgatcccgtccaagtggaaccccagcaaggagcgggagttccccgggcaggtgctccgctacgaggacaacttcgacgccaacagcaatgtgtccgtcatcatccagcccacgtccaagaagaccatcgccgactacggctctcccgaggagttcctctcccaggtcgactacctgctcggcaggcaggcctacggcggcaagaccgactccgagggcgggttcgagaccggcgccgtggccaccgccaacgtcctggagagctccacccccgtgatcgacggcaagcagtactacgccgtgtccgtgctcaccaggacggcggacggcgacgagggcggcaagcaccagctcatcgcggccaccgtctccgacggcaagctctacatctgcaaggcgcaggccggcgacaagaggtggttcaagggcgccaggaagggagtcgagaaggccgcctcctccttcagcgtcgcatgatgatgtaattttatttcttcgatgggatgggatgcacgcactacgtagagagcttggctaggccaggcctggctgagcacgcttgtgtgttccttcgactgtacatgagaacaaagactaaggagagctccattcccgtacaaggatcgatttcttcagtcacgcaaattgtttaggaaatcttagtgctaatagtagcgcttcgatgttcccagccatgagaacaaagactataagcatcttccgggacttgaatcagagttcctgagcttgtggcctggcctgagccacaggcacacaaagtcatatacatacccactaaagaaaaaaaagtctcatactcataccactacctatcatgggtacaaaattataccattcctgtaaccaaccactaacattacagtagacatgatcacttaaattgcaaaagtaactaccaaatacaaaatgttgaaatatcatatctcatcaatatcgaaagatactaaaataacatattatctttgtactatcgtgacaaatttattgaacccatcataaacttatcacaatgtcaacaacattcaccattaaatgtcaacatcatacaagcttatgcatgagagagaacacgctccttaatccggacccacatgtcatatgttagcggcttttgtatcgggtagcaggtacggggcaagagaaaacat

SEQ ID NO: 142585 - DNA, 1395 bp, Zea Mays
tccaaactccatctgccggggcgccacgcaccacaggcacaggtacggtatgcgaccccacggccgcctcccctcgttaacacgtcgcggcctcgctaacgcgcccgcgctagcgcgagtggtggcacccacgcacactcttctcccccacgagtccggaccccggaggagccaagccatggcgtccacctcctgctgcctcctccaccagtcaaccgcccgcctcggcgcgtcgccgcgcctggccgccgccccgccgcgcagcgcccagctgctcgtctgcaaggcccggaagcaggaagccgccgcggaccagagcgacgtctcgcgccgcgccgcgctcgcgctcctcgccggcgtcacggccgccgccggcgccaaggtgggtcctgccgccgcggcatacggagaagcagccaacgtgttcggcaagcccaaggcgagcacggagtacatcgcgtacagcggcgacggcttcaagctgctgatcccgtccaagtggaaccccagcaaggagcgggagttccccgggcaggtgctccgctacgaggacaacttcgacgccaacagcaatgtgtccgtcatcatccagcccacgtccaagaagaccatcgccgactacggctctcccgaggagttcctctcccaggtcgactacctgctcggcaggcaggcctacggcggcaagaccgactccgaggtccgtaatataaccctgtggactgtggtgacgacggccatgcatgtgtgcatctctgtagctgcagtgctgcttgccttacatgaatcgacgtgcgtgcagggcgggttcgagaccggcgccgtggccaccgccaacgtcctggagagctccacccccgtgatcgacggcaagcagtactacgccgtgtccgtgctcaccaggacggcggacggcgacgagggcggcaagcaccagctcatcgcggccaccgtctccgacggcaagctctacatctgcaaggcgcaggccggcgacaagaggtggttcaagggcgccaggaagggagtcgagaaggccgcctcctccttcagcgtcgcatgatgatgtaattttatttcttcgatgggatgggatgcacgcactacgtagagagcttggctaggccaggcctggctgagcacgcttgtgtgttccttcgactgtacatgagaacaaagactaaggagagctccattcccgtacaaggatcgatttcttcagtcacgcaaattgtttaggaaatcttagtgctaatagtagcgcttcgatgttcccagccatgagaacaaagactataagcatcttccgggacttgaatcagagttcctgagcttgtggcctggcctgagccacaggcacacaaagtcatatacatacccactaaagaaaaaaaa

SEQ ID NO: 142586 - DNA, 2337 bp, Zea Mays
ccattttttgctgggtctggaatctcgattccatgggagaagtcacaatgaggcctctcggctacgtgactctcctggccatttttttcgctatccacctacacctctgtgtgtcctcgcgcctcctcgccgaacgtccggcgactccaaatggccaggaatcagcggcggcggcggcgccggtgccttccgccgttgggtcgttgccggagaacaccccggcgagcaacgacgtcccggtgaacatgcccgccaaggccaacgcagtgacaggtgcagcggcgccggtcccttccgccgccgggtcgttgtcggagaacactccggcgagcaacgtcccggtgaacatgcccgccaacgccaatgcagcgataggtgcagcggcgccggtccctcccgccgctgggtcgttgttggaatacaccccagcgaccaacgtctcggtgaccatgcccgccaacgccaacgcagcgacaggtgcagcggcgccagtcccttccaccgtcgggtcgttgccggagaacactccggcgagcaacgtcccggtgaatatgcccgccaacaccaacacagcgacaggtgcagcggcgccggtccctcccaccgccgggtcgttgctagaatacaccccagcgaccaacgtcccggtgaccatgcccgcccacgccaacgcagcaacaggtgcagcggcgccagtcccttccgccgctgggtcgttgccggagaacactccggcgagcaacgtcccggtgaacatgcccgccaatgccaacgcagcaacaggtgcagcggcgccagtcccttccgccaccgggtcgttgccggagaacactccggcgagcaacgtcccggtgaacatgcccgccaacgccaacgcagcgacaggtgcaacgccgccggtccctccccctgctgggtcgttgctggaatacaccccagcgaccaatgtcccggtgaccatgcccgccaatgccaacccagcgacaggtgcatcggcgccggtccctcccgccaccgggtcgttgccggagaacaccccgacgaccaacgtcccggtgaccatgctcgccaacgccaacgtagcgacaggtgcaccgccaccggtccctcccgccgtcgggtcgttgtcggagaacatcccggcgaccaacgtcccggtgaccatgcctgccaccgcaacgacaggtgcaccggtccctcctgccgctgggtcgttgccggagaacaccccggctaccaacgtcccggtgaccatgcccgccaacacagcgacaggtgcaccggtccctcccgctgccgggtcgttgccggagaacaccccggcgaccaacgtcccggtgaccatgcccgccaacgccaacgccaacgcagcgacaggtgcaccggcgccggtccctcccgccgtcgggtcgttgccggagaacacccagacgaccaacgtcccggtgaccatacccaacacagcgacaggttcacccgcggcggtccctcccgccaccgggtcgttgccggaaaacaccccggcgaccaacgtcccagtaaacatgcccgccaacgccaaccagccggccaacgtcgttccaccgcaagtagtggtgtcgaagcttccgccggaggtgctggccaagctcccgcccgacgtgctggccagcatcccgccggagacgctggccaacatcgcggcgtcgcaggggcagctgcagacgagcgagatcctggccaccatcccggcggcgcaggcgcagggccagctgccggcggacctgccgccggaggtgctggccaagctcccggccgtgcagagccaactgccggccaacattacgcccgagatgatgaccagtctcgccgccgtgcagcagcctgcggctgctggccagcctggggcggccccggctctcccggccgacatccctcagatccccaagatgcccgacctctccgggctggccaacatctcgttcccggcgatgccgtcggagcccaggatgccgcagctgccgcccgacttctcgttgtacgggtacgaggtccccatccctaagttcatcaccaagatggtcgacggcaatggcgccggcggtgggcaacaaaactgagccgaagcattgtttcgatgtttgtggcacctgagctgtcaattacacgttaactgaagtttcgccatgcttttcagttctaatgtcgtcattcttttggtttgggtgatgtctggcaggaaatgtgatgatgggctatgttcttgtcatgtatatactctctttgtcctaaattataaattgttttatactttttaaattcaaaatatctaaaatcaattaaatttatgtttttgtt

SEQ ID NO: 142587 - DNA, 1273 bp, Zea Mays
gccggcgctcgcgaacagctcctccggcagctgcacgcggggcacgctggacgagaagatggaccaggcgaactggacggccatgccgagcgcgagcatgaagcagaggatggtgaggaagtggtagtccagccactcgaagaagacccacaccagcgtcgccacgcccagcacgctggacgagatcttcttgttccgccacagaagcacgtcggcggctgcgtgcaggtgcagcagagcagcccaccgtcagcaggaggacgaaacttgcagccattagatgaaggagcggaagaggccaagaagacccaggagggccgaggcccgagggcgtgcagtgcaaattgcaatgcgcggtacgtacatttgccgccgcccagcacgtggtgtaccgacttcttcctgctctcgccgccgccgaacagcttcttggcctgctcggagatggaggagccgtcgccgtcgtcgaaccgcacggacttctgcctcgggaggttctccgcgatggtctccatgatgttgcccatcaggtccgccgccgcgttctctgagtgctccggcatcctcgacgaccctgcccctgaatccccagaaccacgaaacacgtgcgtgcgcgtacaggttagatgcagagtcagtcagtgacagtgtggggtagtcagagccgtgatatgcttcagcttcttgctgctacctgtggttttttttctctctctcaaacaaacaggcctgctgagtgcacaaaggccgaaaaaaaaagcttacagagttacagatacgcccttgacatgaaaaatagctccctcccagtcccaggagctgctggggcgattactagctgaacaagagattaaccatggcccacgtatttctctccactctgaatcaatagcctggatcctgaacagctcaggaactctaaccaaaagaatcggaatctgaacagctcagcctctccttcctttttgtccacctccacggcggattctttattcaggatgcacaaaaggctaaagcaaccaaccagcgaccggccggccggccaaaaacgagctgaaaaggggcttgcttttgcataaactgaccggaggaaactagggaagcgatgagcttaccgaggaacagcagcggttcgagttcggcgcggtgagctcaagtcggggcgccctggccttagcgggtgggcacggcacgcgacggaccaggtgccggaggatgaggactctcttgctcgtcaatggcgccggagaggcagcagagcagcccggtcggg

SEQ ID NO: 142588 - DNA, 289 bp, Zea Mays
caccaatgtgtcgttcttgatgattcatgagaactcctataatttatttgctttagatttaactggtaaagcagcacacagttcctgagctatatattacaccaaaatccatataaatcatgcatatatgcatggactcctttggatacaaatcgtactaattatttgcccactacttgcatgcatgcatcattatattagctgcccagccccagtaactcatggatgcctctttatttctaactagctagctaagcacaagctagacatattaattagtacaggagta

SEQ ID NO: 142589 - DNA, 1099 bp, Zea Mays
cctgccaggagaggcacccacgacggcgacgcattggattggcttgggacagaacgagcgacggcgaggagacggcgataagatttgctacacctcggactgtagctgggagactgcacgaacggcggcgtccacgagtcacgaggagcccagaggcttcttcacagcagcagcggcaggtccgctgatgccagactccccccagctccaccaaccgcctccccctcccgcgccgccgccggccagcgcaacaccagccgcgccagcggcagcaaatgcgcaacccaagctgactgccgtgaagctgaggatgatcatcaagggcgtgctcgggcggtaccagcgctggaaccccgtgcacccgacggccggcaccttctggggtgtggggctcggcgtcggctgtggcgtcggctggggccccggcttcgggcctgaggtgattgggtacgtaggcgccgggtgcggcgtggggttcagcgttgggttcacgctcgccggcgtcggcatcggcctgccgcagcacagcctcatcaggaaccacgaccacggtggttttgcgagcagcgtccctgttgattcagcgagattctacgccctaaccatcatcagaggtctggtatgggacgccatcagctacgtgggcaatgcagcggctatgaggaaagaatctcgacagaagcttccgaggttccaggacagccctcaggttccaggaggagttgatctgccgaagctggggaagggcgtgtcgagtagcatccggtccacggtagaatgcatcagggccttcaaagatcagcgttggcctccttaaaagactcgttggaaatcaaagctggtttcaagttgaatggtaccgccatgggaacttaaacatggtgatatacaagtttttgttttttgttttgttttgttttgatatggaaggggaaattagttgttctagctggaaatgttagtctgcattctagatattatttttgttatgtggatgcatctgtaaatatgactgctgctcttttgctccctccttattcaagcactgtgaaacagggattgtagcacgaaatagaatagaattcccctcttaaattaa

SEQ ID NO: 142590 - DNA, 670 bp, Zea Mays
gatgcacaattagcaggcctcaccgcctcagtgcaggcccgattatttgttgctattcccgacctttgtgtacaagcatctgacacatgaatgacggacagatctgccttctgaatttcacctacaggttttgcgagcagcgtccctgttgattcagcgagattctacgccctaaccatcatcagaggtctggtatgggacgccatcagctacgtgggcaatgcagcggctatgaggaaagaatctcgacagaagcttccgaggttccaggacagccctcaggttccaggaggagttgatctgccgaagctggggaagggcgtgtcgagtagcatccggtccacggtagaatgcatcagggccttcaaagatcagcgttggcctccttaaaagactcgttggaaatcaaagctggtttcaagttgaatggtaccgccatgggaacttaaacatggtgatatacaagtttttgttttttgttttgttttgttttgatatggaaggggaaattagttgttctagctggaaatgttagtctgcattctagatattatttttgttatgtggatgcatctgtaaatatgactgctgctcttttgctccctccttattcaagcactgtgaaacagggattgtagcacgaaatagaatagaattcccctcttaaatt

SEQ ID NO: 142591 - DNA, 1249 bp, Zea Mays
ccagggcccaagaaaacgaacaaaagtgcacgggcttcctctttcctgccaggagaggcacccacgacggcgacgcattggattggcttgggacagaacgagcgacggcgaggagacggcgataagatttgctacacctcggactgtagctgggagactgcacgaacggcggcgtccacgagtcacgaggagcccagaggcttcttcacagcagcagcggcaggtccgctgatgccagactccccccagctccaccaaccgcctccccctcccgcgccgccgccggccagcgcaacaccagccgcgccagcggcagcaaatgcgcaacccaagctggtactccgctgccgcccaccattgcttcttctattctccttttccgcgggggaaaaaaaagtcggatctttgatgaggcttttgctgctgcttgcattgttccttttgtccagactgccgtgaagctgaggatgatcatcaagggcgtgctcgggcggtaccagcgctggaaccccgtgcacccgacggccggcaccttctggggtgtggggctcggcgtcggctgtggcgtcggctggggccccggcttcgggcctgaggtgattgggtacgtaggcgccgggtgcggcgtggggttcagcgttgggttcacgctcgccggcgtcggcatcggcctgccgcagcacagcctcatcaggaaccacgaccacggtggttttgcgagcagcgtccctgttgattcagcgagattctacgccctaaccatcatcagaggtctggtatgggacgccatcagctacgtgggcaatgcagcggctatgaggaaagaatctcgacagaagcttccgaggttccaggacagccctcaggttccaggaggagttgatctgccgaagctggggaagggcgtgtcgagtagcatccggtccacggtagaatgcatcagggccttcaaagatcagcgttggcctccttaaaagactcgttggaaatcaaagctggtttcaagttgaatggtaccgccatgggaacttaaacatggtgatatacaagtttttgttttttgttttgttttgttttgatatggaaggggaaattagttgttctagctggaaatgttagtctgcattctagatattatttttgttatgtggatgcatctgtaaatatgactgctgctcttttgctccctccttattcaagcactgtgaaacagggattgtagcacgaaatagaatagaattcccctctt

SEQ ID NO: 142592 - DNA, 1017 bp, Zea Mays
ctagagattcgtctacattatgagatcccaaatacatcggagttatttgttcacagcaagggagaactgcacgagcagggaagaaaggcagtgcaattctaatatacacgtatgaacagactagagctgtaagggtcatcgagcaagatataggatgcaggttcacagagcttccgaagatgccagtttcagacgaggctgcagacatgtttaatgtcatgagagatactcgctctagatcagttggaagcagaagaacaggtggaccttttagccgtgaaggttatggtgactttgaagaccatcgttccagaggcttcggtgattttgagagatttggtggttcctctgaccgcggcggtggattccgtgactcaggttcaaggtaccacggtggatctggaggtttcagacgatcttccagtgactttggcaggcctagcttcagtcgttctgatagatttggcgactttggagacagtgatttcagcagacgtggtaacgctgactttgggcgttcccggagctctgatgattcaggctcctcacgttatccaagaggctatggtggttctggcacgtcagattccggcaacttcggtggcttcaagggttccaagtgatgaatcggatagggttttcttgtacagttctgaaccttttctaacacctgttgtatgttccttccctgaccaaaccagtagcacttgattcacccgttgtttcacgagtagtttggtgttgtaggcctgtagggttctttcagaacttctgcacttctgatacaaggttgtttcagaacctgcatcactgtatgctctgattctgttctctttaagggttgatttggtgacaaggagatcctgagaggattggaggggattgagggggaaataaactaatttcctcctcaattccctccgatcctcccagaatcccgggtcaccaaatcagccctaataatcctacgaaaggatggcttttggtttctgttcatgtacatggaaatatttgcaa

SEQ ID NO: 142593 - DNA, 1164 bp, Zea Mays
tccaggtctcgccggggggcccgacgtcgagggctcgaggccttagttccaccacttgctgccaccgacgcgccatcgccgcgatgatctccctgctccgacgcgccctcgccgcatccgcctcgtctccggcggccacgtaccggagactcctcgtcgtcgcgccactctctcgcgcggcggcccctccaggcccatgccaggcgcccgcggcagggtcgcaggagccgccgaggcgggcgttccactgttctacgacccccctggggtttaggtccactccggcgtcgtgggccggtccctgtccgggggagggcgagggcgagggcgtggatacgggggctgagaaggggctggagatcgcgaggctggggacctcgcctcggatcgtggagaagctcgccgcgcggggcatcaccaggctcttccccatccagagggctgttcttgagccagcaatgcaaggaaaagacatgattggccgtgctcgaacagggactgggaagaccctggcttttggtattcctatcatggacaagatcctaagctacaacgagaagactggaaatggcaggaatcctttagccataatcttggcaccaacaagagaacttgctcggcaggttgagaaggagtttagagaatctgctcccttggacaccctctgtgtatatggaggtgttcctatcaatcagcaaatgagagctcttaactatggtgttgacatagtggtcggaacaccaggtcgagttattgaccttctgagaaggggtgttttaaacctttcacagatccagtttgtggtcctagatgaagctgatcaaatgctggctgtgggtttcgatgaagatgttgaggtgatcatggagcaattgccacagaatcgtcaaagcatgctgttctctgcaacaatgcctagttggataagaaaaatttcgaacaagtacttaaaggatccagttataattgaccttgtgagtgacttcttttattatttgcgtgtgatttttgtcttactttctctagcttgtcttgtgacaatcgtgcattcttttgtatgcatgtatatatgaagtcctgcattgaatagatcttcctgggtctagaaacattgctgaagcatctgatgaacaccaacactttcatttctaaaaagtataccaa

SEQ ID NO: 142594 - DNA, 411 bp, Zea Mays
atgtcgccgcgtcaggctgaacttatcaatgctcaactgaatgggctacaaatagcgcttgcggaaaaaggtattcctttattgttccgtgaagtggatgactttgtcgccagtgtcgaaatagttaaacaggtgtgcgcggaaaacagcgttacccacctgttttataactatcagtatgaagtgaatgagcgggcgcgggatgtggaagttgaaagagcgctgcgtaacgtggtgtgtgaaggatttgatgacagcgtgatcctgccgcctggcgcggccgaatctcgcgagcactgggtggcggagctcgccggcatttgtcaatatgcggccggatctcgcgaacaagtcaggaaggcggcggcaccgaaatggttctcgtacaagagacaattaaaaatattataa

SEQ ID NO: 142595 - DNA, 3491 bp, Zea Mays
gacgacgacgacgaccacgaggcattggctggaatcccagttcccaccgtcccgtccatggttccgtcgtccatccagccagcaacacctcatgtgcgaacccggttcagcggaatcgccatctccaaattctcgatccgccgcgtgcgctgcctgcggatatctccctgtccgtgtcccgctcccgccttgcttgctgctccaccaccgcactgtaggtgctgcctgcctgcctcctcctgaattattcttattcgttcgctattaattattagccaccgctatatccttcccttcctcgtcttcctcctcggagtcggagaggtccgtccatctcgatccgcggcaagtctgaacggacgactccgaagcttacttgccagagagccgccgtttaggtggcggcgatccttccgtggttccttctcggttctgcctgcctgctgctgcttcttcttcttctggcggggccgaatcgagagcgtgtccgccggaatctctcagtcatcaggcaggctgcagcctacggcggtcgattctactgggattctacactactcgctcaagagtcgagactgcatgcggctccaagggaaattaattaagatgaggtcttttccccacctgctgctgatcctggcgctcctcttggtcctggagaatgtccgggcgcaacccaagccacttctcatcaactgcggctcgggttcaagcgccgacgtcgacggcaggacgtgggtcggggacgcccatcccgacggcggcgccggcttcacggtcacattggcaggagccactgccacccgagctcgaaaacctgtcgacgaaggaggaggaggaggggacgccgcgtacggggagctctacaggaccgctcgcgtcttcaacgcgtcgtccgcctacaggttcagcgtcgccgccgggagctacttcctccggctccacttcagccggctcttcagcagcaacctcagcggcgacgccaccgccaaggaagcggtcttcgacgtcacggccaatggcctgaggctgctgtccaggttcagcgtcgccggggagatctactggaggaactccaggaccaactccaccagcgatgtcgccgtcaaggagtacctcctcaacgtcaccgccgcgaggccgctggaggtcgagttcgcgcctgacgccgggtcgttcgccttcgtcaacgccatggaggttgtccccgtccccggcaactcgatcttcggttcggtcaacaaggtgggcggggtggggctgaagggccccttcagcctcggagagagcggggtcgagaccatgtacagggtgtgcgtgggaggcggcaagatcgagaggaaggaggacgacccgcgcctgtggaggaggtgggattccgacgagcgctacatcttctccatgaacgccgctcacagcatccggaacacgtccagcatcagctacgtgtcgcgcgacggcgccgactcggtccccgcgccgctgcggctgtacgagacggccagggtgacggaggagaccttcgtggtggacaggaagttcaacgtgtcctggcggttcggcgtggaccccggcttcgagtacctggtcaggctgcacttctgcgagctggagtacgggagcgcggagcagcgcaggttcaagatctacatcaacggcaagaccgccgcggagaactacgacgtggtcgccaaggccgggggcaagaacaaggcgttccacgaggacttccttgacgacgacgacgccgcccccgcgtcggagaccgacacgctctgggttcagctgggctccgagtcctccgcgaccagctccgcggctagcgacgcgctcctgaacggcatggagatcttcaaggtcagccggaacggaaaccttgggcatccgacggttaggatcgggggcgtgagtggtggcctggaggacgacagacgaaagcggagccccaggtgggtgctggtcggcgctgctgcgggtgtggtgatcttcgtctcggtcgctgctgctgtttacctctgtttctatctgcaccggaagaaaaacacaaacacttcagctgctaataagaaaacgaagacgaagacgaaggacgacaaccttccggctacgacgacggcccccggtcttcgcgcagctggaacatttggcagctgcaggatgggccggcggttcagcatcgcggagatcaaagcggccaccatggacttcgacgagtccctggtgatcggagtcggaggcttcggcaaggtgtacaggggcgagacggacacgggcactccggtggcggtgaagcgggggcacgcagagtctcagcagggggcgaaggagttcgagacggagatcgagatgctgtcgaggctgcggcaccggcacctcgtctccctgatcgggtactgcgacgagcaggacgagatgatcctggtctacgagcacatggcgaacggcacgctgcgaagccacctctacgggagcgagagcgagagcgaccacctccccgctctgacgtggaggcagaggctggagatctgcatcggcgcggcgcgggggctgcactacctccacacggggctggaccggggcggcgtcatccacagggacgtgaagaccaccaacatcctgctggacggcagccttcgtggcgaaggtggcggacttcggcatctcgaagcacggcccgccgctggaccgcacccacgtcagcaccgccgtgaagggcagcttcgggtacctggacccggagtacttcatgaggcagcagctgacgcagagctccgacgtgtactcgttcggcgtcgtcctgctggaggtcctctgcgcccggcccgtcatcaacccggccctgccgagggaccaggtcaacctcccccgagtgggctctggagcggaagaggcggggcctgctcgagaccgtggtcgaccgtcggctggacggaggctacgacctggagtccgtcaggcagttggctgaggtcgccgagaagtgcgtcgcggatgagggacgggaccggccttccatcggtcaggtcctgtggcacctcgagaccgctctgcagctgcaccaagcgcatctgcagagctcatcagcctcagctgctgcgggtgatctggagccctctgatggcgcgtctgctagcaacagcatcaggcgcgccgaagaggcagcagaaaccgctggtgtgacctatggagatggacatggagatggggaagcggtggaactcagagttgaggtactgtaaacgctgtgtgtgtgtggttgccccagcaaatatactgaaatccttttggttcttcattccgtcgtactctgcaaagaaaatgcagtgttgagagttgctattctttcatcgatgtgcgagaattcacgcgtgtcgaaattttcctgagtttttagtgtttttatacggtcttggactcttggtgcatcatctacgtggcaccacggccttcgtagctgaagccactagccgtaggataggattctctcgctc

SEQ ID NO: 142596 - DNA, 2922 bp, Zea Mays
gaatcgctttcccctcaaatgctgatccgattactctcactcacaggcaggctgcagcctacggcggtcgattctactgggattctacactactcgctcaagagtcgagactgcatgcggctccaagggaaattaattaagatgaggtcttttccccacctgctgctgatcctggcgctcctcttggtcctggagaatgtccgggcgcaacccaagccacttctcatcaactgcggctcgggttcaagcgccgacgtcgacggcaggacgtgggtcggggacgcccatcccgacggcggcgccggcttcacggtcacattggcaggagccactgccacccgagctcgaaaacctgtcgacgaaggaggaggaggaggggacgccgcgtacggggagctctacaggaccgctcgcgtcttcaacgcgtcgtccgcctacaggttcagcgtcgccgccgggagctacttcctccggctccacttcagccggctcttcagcagcaacctcagcggcgacgccaccgccaaggaagcggtcttcgacgtcacggccaatggcctgaggctgctgtccaggttcagcgtcgccggggagatctactggaggaactccaggaccaactccaccagcgatgtcgccgtcaaggagtacctcctcaacgtcaccgccgcgaggccgctggaggtcgagttcgcgcctgacgccgggtcgttcgccttcgtcaacgccatggaggttgtccccgtccccggcaactcgatcttcggttcggtcaacaaggtgggcggggtggggctgaagggccccttcagcctcggagagagcggggtcgagaccatgtacagggtgtgcgtgggaggcggcaagatcgagaggaaggaggacgacccgcgcctgtggaggaggtgggattccgacgagcgctacatcttctccatgaacgccgctcacagcatccggaacacgtccagcatcagctacgtgtcgcgcgacggcgccgactcggtccccgcgccgctgcggctgtacgagacggccagggtgacggaggagaccttcgtggtggacaggaagttcaacgtgtcctggcggttcggcgtggaccccggcttcgagtacctggtcaggctgcacttctgcgagctggagtacgggagcgcggagcagcgcaggttcaagatctacatcaacggcaagaccgccgcggagaactacgacgtggtcgccaaggccgggggcaagaacaaggcgttccacgaggacttccttgacgacgacgacgccgcccccgcgtcggagaccgacacgctctgggttcagctgggctccgagtcctccgcgaccagctccgcggctagcgacgcgctcctgaacggcatggagatcttcaaggtcagccggaacggaaaccttgggcatccgacggttaggatcgggggcgtgagtggtggcctggaggacgacagacgaaagcggagccccaggtgggtgctggtcggcgctgctgcgggtgtggtgatcttcgtctcggtcgctgctgctgtttacctctgtttctatctgcaccggaagaaaaacacaaacacttcagctgctaataagaaaacgaagacgaagacgaaggacgacaaccttccggctacgacgacggcccccggtcttcgcgcagctggaacatttggcagctgcaggatgggccggcggttcagcatcgcggagatcaaagcggccaccatggacttcgacgagtccctggtgatcggagtcggaggcttcggcaaggtgtacaggggcgagacggacacgggcactccggtggcggtgaagcgggggcacgcagagtctcagcagggggcgaaggagttcgagacggagatcgagatgctgtcgaggctgcggcaccggcacctcgtctccctgatcgggtactgcgacgagcaggacgagatgatcctggtctacgagcacatggcgaacggcacgctgcgaagccacctctacgggagcgagagcgagagcgaccacctccccgctctgacgtggaggcagaggctggagatctgcatcggcgcggcgcgggggctgcactacctccacacggggctggaccggggcggcgtcatccacagggacgtgaagaccaccaacatcctgctggacggcagccttcgtggcgaaggtggcggacttcggcatctcgaagcacggcccgccgctggaccgcacccacgtcagcaccgccgtgaagggcagcttcgggtacctggacccggagtacttcatgaggcagcagctgacgcagagctccgacgtgtactcgttcggcgtcgtcctgctggaggtcctctgcgcccggcccgtcatcaacccggccctgccgagggaccaggtcaacctcccccgagtgggctctggagcggaagaggcggggcctgctcgagaccgtggtcgaccgtcggctggacggaggctacgacctggagtccgtcaggcagttggctgaggtcgccgagaagtgcgtcgcggatgagggacgggaccggccttccatcggtcaggtcctgtggcacctcgagaccgctctgcagctgcaccaagcgcatctgcagagctcatcagcctcagctgctgcgggtgatctggagccctctgatggcgcgtctgctagcaacagcatcaggcgcgccgaagaggcagcagaaaccgctggtgtgacctatggagatggacatggagatggggaagcggtggaactcagagttgaggtactgtaaacgctgtgtgtgtgtggttgccccagcaaatatactgaaatccttttggttcttcattccgtcgtactctgcaaagaaaatgcagtgttgagagttgctattctttcatcgatgtgcgagaattcacgcgtgtcgaaattttcctgag

SEQ ID NO: 142597 - DNA, 2461 bp, Zea Mays
ggattttcttctctgcttcattttccgcctcttcgacgagtcctgttcttgcaggctgcagcctacggcggtcgattctactgggattctacactactcgctcaagagtcgagactgcatgcggctccaagggaaattaattaagatgaggtcttttccccacctgctgctgatcctggcgctcctcttggtcctggagaatgtccgggcgcaacccaagccacttctcatcaactgcggctcgggttcaagcgccgacgtcgacggcaggacgtgggtcggggacgcccatcccgacggcggcgccggcttcacggtcacattggcaggagccactgccacccgagctcgaaaacctgtcgacgaaggaggaggaggaggggacgccgcgtacggggagctctacaggaccgctcgcgtcttcaacgcgtcgtccgcctacaggttcagcgtcgccgccgggagctacttcctccggctccacttcagccggctcttcagcagcaacctcagcggcgacgccaccgccaaggaagcggtcttcgacgtcacggccaatggcctgaggctgctgtccaggttcagcgtcgccggggagatctactggaggaactccaggaccaactccaccagcgatgtcgccgtcaaggagtacctcctcaacgtcaccgccgcgaggccgctggaggtcgagttcgcgcctgacgccgggtcgttcgccttcgtcaacgccatggaggttgtccccgtccccggcaactcgatcttcggttcggtcaacaaggtgggcggggtggggctgaagggccccttcagcctcggagagagcggggtcgagaccatgtacagggtgtgcgtgggaggcggcaagatcgagaggaaggaggacgacccgcgcctgtggaggaggtgggattccgacgagcgctacatcttctccatgaacgccgctcacagcatccggaacacgtccagcatcagctacgtgtcgcgcgacggcgccgactcggtccccgcgccgctgcggctgtacgagacggccagggtgacggaggagaccttcgtggtggacaggaagttcaacgtgtcctggcggttcggcgtggaccccggcttcgagtacctggtcaggctgcacttctgcgagctggagtacgggagcgcggagcagcgcaggttcaagatctacatcaacggcaagaccgccgcggagaactacgacgtggtcgccaaggccgggggcaagaacaaggcgttccacgaggacttccttgacgacgacgacgccgcccccgcgtcggagaccgacacgctctgggttcagctgggctccgagtcctccgcgaccagctccgcggctagcgacgcgctcctgaacggcatggagatcttcaaggtcagccggaacggaaaccttgggcatccgacggttaggatcgggggcgtgagtggtggcctggaggacgacagacgaaagcggagccccaggtgggtgctggtcggcgctgctgcgggtgtggtgatcttcgtctcggtcgctgctgctgtttacctctgtttctatctgcaccggaagaaaaacacaaacacttcagctgctaataagaaaacgaagacgaagacgaaggacgacaaccttccggctacgacgacggcccccggtcttcgcgcagctggaacatttggcagctgcaggatgggccggcggttcagcatcgcggagatcaaagcggccaccatggacttcgacgagtccctggtgatcggagtcggaggcttcggcaaggtgtacaggggcgagacggacacgggcactccggtggcggtgaagcgggggcacgcagagtctcagcagggggcgaaggagttcgagacggagatcgagatgctgtcgaggctgcggcaccggcacctcgtctccctgatcgggtactgcgacgagcaggacgagatgatcctggtctacgagcacatggcgaacggcacgctgcgaagccacctctacgggagcgagagcgagagcgaccacctccccgctctgacgtggaggcagaggctggagatctgcatcggcgcggcgcgggggctgcactacctccacacggggctggaccggggcggcgtcatccacagggacgtggcggacttcggcatctcgaagcacggcccgccgctggaccgcacccacgtcagcaccgccgtgaagggcagcttcgggtacctggacccggagtacttcatgaggcagcagctgacgcagagctccgacgtgtactcgttcggcgtcgtcctgctggaggtcctctgcgcccggcccgtcatcaacccggccctgccgagggaccaggtcaacctcccccgagtgggctctggagcggaagaggcggggcctgctcgagaccgtggtcgaccgtcggctggacggaggctacgacctggagtccgtcaggcagttggctga

SEQ ID NO: 142598 - DNA, 1017 bp, Zea Mays
ggaatcccagttcccaccgtcccgtccatggttccgtcgtccatccagccagcaacacctcatgtgcgaacccggttcagcggaatcgccatctccaaattctcgatccgccgcgtgcgctgcctgcggatatctccctgtccgtgtcccgctcccgccttgcttgctgctccaccaccgcactgtaggtgctgcctgcctgcctcctcctgaattattcttattcgttcgctattaattattagccaccgctatatccttcccttcctcgtcttcctcctcggagtcggagaggtccgtccatctcgatccgcggcaagtctgaacggacgactccgaagcttacttgccagagagccgccgtttaggtggcggcgatccttccgtggttccttctcggttctgcctgcctgctgctgcttcttcttcttctggcggggccgaatcgagagcgtgtccgccggaatctctcagtcatcaggcaggctgcagcctacggcggtcgattctactgggattctacactactcgctcaagagtcgagactgcatgcggctccaagggaaattaattaagatgaggtcttttccccacctgctgctgatcctggcgctcctcttggtcctggagaatgtccgggcgcaacccaagccacttctcatcaactgcggctcgggttcaagcgccgacgtcgacggcaggacgtgggtcggggacgcccatcccgacggcggcgccggcttcacggtcacattggcaggagccactgccacccgagctcgaaaacctgtcgacgaaggaggaggaggaggggacgccgcgtacggggagctctacaggaccgctcgcgtcttcaacgcgtcgtccgcctacaggttcagcgtcgccgccgggagctacttcctccggctccacttcagccggctcttcagcagcaacctcagcggcgacgccaccgccaaggaagcggtcttcgacgtcacggccaatggcctgaggctgctgtccaggttcagc

SEQ ID NO: 142599 - DNA, 1298 bp, Zea Mays
gttaccaacagctcgcctgcccaccaaatcggcaaatcctggcgtacaggaggacgacccaacccaagcggcacacaagatccaagaggatgccgccgccgccgccgctcgtgctgctggcgaagccgctgttcccgaacttcgcggcggcgctggagggccggtaccgcctcgtcctggccggggacgccgacgcggccacggcggcggaggcccgggtcctgctcgtgccggggctcgtggccgtgacagccgagctcgtcgaccggctcccggcgctggagctcgtggccgcgacctccgtcgggctggaccacgtggacctccgtgcctgccgccgccgcgggctcgccgtcaccaacgccggcgcggccttctccgtcgactccgccgactacgccgtcggcctcgtcgtcgccgtgctgcgcagggtcgccgccgccgaggcgcatctccggcgcggcgggtgggctaccgatggcgagtacccgctcaccaccaaggtgagcggcaagcgggtggggatcgtggggctcggcagcatcggctcgctggtggcgcggcgcctggccgccatggggtgccgcgtcgcctaccactcccgcgcgccgaagccgtcgtgctcgtgcccctacgccttcttccccacggcgcgcgccctggccttggccagcgacgtgctggtgctgtcgtgcgcgctcacggaggagacgcggcgcgtggtgggccgcgaggtgctggaggcgctgggacagggcggcgtgctggtcaacgtcggccgcggcggcctggtcgacgagccggagctggtgcggtgcctgcgggagggcgtcatcggcggcgcggggctggacgtgttcgaggacgagcccgacgtgcccgcggagctcctcgccatggacaacgtcgtgctgtcgccccacagggccgtgctcacgccggagtccatgcgcgggttgctggatgtcgtcgcgggaaacctcgacgccttcttcgccggcaggccgctgctcagccccgtgtcgctgtgaattctgaaccacatgtaggatagatacgtcaagtcgtcaagttccattccatccaagaagcatcaaccagacaaccagtgtgtgagactcaccacgaacaatacggaagaacactcagaattggtagggtggttcgggtttcttactttctgttccaagttcatcatccaaaagccaaatttcaaaatgacaacagttcgtcttttatacttgctactggaaaaccaaaacgaattggaatatattacagccagttggctccaccat

SEQ ID NO: 142600 - DNA, 1395 bp, Zea Mays
gttaccaacagctcgcctgcccaccaaatcggcaaatcctggcgtacaggaggacgacccaacccaagcggcacacaagatccaagaggatgccgccgccgccgccgctcgtgctgctggcgaagccgctgttcccgaacttcgcggcggcgctggagggccggtaccgcctcgtcctggccggggacgccgacgcggccacggcggcggaggcccgggtcctgctcgtgccggggctcgtggccgtgacagccgagctcgtcgaccggctcccggcgctggagctcgtggccgcgacctccgtcgggctggaccacgtggacctccgtgcctgccgccgccgcgggctcgccgtcaccaacgccggcgcggccttctccgtcgactccgccgactacgccgtcggcctcgtcgtcgccgtgctgcgcagggtcgccgccgccgaggcgcatctccggcgcggcgggtgggctaccgatggcgagtacccgctcaccaccaaggtatagcagcatactgagaattgccacccaaaaaaaacaaacaaacagaagaacagaattcgacatgtctcggactctcggttgaattaatttgcaggtgagcggcaagcgggtggggatcgtggggctcggcagcatcggctcgctggtggcgcggcgcctggccgccatggggtgccgcgtcgcctaccactcccgcgcgccgaagccgtcgtgctcgtgcccctacgccttcttccccacggcgcgcgccctggccttggccagcgacgtgctggtgctgtcgtgcgcgctcacggaggagacgcggcgcgtggtgggccgcgaggtgctggaggcgctgggacagggcggcgtgctggtcaacgtcggccgcggcggcctggtcgacgagccggagctggtgcggtgcctgcgggagggcgtcatcggcggcgcggggctggacgtgttcgaggacgagcccgacgtgcccgcggagctcctcgccatggacaacgtcgtgctgtcgccccacagggccgtgctcacgccggagtccatgcgcgggttgctggatgtcgtcgcgggaaacctcgacgccttcttcgccggcaggccgctgctcagccccgtgtcgctgtgaattctgaaccacatgtaggatagatacgtcaagtcgtcaagttccattccatccaagaagcatcaaccagacaaccagtgtgtgagactcaccacgaacaatacggaagaacactcagaattggtagggtggttcgggtttcttactttctgttccaagttcatcatccaaaagccaaatttcaaaatgacaacagttcgtcttttatacttgctactggaaaaccaaaacgaattggaatatattacagccagttggctccaccat

SEQ ID NO: 142601 - DNA, 955 bp, Zea Mays
aaggaagcaatccaagcgcaagagctcgaaagaacacaagcaaatcactctctctagtcactatggctttgtgtggaatttggagaggatttgatctctttggtgtgtctagaattgaatgctagagctcttgtagtagttgggaagtggaaaacttggatgcaatgaatggtggggtgatctcagcgatgagtttgtcaatgaactgacggcagctggcgtagtgttccgctactacgatccccgccctcgcctttttggtatgcgcaccaatgtgtttcgccggatgcatcgcaaaattgtggtgatcgacgcgcgtatagcctttattggcgggctgaattactccgccgagcatatgtccagctacggtccagaggctaaacaggattacgcggtacgccttgaagggccgattgtcgaagatattctccagtttgagctggaaaacctgcctggacagagcgcggcacgacgctggtggcgacgtcatcacaaagcggaagagaaccgccagccgggagaagcgcaggtattgctggtctggcgcgataacgaagaacatcgcgatgatattgaacgccattatttgaaaatgctcactcaggcgcggcgggaagtgattatcgccaacgcctacttcttccccggctatcgatttttacacgcctttgcgtaaagcggcacggcgcggggtgcggatcaaactgatcattcagggcgaaccggatatgccgattgtcagagtcggtgcgcgcttgctgtataactatctggttaaggcggcgttcaggtttttgagtaccgccgccgcccgctcacggcaaagtggcattgatggacgatcactgggcgacagaaggttcagtaatcttcgttcgctcagtttgtcactgaatctcgaagcaatgtcatcatccccgattcgtcatttttaatcagacgctgccgcgat

SEQ ID NO: 142602 - DNA, 858 bp, Zea Mays
gttgaattcaggactgataatctgcatgatcaatgcaattatatgatacaacaggccatcgtattgacaaagaagggtctatggtataagcaaatgcttgacacaaaacgttctgagcttcgaaaagctgaatctgaggttgacattatgggagacaaggttaatgcactcttgagtcttgttcaaaagatatatgtaactcttgagcactactctcctgtttttcagcatcatcctgtgctattggatgctttcttgaagacatgcaagcttgttgcaggtatcagaagcagacaaaaaaaggacttgcaagatacaatctaagttggagcagcaagtttagagtggcctaaaagacactagagagagattaatttcgtcggtggaggaacactacacagtcgcaactcacaaggctgtgaaattgatctatggccaaattgacaccgcaaatctgcagccagaaggaagttgaggtagtccattcgacagaattttgaaatctagggtatgcatttcaagggcattaagctgtaatatatttacaaattgtagcaatgcatttttctaaacatagtttgataatggatgcagttatactgtctctgctcactccgcagatgattggattcatgtcctgtatggtgtatgtataagtctatgcactttataatgtacaaattatgatagttcaaattctgtgagggtgatctcatttttgtcagcagcatatatagaaataacttagctgttatacaagccatagtcatattgtaagcatagtaactccaaggctgtcttttacttgattttagtattttcatcgttcttacaaattttggagtcctgtttgtacta

SEQ ID NO: 142603 - DNA, 2144 bp, Zea Mays
tccttctccgcttctcctctgtgttcgtttggccgcaagtccgcaagtgagcgcagcggagcggcagcgtcgtcttcttcctcgtcgcgatcacctgttaaatccaatccagtttgttcctgccagggctccgattcaccaccacccgtcctcttcaactgccgccgttatcccctacccggcacgcgctgggcggggagcagctgaaccccaccccagccgcccgcaacggcgccaacaaggcgctgaagcggactctccggctcctgccaatggcgcggatccagcttgtggtggatgaaagaacggacccctttcttggtagattgactagaccagccaccattgaccaatcccacaatttcttctctgatgtcacaaacaacttcaaagatttttcaactgtagtttcagagttgcatcaacaccttctggatgcaaatgtagaagttacttacacagaatacttagatctgatgaaagtggaagttgatcaacatcttaataagctctcggaggacataagggacctcaaaagctgtaacttggcccacaaatatgacacagatggttcatgctgtacagcatgccatgttgggaagctagctgagatagatgacaggttcaacagcttgaagtttctgctggctgtggtgttccgacaaattagagagatcctcacagtggtcaattcttcaattcatgatcttcagtgggagcatgagttacagtcagaagttaccggcatcattattggagactgtattagaggtcttcaggatgaactcgagaggaaactgtatgagcaaagttccatggtgaacagtctaagaaaaaactgccaggaaactgtggcgcagtttgcttccatacgtgaagagctgattgctatttctaatattctgttaccttctgaagaggaaccacaaatttccctctgtaggcatgaaagtttgggtaactggagtgacagatggaagttcagctttttcagaaagcgagcacaccaggatcactctttatcttccacgcaaaaccagaattctgcaacacagaaatctataagtcctagtgaagttatatcagaaagatccgacttccgacatctgaagggtatgactagacatgaaatgcttaactatttcagatctgagatcagtaaattaagaaggctgcatgagttggatttgcaagagaaaacagaagagctgtttaaattcaaacgagagaaatggtcattggctcttaagtatgatgtagaatttgagcctttaagaaggaaattccctgaggtcatttcaagatttgaccaaatcatgtccaatggaatggcagcagcagtacctacaatctgcagtaatagtgatgcattcgatgaaacgagcagattgagcagtataattgattcactataccgtgaaaaccagcatcttcattgtttgcttgcagagaagatgaagaatattcaggaattatcaagccaaatatctgattccaccaggaaaatgtcacttcaatattcattagaaaaacaaattttgagacaactcaacagcactcaagtagaatatgaggatctttttgttgaaagtactatcagagatgaaatttaccaaactgttgtgagaacattggttgatagtcataggaatgttttggaggataccacccaaactttccgtgcaaaagtgtcttcacttgaagccgcactctctgaaaaggacaaggcgttgtgtttatctgatgaggaaaatcaaatgctaaaggaaaagttgtcaacactagaaaaagagcattttatccaaaataatcagcaagatctcgagctaatcaagcaagaaagtgaggaaatggttctccgtgatattgagatggagccacaaagatcatgtgagatttctgatcgagatatacagtacgaagggctcatcaagctgaatcaggttttagaaattgcctcaaccacggcaaaagaaatagaaacaaaaaggttgaatctcagtgatatccaaggtaaaagagagcaagaaaaacagctagattgcatcctggtatctatcatggatttgtcaaaagaatttatggagactgaacatagagtgccaaaagatataaaaggaaatgaaaaaaaaatgcaaaactaa

SEQ ID NO: 142604 - DNA, 1620 bp, Zea Mays
ctcggctcaggacaaaggaagcagccagcccctgccttctccagtgttctcttctctccaagcggacaaagcagcccgtccctctcctactcctcccccaaagttccgttccgttccgttcagttccctcccgcaggtcaaaaccctcaacctcccacgcggctcgctcgctgggtgggtcggccatggctccccccgcgctcggatctcaggtggccgccgcagcctcggtgcccgtcggctcggactctctcgccaagggcgcggcgctcaagggtaacagcactctaaactttcggaccaaaccatgcatcgggatggcattagcgtggaaaaacaggacccagcaaccacggcgtctgaacaaggtactctgcatgtctgttcaacaagcaagcagaagcaaggttgctgtcgtgcccatcgagttggagaaggcaaaggagccaccgctccacctgtacaaaccaaaggagccttacacggccacgatcgtctctgtcgagaggcttgtaggacccagagctcctggcgaaacatgccacgttgtcattgatcatggcggcaatgttccgtactgggaaggacagagttacggcgtcattcctcctggagagaatccaaaaaaacctggatctcccaatactgttaggctctattcaattgcttctactaggtatggtgattcttttgatggaaagacagcaagcttatgtgttcgccgtgctgtttattatgatcctgaaactggagaggaagacccctcaaagagaggtgtctgcagtaacttcctgtgtggctcaaaaccaggggacaaagttcagatcacaggcccctcgggcaaaataatgcttcttcctgaggatgatccaaatgccactcatatcatgattgccacggggaccggtgttgctccctaccgtggctacctacgtcgcatgttcatggaagatgtcccaactttcaaatttggtggtctggcttggctcttccttggtgttgcgaactctgacagccttctctatgacgaagagttcacaaactaccttcagcagtatccagacaatttcaggtacgacaaagcgctaagcagggagcagaagaacaagagcggcgggaagatgtacgtgcaggacaagatcgaggagtacagcgacgaaatcttcagactgctagatggcggtgcgcacatctacttctgtggtttgaaggggatgatgccggggatccaggacacgctcaagaaggtggctgagcaaagaggcgagagctgggaccagaagctgtcacagctgaaaaagaacaagcagtggcacgtcgaggtttactaggctataagatggcaaggattgtgattgtttagctactgagctgagaaactggacgtatgattgaacgactgtggctgctgcgatgtaatgtaacattgtagacttggattcataagcttctgctccaaatggtgaataaaatgaagcacgcggtttgtagctgctactaccagtatcaggacagtttctttttgctcgtttcgtataggttgattaagctatttttaagggtacatctccttgctttatgttattctgaattttcttatctgagatgcattattgaatt

SEQ ID NO: 142605 - DNA, 125 bp, Zea Mays
ttttttttataatggaaacatgagttccggctttagcatggtaatgcgtacagccaacacaagacaattattacatccgagaaacgttgcatagaaaatgaaactaacttaaagaagcaaaatca

SEQ ID NO: 142606 - DNA, 1729 bp, Zea Mays
catactcatcgatcggggtcaacgcaagaggactagaggagcaacaggagctatatgtccattggaaccaagatggatgcaatgtacacgtacgcacgcacacacgttacaaagtcaccacctgcacctgccggccggcggcgcgatcgaggctgctgagtctgatcttaacaacggcgacgtagggatctagccgatgatctggtcgagggcgccggtgttcttgagcccgagcacgatgccgacgccgaggatgtggccgacggcgccgcaggccagcgtgtcggcgagggtgaacccggcggggtcacccgtctgcaggccggagtcgcgcgcctccagcttcagccccgccgtcgccttgcggttcgcggacggcgccagcccgaaccgccccgcgaacagcatcagcgtcgtcgtcgtcaccatgatctgcgttggtggcggagccgatgtagtcgcagcggatgccctgcgacgacgacctcttcctgcccaccctcacggacggcagcgctgccaccgcggacctgggcgcggcgtagccccggaggccgtggaaccggggcacggcggcggagagctgggatgccatgtgtggcgcctgcgtcgtcgtcgtcgtacgtcgcacctctgtgccgctgtaccgtcctcagctagcgcggagtggtgtggtactggtggtagtggcggtggagctcaagtgcgtgtggcttaaagcctggacacggcgaggcgtgggatgggagccaccggggcagcttgtggcctgcagcggccactcgtggataggttcaggatcttcgctgctgacgtggcgtcgtctcgttagagcagggaagctgccacgtagatcggatcggataagatgtgatactggtctcctctccactcatgttgcttgctcaatgtgtggccggcgctgagactgagagctacagctcgctggctgagttagtggctctggccgtctgtgaaccaagaggacttgtgtgaggtaggtgaaacgaagtcgtcgagcgctctttccctctctctatacctctctgtctgcgacgcggttggataggctaccgccaggtgccgactgccgaggccctcaccggcggcgaagagcgcccgccagtcccagcaatggcagcaaggtgtagcctttcctcgtcatccctgtcggtccatggacccctccgccacaataaacccagcaagagactcgctccatgcctgccatcggcgccaagaccaggagccgctgctctgagagcgcgtgctgcgaaacttcctccaggggttgaagcgcccagggtgcagccgaagctgagcgagcccttcttggggttcacccagaccgcggagatttggaactccagggcctgcatgatcggcctcatcggcaccttcattgtggagctggtgctgaacaaggggattcttcagatgattggggtggaggtgggcaagggtctggaccttcctctttgaagggtgaccaaatagtaacattatcgtttgatggcgtattatgctggccgaaaaacatgagggtttcacttgcttttgacttggtggctacatatgcatgttcatcaagcatgtccttggatatccggatgttacaacatcaactatgttaatgacttggtggctggccgtttgacagggttaattggtgaacaaaaacgtgtgccttgtgaaacagaggaagataattgatgccaccgtgagatta

SEQ ID NO: 142607 - DNA, 3335 bp, Zea Mays
gagtcagaccacaccactgcctgcgcttgcccccgcccggcctcgaggccttgcttggagccttggacctttgactcgccccggcgcgaacgcggccgcgatgcgcgaggaggtgcggagctcggcggcggcggcccccgacccgccgcccgggaggtcggcctcgccaccgcccacacccgtcgccagttctgctggtgcctcgtcgccccctgcacaaactaatgtagctagcatagactggctagacagtgaccaagtgtccaaagcaggatcctctcatattgctccgccgacgtctcggcctgcgcttagtactaatgctaatggagctgccatggactgccttcaatcatcatgcagaccatgggaacgaggcgacctgcttcgtcggctggctacttttaagccttcgacttgggcttctaagccgaaggctgctagttcactggcttgtgctcgaagaggctgggtgaacattgacatggacaagattgagtgtgaatcatgtggtgcacatcttatatttattgcattgacatcctggtcccctgctgaagttataagtgctggggaagcttttgctgagcagcttgatgcttcacaccagaataattgtccctggagaggaaatagctgtgctgatagcttggtccagttccacctgaccccgtcagctcttgttggtggttttaaagatcgctgtgatggattgttgcagttcacgtctcttcctgctattgccttatctgcaattgagagtatgaagctaactagaagcgttcaaattgatcgagtcttatcccagtcagtcacagttttgtctggggagctgggctacagaacagacagtacaactggaattgatatcgcccaacaagatgaaacctgctgttactctcaagcacagaagcttattagcgtttgtggatgggagcctagatggcttcctaatgttcaagattgggaagagaattcgacacgctctgccagaaatgcaggctcagctgaaccagatggccaattccattcccaatttcctgagcatcatcaaaattcaaactctgtgtcaattaagaaagacaaggggaaaggtaaaatgcatgtcaaagattctggatgcagcatgaggtcacctttgctggattgcaacctgtgtggagctacagtgagaatctgggacttcagatctgtgccacgcccttctcattttagtctgaataacatcgacatgcctgatacaggaaggaagcctgtgttggtccgcggtattagtgcgacaagtgggatcaatggactggtcactgaaggagcagagagagaaaatattgagggacgtgatgaggcaggtattgttgagggtaagtctctgtcaaatgctcaagtcgacttaaatctgacaatggcaggaggtttgccgtcaaacaattctgcattgcccccgatgcctggacatcttaactatggtggaatgggaagagatctaattattgggcaacccactggaagtgagcttggtggccgtgcagcctcaattgaatctcgggggcctagttcgagaaaacgtaacctggaggaaggtgggagcacagctgacaaaccaataagcaggcttcagcctgctgacagcattgagggaaccgtcattgaccgtgattgtgatgaagttgatgacgccgcacaagattctggtgctaggagcaaaaggtctcgttgttttaatctttttgatattaatcgcccatcttcttcaggagctggtcccagcagaaatttaagtttcgacctggatatagatgttaataggtttgatacatctaatgctgaggttccatccgcccttcgcaacccatttccaagggactctatgagggaatcttctgttattgcaatggatacagttcacggcatggaagaaaattcaatggagagtgtcgaataccatccatgtgatgttgatgatgttaataagccttctagtgcactcaggagtggtttaatgagtgacacgttggatccgaattatagcaaccaagcacagcaaagcagttttgtacagcctgctgctgaaactgaaagcaatgcaagagagataggagggagtagtatgaatggaggggaagaagtcctcaatgctgaaacaacccctgcatttgctagagatcaacttagcctgggagttagcggggggagtgtcgggatgggtgctagtcatgaagctgaaattcatgggattgatgtttctgggcataaaactggtagcgttgtcggagatgctgatccaattcctgagctcatcgagactatgggccacactggtgagtcagctcctggacctgcattgatggatgagtttgtccctgaagaagttggtcgagaaggtcctaatggtgatagccaagatatggcatctcggttagcggttcgagctgacagtggttctaaaatttgtggttcaactaaagctgattcagttgagagtggagagaagacgagccgtgagaatagcgcacatccttctctttcttgcaatgcaagagttttttctggcattgatgcatcaaaagacgaagtgactggtataatgctaactaacgatgactatgatccaggaagtggtctaggagcaacaaatggaggaaacgattatgaaacaggtcttccagacttcgatccaataaggcaccacaacgattactgtccttgggtgaatggaaatgttgctgctgcatgttgtattagtaccggttcgagcacagctctttcaggctggcagctcacggtagatgccatcgagactctgcagtctcttggccaggctcaaaatcagacgatgcagtcagactctgcggcttcattatataaggacgatcacgtcccgcctagccggaagctgctgaaaagtgcgaaccacagcaagagctgagctctggagcaagattcttcaatgctcatagaaaagttgtcttgtcgaggccctaacctgagcaggggcaatggcttgcatttctgtgaaatttggtcttagtgtggtcgtgctgcatttaccggaagagcttagaaaccatggacacgcgtgataagagataattcttaggccgtgatgtgtgcaggtgacatggcttgtcccccgccatcttgcaaaattgtttatgtcaggttgattgtatctatctacatacatgttatgttatttcagtctcctggagtctgtaacatgtaacgtgccatttcgttgatggtttgtcctactgaataatattgacacagacgaccacatttatgtattttgtgcgaaaacttgcaaggccctcgatcgagatgttaagcttcca

SEQ ID NO: 142608 - DNA, 1994 bp, Zea Mays
cgctaccagcccgacccaccaccaccatcgccaccattaccctctcgcccctgcctctccggccgaccccgtcccatgccgcagcgcgcagcggccgcactgacacaccagtgagcgagcagagcgaggcctgatgcggcagcggcagcaaggcgaggagcaccgggagatattcgtccagtggagaccctgcgacaagaagaggtcttaggccctccgccgccacgcgcaccggcagacaaaatccgcgcaggccttcttccgacccgcaaaggcgccgcctttttcgccgattccacaggccggagcccggggagaaagacagacagacagaccggaagatgagcgcatccgtgggccggacccgcgtggggcggtacgagctcggccggaccctcggcgaaggcaccttcgccaaggtcaagttcgccaggaacgtcgagaccggagagaatgtcgccatcaagatcctcgacaaggagaaggtcctcaagcacaagatgatcgcccagatcaagcgagagatctcgaccatgaagctcatcaggcaccccaacgtcatccggatgtatgaggtgatggccagcaagacaaagatatacatcgtcatggagctcgtcaccggtggcgaactcttcgacaaaatcgtgagcgtcatgtcctctatcacccttgtccgaatcactgcactcagctcctctcctagcatgtgatgaatgaatttgcgcccgccctgtggactaggcctcgcgtggaaggctgaaagaggatgacgcaaggaagtacttccagcagctgatcaacgctgtcgattactgccatagccgaggcgtctaccaccgcgatctcaagcctgaaaatctcctgcttgatgctagcggcacgctcaaggtttcggattttggactgagcgcactatctcaacaagtccgagaggatggtctgctgcacacaacctgtggaactcccaactatgttgctcccgaggttataaacaataagggctatgatggagctaaggctgatctgtggtcatgtggagtgattctctttgtcctcatggcggggtacctcccatttgaagattcgaacctgatgtcgctctacaagaagatcttcaaagcggatttcagttgcccgtcctggttctccacaagcgcaaagaagctcatcaagaagatacttgatcctaatgctaacaatagaataactattgcagagctcattaacaacgagtggttcaagaaggggtatcagcctcccagatttgaaacagcagatgttaatctggatgacgtgaactccatcttcgatgaatccggggagccagcacagcttgttgttgagaggagagaagaaagaccatcagtgatgaacgctttcgagttaatctctacgtctcagggcctcaatctcgggacgctcttcgagaagcaaacgggttctgttaagcgagaaacaaggtttgcgtcaaggcttcctgcaaatgagatactgtcgaagatcgaagcagcagcgggacccatgggcttcaacgttcagaagcgcaactataagctgaagctgcaaggggagaaccctggaaggaaaggtcagctggccattgcaacagaggttttcgaggtcacgccttccctgtacatggttgagctgcgcaagtccaacggcgacacccttgaattccacaagttctaccacaacatctcaaatggactgaaggacgtgatgtggaagccggagagcggcatcgtggaaggcgacgaggcgcggcaaaggaggtccccgtgatggggtctgcaaccaagttttagaagtagcgctgcagataactagtcatcagggagcctggcgggaactgagcctgtgactgcttcctgtttgtttggatgttttgtttttgtctaaggtgctttctgactaaagtatgctggataatgtgaatgaagaatgtgcagagttttcagcaaagtaaggttgtcggattttctttcgtt

SEQ ID NO: 142609 - DNA, 2013 bp, Zea Mays
gtcacgcgacgcgaccgcactttcctctccccgatcctccagtcccaaccggccaacccgactcctcctcctcctcctcgcctatagatacccagcccccgtctcctcctcgtctccgctaccagcccgacccaccaccaccatcgccaccattaccctctcgcccctgcctctccggccgaccccgtcccatgccgcagcgcgcagcggccgcactgacacaccagtgagcgagcagagcgaggcctgatgcggcagcggcagcaaggcgaggagcaccgggagatattcgtccagtggagaccctgcgacaagaagaggtcttaggccctccgccgccacgcgcaccggcagacaaaatccgcgcaggccttcttccgacccgcaaaggcgccgcctttttcgccgattccacaggccggagcccggggagaaagacagacagacagaccggaagatgagcgcatccgtgggccggacccgcgtggggcggtacgagctcggccggaccctcggcgaaggcaccttcgccaaggtcaagttcgccaggaacgtcgagaccggagagaatgtcgccatcaagatcctcgacaaggagaaggtcctcaagcacaagatgatcgcccagatcaagcgagagatctcgaccatgaagctcatcaggcaccccaacgtcatccggatgtatgaggtgatggccagcaagacaaagatatacatcgtcatggagctcgtcaccggtggcgaactcttcgacaaaatcgcctcgcgtggaaggctgaaagaggatgacgcaaggaagtacttccagcagctgatcaacgctgtcgattactgccatagccgaggcgtctaccaccgcgatctcaagcctgaaaatctcctgcttgatgctagcggcacgctcaaggtttcggattttggactgagcgcactatctcaacaagtccgagaggatggtctgctgcacacaacctgtggaactcccaactatgttgctcccgaggttataaacaataagggctatgatggagctaaggctgatctgtggtcatgtggagtgattctctttgtcctcatggcggggtacctcccatttgaagattcgaacctgatgtcgctctacaagaagatcttcaaagcggatttcagttgcccgtcctggttctccacaagcgcaaagaagctcatcaagaagatacttgatcctaatgctaacaatagaataactattgcagagctcattaacaacgagtggttcaagaaggggtatcagcctcccagatttgaaacagcagatgttaatctggatgacgtgaactccatcttcgatgaatccggggagccagcacagcttgttgttgagaggagagaagaaagaccatcagtgatgaacgctttcgagttaatctctacgtctcagggcctcaatctcgggacgctcttcgagaagcaaacgggttctgttaagcgagaaacaaggtttgcgtcaaggcttcctgcaaatgagatactgtcgaagatcgaagcagcagcgggacccatgggcttcaacgttcagaagcgcaactataagctgaagctgcaaggggagaaccctggaaggaaaggtcagctggccattgcaacagaggttttcgaggtcacgccttccctgtacatggttgagctgcgcaagtccaacggcgacacccttgaattccacaagttctaccacaacatctcaaatggactgaaggacgtgatgtggaagccggagagcggcatcgtggaaggcgacgaggcgcggcaaaggaggtccccgtgatggggtctgcaaccaagttttagaagtagcgctgcagataactagtcatcagggagcctggcgggaactgagcctgtgactgcttcctgtttgtttggatgttttgtttttgtctaaggtgctttctgactaaagtatgctggataatgtgaatgaagaatgtgcagagttttcagcaaagtaaggttgtcggattttctttcgtt

SEQ ID NO: 142610 - DNA, 1689 bp, Zea Mays
gttaatacggtcggcggcgagctttgacggtagcagacgggcgaccacgggcgtctcgtttcgtcgtcgtctcgcccgccttccgttggaacgtatcaagcgagagatctcgaccatgaagctcatcaggcaccccaacgtcatccggatgtatgaggtgatggccagcaagacaaagatatacatcgtcatggagctcgtcaccggtggcgaactcttcgacaaaatcgcctcgcgtggaaggctgaaagaggatgacgcaaggaagtacttccagcagctgatcaacgctgtcgattactgccatagccgaggcgtctaccaccgcgatctcaagcctgaaaatctcctgcttgatgctagcggcacgctcaaggtttcggattttggactgagcgcactatctcaacaagtccgagaggatggtctgctgcacacaacctgtggaactcccaactatgttgctcccgaggttataaacaataagggctatgatggagctaaggctgatctgtggtcatgtggagtgattctctttgtcctcatggcggggtacctcccatttgaagattcgaacctgatgtcgctctacaagaagatcttcaaagcggatttcagttgcccgtcctggttctccacaagcgcaaagaagctcatcaagaagatacttgatcctaatgctaacaatagaataactattgcagagctcattaacaacgagtggttcaagaaggggtatcagcctcccagatttgaaacagcagatgttaatctggatgacgtgaactccatcttcgatgaatccggggagccagcacagcttgttgttgagaggagagaagaaagaccatcagtgatgaacgctttcgagttaatctctacgtctcagggcctcaatctcgggacgctcttcgagaagcaaacgggttctgttaagcgagaaacaaggtttgcgtcaaggcttcctgcaaatgagatactgtcgaagatcgaagcagcagcgggacccatgggcttcaacgttcagaagcgcaactataagctgaagctgcaaggggagaaccctggaaggaaaggtcagctggccattgcaacagaggtacagcttcctggttgtgcctagacttcctgcatggtctgttgtgctgttcttggcgcctctgtgctttagactgaaacgaaagaaaaaaactacctgatgcctgaaggttttcgaggtcacgccttccctgtacatggttgagctgcgcaagtccaacggcgacacccttgaattccacaaggtatatgtggtgattgaacttgtagtttcattattcatactgtgatgtttaacgctctgttggagccacgctacgctacgaatgaacggacgaaacaaactgattctgtcatggtattgggtgtgtttcgccgcagttctaccacaacatctcaaatggactgaaggacgtgatgtggaagccggagagcggcatcgtggaaggcgacgaggcgcggcaaaggaggtccccgtgatggggtctgcaaccaagttttagaagtagcgctgcagataactagtcatcagggagcctggcgggaactgagcctgtgactgcttcctgtttgtttggatgttttgtttttgtctaaggtgctttctgactaaagtatgctggataatgtgaatgaagaatgtgcagagtt

SEQ ID NO: 142611 - DNA, 76 bp, Zea Mays
tttttttttttttttgtcatatgtcatgctcatgcatgaccaatttcatgagctaacagccagtaagcaaagcata

SEQ ID NO: 142612 - DNA, 104 bp, Zea Mays
aaggaaaaccttatgcagactttggcatcatgttaatttgtataggaataggcatgcagggaggctacagagaagaaagttccaagcaaaagactaataattaa

SEQ ID NO: 142613 - DNA, 342 bp, Zea Mays
atgaagtggaggttcttgagaagcttaacagcacggacaagcatctgcgggatcgaggcacagatggtcaaaggcgacgtctgctgctacctttgcggacggaaaccgccagatgcgagctggcgtccttggaccatcccgactgcccacgcctgctgcccagcttcgctgacgaagccgaccaagctctcgcgcccgactgcccacgcctgctgcccagcttcgctgacgaagctgaccaagctcgcgcgagaccgtggttgtgggggagggtcgctagagaaccgaagaaggtctagtgctcgtcgaccccggatcgacatcttgtccaacgagacctag

SEQ ID NO: 142614 - DNA, 860 bp, Zea Mays
acttcgtgctcgagctccagctcagcagcaaggtgccaaggtagcaagctctcggtcgccactactgcaatggaaggcctgattccgttggtgtaccggaccatcgtggagtacaggaaggcgaggcaccaggtcgccatcgcaagccgcctgctgtacggcgaccaccagcagcagccgtgtggttcgtcggcgctcttccgcgtcgttgaccctgcagcaagcagcagcagctggcacgccgcgtcgtcgtcgatgtccccggccacgtcgccggcggcagccagggccagcggcagcctggcgtcgccgctcctccgctcggcgtcgcgccgccagctcgcaggttagtctgctgctcgtgatgggcaacaagttcgagtggtgctttatggtatgcgaggcactgcttggggttggggtgtacaagactacaagtgtacgtattacgtactattataccaggtatattaataagccctagagagagagagagggagagaaaaaagggtttattttgaagaataagggcagagtcagagggtggtccaaaggagcgcctcaactgatgagaagagaaggcaaagcttctgcttcaagcccagctggtggttgtatactgtgcctgtactgtaatactatcctgtagctgctgctctagtagcggccatgtattcgtattgtgtacgtgctacaggttcccagcaactgagcttgtcgttcaactgcacatatacatagcaaataaggatgtgctcaacctactcaattgtatatatatgtcacaaagagtgcaaagatatatatatatatatatatatatatatatatatatatatatatatatatgagatgcaaaa

SEQ ID NO: 142615 - DNA, 120 bp, Zea Mays
ggcggcaatattttggtatatttgactttgtcgtaatgatggagtcttttcttttaaaccaataccttcaattatgttggttcttttcaggggacatactggtttagattctatagatta

SEQ ID NO: 142616 - DNA, 1530 bp, Zea Mays
ctgtcgtcactgatgaccacaggtggccggccgaacaaaccctcggcacgatcgcctgcctccataaatctccctcttcacttcaggcgaaaaggatcaaccaaaccctctaatccatttcggcatttccaacgccttcgccctaccagccacgtcgcttcgaggccgatcgaccgagcagctggtggcaatggcggcggcggcggaggtcgtgctgctggacttctgggtgagccccttcgggcagcgctgccggatcgcgctggcggagaagggcgtggcctacgagtaccgcgagcaggacctcctggacaagggcgagctgctcctccgctccaaccccatccacaagaagatccccgtcctgctccacgccggcaggcccgtctgcgagtcgctcgtcatcctccagtacatcgacgaggcctggccggacgtcgcgccgctcctccccaaggacgacccctacgcccgcgcgcaggcgcgtttctgggccgattacatcgacaagaagatctatgacagccagactcggctgtggaagttcgagggcgaggcgcgggagcaggcgaagaaggacctggtggaggtcctggagaccctggagggggagctcgccgacaagcccttcttcggcggcggcgccctcggcttcgtggacgtggctctggtgcccttcacgtcctggttcctcgcctacgagaagctgggcgggttcagcatccaggagcactgccccaggatcgtggcctgggcggcgcgttgcagggagcgggagagcgtggccaaggcgctgtccgaccctgccaaggtgctcgagttcgtccagttcctccagagcaagttcggggccaagtgatcggaagcactgcgtgtgctgctatgcaggcggcaggccatgctggtgctttgatctgctcgatcagctctatgcccatgctagcgttgcatagcgcagttgatgtgtgatgtgtctggttggttgtagctgctctttgcctggttgcgtcagtgtaaggtttcaggttttcagcgtctgggcctctggggtagctctgcctctgcgttgcccttgcccttgcccttgcccctgccccctacctagcggctcttgagctcttcggctcgccagcaataaagttgcagaggctttagctaaaagtttctgcattttttagttgacgattattggatcgttcctgtcgcttggtgtaagaatctctagaaattccttggttttcttatttgttgtgccgtcgaggagaccgcggtgagcttaatgtgcgcgcgcgcggtaacattttgctccgaactaccttggatgctgcgaatggccaacaagagtattcggcgcgttaaggacaatcgggttttgggaggacagatggatcatgagttcatgaccctttaaggccctgttcgttttgcatggatttgaggtctgaaacggtttatgatcggattgtttatttaatttatataatttttgataagttggaataaattctgatccaatcctaaacaaacgaa

SEQ ID NO: 142617 - DNA, 330 bp, Zea Mays
atggcgagcgaggagaccctggcggaccaccggggacggcggcggcggcagcagcagcagctgacgcgggtagacggcggcgacggccggcagcaggacggcgacagcagcagcagcagcactacgactagcgccgtggcgctggcgcggcggtgcgcgcgaggcagaggcctcgtgggaccggcggtcgacatcgaccaggcggcggacgccgggctgtccatgaagcggtcgctgcagctgttcctgcagaagcgcaaggcccggacggccgccgccgccgccccgccctacgccggcggacgccaggctcaggctgtcaggcgatga

SEQ ID NO: 142618 - DNA, 682 bp, Zea Mays
agccctgttatatatccaggccctcaaactttggctgaagaacgtcaagttcctggaccatcccaggtatctgaacccgaggtacagggacgaagcgctggagcgcgaccttgagctccgcacctcttgctgccaccttcagcggcaggagcggaacgaccggagaagcagaactgcagaaaagacagctgaaatcacggaccacgtagatggcaagggcgacgcggacatcgcgaagaggtggtgcgtttggagggacgctgggtggccgtggtcatgaaaaaaaactcagacatgccgttttgtgttcgttcagacttcagattcagccgctggtgctcccgtttcgaccaaatatcgtagttttatttggttggtgccttcgcagccgccactacgagttgacagtatcgataatgggtaacgttgttcgctgttaaagaagaagagattactagggacatgcttttctctctttctcaaaagatgcattttcttcttcgtagtatccagtttttgaccaattattcggcttcaatgtataacatttggaatgtgcaagaggtgcgcgtcagcgcgtgtatgctgccatcttcaatgcacatgcgtgcctgattgctgcaagatatattacattaatataacattacatcatatgtcgttatattatattgtttatgtt

SEQ ID NO: 142619 - DNA, 2005 bp, Zea Mays
cttaccggcactctttgcctccgtctgctctgctgccctgctggcttggtctggcgttacggcggcctcgctgctggcgctgttcggtggtttggaccaaccgatcgaggaagactatcgtcatcacccctcctcggcgccactcaccatcaccaccaccaccgggcgtcaagggaagaaggcgtccccgaggccgagcctgctcttaccgggcttggggagcgagcgtccagcaccagcaggctaggccggcggccgattgaattcctcgtcgaggcccccctcggcaataaattggtgcggggatttcctccctgacctaaccggccagccagcaggtcgcggtcgaggttctcttctcggctcgatttcctcccgcggcggagggccggccgggtggagcatgcgtcgcgtgcgggtgtcctcgcaccaggcgcccgtccacaagctcggcgacggccagatgaagctgacgccgaggttccgcctggcggcgaccccggcttcgtcgtcgggtccgcagcaggcgtcgtgggaggcggcggaggcgctgatcccggggctccccgacgacgcggcgctgaactgcctgctgcggctggccgtggagtcccacggcgcgtgcaggctggtgtgccggcgctggcgccatctcctggcagacaaggcccggttcttcgcgcagcggcgggcgctggggctgcgcgcgccgtggctgttcacgctggcgttccaccgctgcacgggcgagatccagtggaaggtgctggacctggggcagcgcagctggcacgccatcccggccatgccgtgccgcgaccgcgcctgcccgcgcgggttcggctgcgtggccgtccctgctgccggcgacggcggggacgcgctcgtggtctgcggcgggctggtctccgacatggactgcccgctgcacctcgtgctccggtacgacgtgtgccggaacaggtgggccgtgatggcgcggatgctggcggcgcggtccttcttcgccggcggcgtcatcgacggccgcgtgtacgtcgcgggagggtacagcgcggaccagttcgagctgagctccgccgaggtgctcgaccccgctggcgccggcgcgtggcggccggtcgccagcatgggggccaacatggcgtcggccgactccgccgtgctcggcggcaggctgtacgtgaccgaggggtgcgcgtggcccttcttctcggcgccgaggggccaggtgtacgacccgagggcggaccggtgggaggcgatgccggcggggatgcgggaagggtggacggggctgagcgtcgtcgtcgcgggacgcctgttcgtcgtctcggagtacgagaggatgaaggtcaaggtgtacgacccggagacggactcgtgggacacggtcggcggcgcccccatgcccgagcgcatcatgaagcccttctcggtgagctgcgtcgacagtaggatcgtagtcgtcgggcgaggcctccacgtcgcgattgggcatgtgcgggaggagcccgctggcggcggtcctggtagcaggggagcgccaggctactccgtttgctggcaggacgtggacgctcctaaggagttcagcgacctgacaccttcgagcagtcagattctgcatgcttagctgcttgttgagccagccagccactgcccactgatgagacgcgcaatcgagtaggatcttttcgagtctctattataaggagggagctggagatgtaaagaaataaaccgaggcttttcaaatcggggagagatgaattgaggctcttctgcctggttgtaagtagatttgcttgtccagtttctccaacatatctgttgctgtgtttcgctctttggtgtttcattggtcagaaaaaaaagaactgttgctgtcttgctgaatccaccctgcaaaataaacgctcgctgcttcgtagcttgtacgctgcccattgcctagctgttttgcttaatgatagcatgttaggagttgattggggttctggta

SEQ ID NO: 142620 - DNA, 800 bp, Zea Mays
ccccgaattttctgcatatatctaaaaaaaatatcgaattacatcaaatccgaggagcagccacagccatccatggaggcgctctacttgctggcctccctggccgcgaccctcgtcacatccgccttccactcgctcctgctgctcctccgcctcctcctccgctacccgcgccgcgctgcccctaccgatgatgggcccgccgcggcggcgcggctctacgagggccgggtccggcacgcgcgacggcgcccggcggcgcacaccttcgagtaccccgcgcgctacgccctcgtcgacctcgaccgactgccgctccccggccacctctccgccgacgatgcccgccgcgtcgcctccacctccggccccgtgcacctcttgacggtacccgagagcgtggggtacgagcagaacccgctgagcatttactactgctacgattctgcaggacaggggcaagatggagagctcagaacgtgcattgccgaggtcacaaacaccccctgggcagagagagtgatgtttaccttccaaccgggctctgatctcatcgcgaagcccttgcatgtcagcccctttatggacatgctcagcaactggagtattcgcgctgatgctcctggtgatagactttatgttgttatatcagttcagcatccgacacttggggactacttcactgcagttttggatgccaaattggatggacagacaagtaattctctgaggctggcaaccttcttctggctgatgccgcacaaagttgctgcatgatatactgggaggtaagggtcctt

SEQ ID NO: 142621 - DNA, 696 bp, Zea Mays
aaaaaaaatatcgaattacatcaaatccgaggagcagccacagccatccatggaggcgctctacttgctggcctccctggccgcgaccctcgtcacatccgccttccactcgctcctgctgctcctccgcctcctcctccgctacccgcgccgcgctgcccctaccgatgatgggcccgccgcggcggcgcggctctacgagggccgggtccggcacgcgcgacggcgcccggcggcgcacaccttcgagtaccccgcgcgctacgccctcgtcgacctcgaccgactgccgctccccggccacctctccgccgacgatgcccgccgcgtcgcctccacctccggccccgtgacaggggcaagatggagagctcagaacgtgcattgccgaggtcacaaacaccccctgggcagagagagtgatgtttaccttccaaccgggctctgatctcatcgcgaagcccttgcatgtcagcccctttatgcccgtaggacatgctcagcaactggagtattcgcgctgatgctcctggtgatagactttatgttgttatatcagttcagcatccgacacttggggactacttcactgcagttttggatgccaaattggatggacagacaagtaattctctgaggctggcaaccttcttctggctgatgccgcacaaagttgctgcatgatatactgggagg

SEQ ID NO: 142622 - DNA, 796 bp, Zea Mays
ccccgaattttctgcatatatctaaaaaaaatatcgaattacatcaaatccgaggagcagccacagccatccatggaggcgctctacttgctggcctccctggccgcgaccctcgtcacatccgccttccactcgctcctgctgctcctccgcctcctcctccgctacccgcgccgcgctgcccctaccgatgatgggcccgccgcggcggcgcggctctacgagggccgggtccggcacgcgcgacggcgcccggcggcgcacaccttcgagtaccccgcgcgctacgccctcgtcgacctcgaccgactgccgctccccggccacctctccgccgacgatgcccgccgcgtcgcctccacctccggccccgtgcacctcttgacggtacccgagagcgtggggtacgagcagaacccgctgagcatttactactgctacgattctgcaggacaggggcaagatggagagctcagaacgtgcattgccgaggtcacaaacaccccctgggcagagagagtgatgtttaccttccaaccgggctctgatctcatcgcgaagcccttgcatgtcagcccctttatgcccgtaggacatgctcagcaactggagtattcgcgctgatgctcctggtgatagactttatgttgttatatcagttcagcatccgacacttggggactacttcactgcagttttggatgccaaattggatggacagacaagtaattctctgaggctggcaaccttcttctggctgatgccgcacaaagttgctgcatgatatactgggagg

SEQ ID NO: 142623 - DNA, 863 bp, Zea Mays
atggagcaggcgcccccgtcgctgccctctcgaccggctgtggcggcggtcgacatggcgctaagcctggcgccgccggagggacaccgccgccacgaggacgagcagaaccaggcaacggcgcgcgtcggcgggaagggggggcgcttgttcccgtgcctcttctgcaacaagaagttcctcaagtcgcaggcgctcggcgggcaccagaacgtgcacaagaaggagcgcgccgccggcgccttgaactggaacccctacctctactgtgacccctacgctgcagcggcggtcccgggcagcaggctcggtgctgctgcagcgtccgtgccgctcgcctcgcatggcggcggcactgctgccgcagaggcagagcctcctggcagcgtgagcgtcgtcaagctcaagctcgagaggcctgacggcggcgcggcgctcttcacggacgacgacgccttgctcctggcggaaccagcagcagccgaccggccctttaccaggctgcccgacggcaccgtggacatgctcaactggaggaggacctcccgcgtctctgccccaccggacaccaacgcagcaccctccggcgccggcgaggagctgcttgacctcgagttgcggctctagctagaaccgcgacggcgtgattctgctcggggagaaagcttaaaaagacgcatcttccagctaggttgtgtcgctctctcttcttgccttgatgccttcactatatccatatgatatgattgtatatatctatctcttgtcttgtgatcctgcccttgccccaaccaagcttgatatatggggctttgttttgtgcttgttatgacgaagtactgattttaatgtgcttgtgtgaa

SEQ ID NO: 142624 - DNA, 91 bp, Zea Mays
taacaaattacaaattggatattacatgtgctcacttatacccttagttgtgttttttgctcagttttacccttccagtgctatagaacag

SEQ ID NO: 142625 - DNA, 77 bp, Zea Mays
ggtagtggagggtacgtgcgagggtgaggtatacggttgccgcgacttgcgactttttttactatttttactgtttt

SEQ ID NO: 142626 - DNA, 1593 bp, Zea Mays
accgccactggacgtgcgctccctccacgctccggcccttctcgcctctccggccatggccaccgccgccgccgccgtcacggccaccttccgcaccctgatccagcacgcagcggcttgtggcgcccccgtcccgctccccagcgtccggttccagagcctgcagcgccaccgcgtcggcctccgccgcttcgcgccaccgcgtgggcgccccgtcctacccccgcccttcgccgccgaggacttctcttcctacgtagatgatttctccggggacgacggcgaggagcacttcgatgaggaagagggctctgagccggaggaggaagccgaggccccgcgcgcgtactcgtcgccacgaagccgcccgccgcgcggcgacgaccccggccgtctcttcgtcggcaaccttccctacacctatacctccgaggagctcgcccaggtgttctctgaggccggcagggtcgacgacgcgcagataatctacgacaaggtcaccaacaggagccggggcttcgccttcgtcaccatggccaccgccgaggaggccgccaaggccatccagatgttcgatggcgccgtaagtaccgcaccggccaattggatcagcacttccacacctcacagaattgggatcctgctcttgcccatgaatgtgcaagcgtgtgttctgacttctgacagatctttggcacattcttctccaatgcagctgctgggagggaggacggctagggtgaactacccggaggtgccgcgtggcggggagaggagaacagtcaccatgagtggccgcaggcgtgacgatggcacttacaagatttatgccggcaacctggggtggggggtgcgtgccgacacgttgaggaacgtgttcgagggtagggccggcttgctcgacgccagggtcatctttgagcgtgagactggtcgctccagagggtttgggttcgtctccttcagcaccgcagaggatgcacaggctgcattggagtctttggatggagtggagctggaagggaggtcgcttcgtcttagtctggcagaacagaacccgccacctggttccccgcctagcactgcgcaggcacagcaggaagaaacggattcaggcgcacctgctggtgggggtacggaggcagccagttcttcagaaccatctgaagcagaggtgggcgagagcaacttgcaaacagctgcaaattattgataagcaggagccacagggttataaatgtgttgcaacgacctctaaatcctgccattcgagtccaaggtgtgctgatagggaagtaaattttgacacgagtgatgctgtagcgaggattcagcatttgagctatacatatacactagaatggattaagtgttgttaggaatgtatttgtgtaatgaattctgcaaagtatgatctcaactgcagttgtgtagcctttctcttactgtaaactgatcctttttcaatgttctgttttcgttcagagtgtgtgctcaactcatagattttgtttgtcaggcaaattttcaaatgaactggagcgatatgggaggtataaactatttttcaattgacatttcaaagatgtaatc

SEQ ID NO: 142627 - DNA, 1479 bp, Zea Mays
ctgccaccgccactggacgtgcgctccctccacgctccggcccttctcgcctctccggccatggccaccgccgccgccgccgtcacggccaccttccgcaccctgatccagcacgcagcggcttgtggcgcccccgtcccgctccccagcgtccggttccagagcctgcagcgccaccgcgtcggcctccgccgcttcgcgccaccgcgtgggcgccccgtcctacccccgcccttcgccgccgaggacttctcttcctacgtagatgatttctccggggacgacggcgaggagcacttcgatgaggaagagggctctgagccggaggaggaagccgaggccccgcgcgcgtactcgtcgccacgaagccgcccgccgcgcggcgacgaccccggccgtctcttcgtcggcaaccttccctacacctatacctccgaggagctcgcccaggtgttctctgaggccggcagggtcgacgacgcgcaggtacccgtacgccataatctacgacaaggtcaccaacaggagccggggcttcgccttcgtcaccatggccaccgccgaggaggccgccaaggccatccagatgttcgatggcgccctgctgggagggaggacggctagggtgaactacccggaggtgccgcgtggcggggagaggagaacagtcaccatgagtggccgcaggcgtgacgatggcacttacaagatttatgccggcaacctggggtggggggtgcgtgccgacacgttgaggaacgtgttcgagggtagggccggcttgctcgacgccagggtcatctttgagcgtgagactggtcgctccagagggtttgggttcgtctccttcagcaccgcagaggatgcacaggctgcattggagtctttggatggagtggagctggaagggaggtcgcttcgtcttagtctggcagaacagaacccgccacctggttccccgcctagcactgcgcaggcacagcaggaagaaacggattcaggcgcacctgctggtgggggtacggaggcagccagttcttcagaaccatctgaagcagaggtgggcgagagcaacttgcaaacagctgcaaattattgataagcaggagccacagggttataaatgtgttgcaacgacctctaaatcctgccattcgagtccaaggtgtgctgatagggaagtaaattttgacacgagtgatgctgtagcgaggattcagcatttgagctatacatatacactagaatggattaagtgttgttaggaatgtatttgtgtaatgaattctgcaaagtatgatctcaactgcagttgtgtagcctttctcttactgtaaactgatcctttttcaatgttctgttttcgttcagagtgtgtgctcaactcatagattttgtttgtcaggcaaattttcaaatgaactggagcgatatgggaggtataaactatttttcaattgacatttcaaagatgtaatc

SEQ ID NO: 142628 - DNA, 1511 bp, Zea Mays
cggataagaagaggacaacttatttatcgacggcgagaggctgcactgccaccgccactggacgtgcgctccctccacgctccggcccttctcgcctctccggccatggccaccgccgccgccgccgtcacggccaccttccgcaccctgatccagcacgcagcggcttgtggcgcccccgtcccgctccccagcgtccggttccagagcctgcagcgccaccgcgtcggcctccgccgcttcgcgccaccgcgtgggcgccccgtcctacccccgcccttcgccgccgaggacttctcttcctacgtagatgatttctccggggacgacggcgaggagcacttcgatgaggaagagggctctgagccggaggaggaagccgaggccccgcgcgcgtactcgtcgccacgaagccgcccgccgcgcggcgacgaccccggccgtctcttcgtcggcaaccttccctacacctatacctccgaggagctcgcccaggtgttctctgaggccggcagggtcgacgacgcgcagataatctacgacaaggtcaccaacaggagccggggcttcgccttcgtcaccatggccaccgccgaggaggccgccaaggccatccagatgttcgatggcgccctgctgggagggaggacggctagggtgaactacccggaggtgccgcgtggcggggagaggagaacagtcaccatgagtggccgcaggcgtgacgatggcacttacaagatttatgccggcaacctggggtggggggtgcgtgccgacacgttgaggaacgtgttcgagggtagggccggcttgctcgacgccagggtcatctttgagcgtgagactggtcgctccagagggtttgggttcgtctccttcagcaccgcagaggatgcacaggctgcattggagtctttggatggagtggagctggaagggaggtcgcttcgtcttagtctggcagaacagaacccgccacctggttccccgcctagcactgcgcaggcacagcaggaagaaacggattcaggcgcacctgctggtgggggtacggaggcagccagttcttcagaaccatctgaagcagaggtgggcgagagcaacttgcaaacagctgcaaattattgataagcaggagccacagggttataaatgtgttgcaacgacctctaaatcctgccattcgagtccaaggtgtgctgatagggaagtaaattttgacacgagtgatgctgtagcgaggattcagcatttgagctatacatatacactagaatggattaagtgttgttaggaatgtatttgtgtaatgaattctgcaaagtatgatctcaactgcagttgtgtagcctttctcttactgtaaactgatcctttttcaatgttctgttttcgttcagagtgtgtgctcaactcatagattttgtttgtcaggcaaattttcaaatgaactggagcgatatgggaggtataaactatttttcaattgacatttcaaagatgtaatc

SEQ ID NO: 142629 - DNA, 1022 bp, Zea Mays
ttttttttttgcacacacaaaaaaaggaaagctgtgtaatttcaatgcaagacgcgatgcagtaacagcctttatagtttgagcgaaaggagcagcacacatcaacaggtcgcatcaccaaaatcacataacagtatcaaaattttctagtataaattgagcgtgacacccaacaattacgagcagaacagcattatttcgcccccacaaagggggccaaaattaacctcacgaactaatatgaacctaataaccaaccgagcaattgttagttacactcaaacggtcaaaccttctcagaaaccgcttcttctttcttctccttctgagcaattgtttcttctttcttctcctcgccggcggccggctggggcacggcctcttccttaatctctccttcggtcgctggctcccatcccttggccttcgcagtctcagcagcagctgcagctgcagctgcagcggcctcggcctcggcgcgctcgttgacggcctcctcggccatgagcacgggcgcgtagtagtcggcgtgcgcgtccatgcacttcttgaggttggcggtggcctcgtggcaacgctcgaccatgtcggcgccctccttctgcgccgcctccacgcactcctcccacgccacgaaggtgtctctgcagccgccggccttcatgaagaggcagaacccgcactctccttcctcctcaacttcctcactctccccctccgctgctggggcaggctcttgcggctgcggcggcccttcttgctccgccgcggacgagtgcgccgtggtgggtgtgggagtggtgggggtctcttgcgcgaggctgggatccacggcgggctcgggggacgccattgccgtctgtgcgaggtgaggtcgctcggaaggtagtatggggggcgatgggatgcggcgcttggtggcggcggtacaggtacttcttggggaggaagaagaaatcccgccgccggccgaggagcacgtcaacctggtgttggtctggtctccaaaaggggttgacccc

SEQ ID NO: 142630 - DNA, 98 bp, Zea Mays
cttacaaagtgggtgttacacttgtgtcctgtccctaactgctgagcatgccacagatcaatatcccatacgaaattgtaaacaagtttgttgcagtc

SEQ ID NO: 142631 - DNA, 189 bp, Zea Mays
atgcacgacgatcgaggacgcgtacacgcacgcaaccacaacctgccgcttcgcattaggtcgccgcgtgctgtcgtcgtcgtcgtcctcctcttctctacactcctaatctactacacagaaacactggagctgatgaacatgcatgacgctgcagggggggtccaaacgggagaagaacgccactga

SEQ ID NO: 142632 - DNA, 263 bp, Zea Mays
ttttttcccctgcttatgcattatcttattctgcttgctataacatttgcttgtaaatttgcagccttctgtagccaccaccgacacaacctgtgagtgcgtggtgacaagtggtcagcacaaccaacaacccagcagttctgcatcctccacaaagggatgcgaacaacccagcaggtctactcgctattgctgaggagacattggcagagttcatgtccaaggcgactggaactgctgtcaactgggtgcaaatggttggg

SEQ ID NO: 142633 - DNA, 1311 bp, Zea Mays
ctctctccccgtctgagtaatcaaatccatcatcatccacgccctggcgaaaccgaaacaccacccaacaggtaccctgccgttcgtcaggcggttcacggccaaggaggtggaggccgccacgcgcggcttcaccgcggtgctcgacgccgccggcacggcctacagggcgcgcttcgccggcggcctcgtcgccaccgtcgtcaggcgccgccgcgacgccgacgacaacgacgaccaccatcgccagggagagggaggaggaggagggaccacggacgccttctacctggagctgcagctgctggcccgcctcaaccaccgccacgtcgtcaggctgcgcggcttcgcgctagcccaccacgcaaggttcctcgtcttcgatcacatggagaacaggagcctcaaggaatgcctccacgatccgctccggacgccgctggactggcggaccaggctgcaggtcgccattgacgtcgcggcagcactggaatacctctactaccactgcgaccccccggtgttccacgtgtccgtcaactccggcaccgtgctcatggacgccaacttcgtcgccaagctatcggatgtcggcgtggtcagccacgacgtgaggctcgccaccactgactccttccaagaccgggtcgagcggaggcgggcgggcctggcgttccagtacggcgtgctggtgctggagctggtgacggggcagtccccgggcgccgacggcgagctcgtgcgctgggcgcaggaccccggctccgccgcctccgtgcaccggatggtggacgccgacctcggcggcgtctacgacgcccgcgagctccgcgacctcgtcgccgtcgccaggctctgcaccagggacagggacgacagggacgagggcgctggcgtcgtcaccattccgcagatcgtcaggtacctccaggggaagctggagcggatcggatgccaggccaggttcggatgatgatgatgacggtgatggttcgcctgcgttgcgtgcgcgggcgatcagcgtatcatcatcgtctttgttcttctttaacagcctgtctgtaccatcaaatgtacaaaagcgcgtggcttttcttctgtggatgcccagaatctgttggtgtcgatcagtcgatagaggaaccaaagtgagttgctgactgcaattggaagcggagtgcagttttctcttctgatggacatttttttcgagatgttttgctgtgctttttgtgacgtgacaagaacagagattgccatggcagttttgaatctgagttctgagatgatagaaaacatgttctgctcaca

SEQ ID NO: 142634 - DNA, 1457 bp, Zea Mays
gcaaaggcgagtggcgtgttcgatcatcatcgccgccacccttccttgttgaattgtcgatgctagcaggcagtagtaatagcagtcccgtcgcgtccatccatccatccaccaaccaccaccattgtcatcaccctgctctgcaactgcaagtcacaggcgcggcctctgacaccgcccctccgactccgatcctctgtcgttcggtgacactgacatgggctgctgcctccaccgccgcctctgcctcggcggcacgggtaccctgccgttcgtcaggcggttcacggccaaggaggtggaggccgccacgcgcggcttcaccgcggtgctcgacgccgccggcacggcctacagggcgcgcttcgccggcggcctcgtcgccaccgtcgtcaggcgccgccgcgacgccgacgacaacgacgaccaccatcgccagggagagggaggaggaggagggaccacggacgccttctacctggagctgcagctgctggcccgcctcaaccaccgccacgtcgtcaggctgcgcggcttcgcgctagcccaccacgcaaggttcctcgtcttcgatcacatggagaacaggagcctcaaggaatgcctccacgatccgctccggacgccgctggactggcggaccaggctgcaggtcgccattgacgtcgcggcagcactggaatacctctactaccactgcgaccccccggtgttccacgtgtccgtcaactccggcaccgtgctcatggacgccaacttcgtcgccaagctatcggatgtcggcgtggtcagccacgacgtgaggctcgccaccactgactccttccaagaccgggtcgagcggaggcgggcgggcctggcgttccagtacggcgtgctggtgctggagctggtgacggggcagtccccgggcgccgacggcgagctcgtgcgctgggcgcaggaccccggctccgccgcctccgtgcaccggatggtggacgccgacctcggcggcgtctacgacgcccgcgagctccgcgacctcgtcgccgtcgccaggctctgcaccagggacagggacgacagggacgagggcgctggcgtcgtcaccattccgcagatcgtcaggtacctccaggggaagctggagcggatcggatgccaggccaggttcggatgatgatgatgacggtgatggttcgcctgcgttgcgtgcgcgggcgatcagcgtatcatcatcgtctttgttcttctttaacagcctgtctgtaccatcaaatgtacaaaagcgcgtggcttttcttctgtggatgcccagaatctgttggtgtcgatcagtcgatagaggaaccaaagtgagttgctgactgcaattggaagcggagtgcagttttctcttctgatggacatttttttcgagatgttttgctgtgctttttgtgacgtgacaagaacagagattgccatggcagttt

SEQ ID NO: 142635 - DNA, 1588 bp, Zea Mays
gcaaaggcgagtggcgtgttcgatcatcatcgccgccacccttccttgttgaattgtcgatgctagcaggcagtagtaatagcagtcccgtcgcgtccatccatccatccaccaaccaccaccattgtcatcaccctgctctgcaactgcaagtcacaggcgcggcctctgacaccgcccctccgactccgatcctctgtcgttcggtgacactgacatgggctgctgcctccaccgccgcctctgcctcggcggcacgggtaccctgccgttcgtcaggcggttcacggccaaggaggtggaggccgccacgcgcggcttcaccgcggtgctcgacgccgccggcacggcctacagggcgcgcttcgccggcggcctcgtcgccaccgtcgtcaggcgccgccgcgacgccgacgacaacgacgaccaccatcgccagggagagggaggaggaggagggaccacggacgccttctacctggagctgcagctgctggcccgcctcaaccaccgccacgtcgtcaggctgcgcggcttcgcgctagcccaccacgcaaggcccgtgcccttccgccctccgaccctttcttccttccctcttccctctctgtgcgcgctctctatctctgcttctgcggattggtgagattcacgtttggatatggctgggctggggtggaacgtttcaggttcctcgtcttcgatcacatggagaacaggagcctcaaggaatgcctccacgatccgctccggacgccgctggactggcggaccaggctgcaggtcgccattgacgtcgcggcagcactggaatacctctactaccactgcgaccccccggtgttccacgtgtccgtcaactccggcaccgtgctcatggacgccaacttcgtcgccaagctatcggatgtcggcgtggtcagccacgacgtgaggctcgccaccactgactccttccaagaccgggtcgagcggaggcgggcgggcctggcgttccagtacggcgtgctggtgctggagctggtgacggggcagtccccgggcgccgacggcgagctcgtgcgctgggcgcaggaccccggctccgccgcctccgtgcaccggatggtggacgccgacctcggcggcgtctacgacgcccgcgagctccgcgacctcgtcgccgtcgccaggctctgcaccagggacagggacgacagggacgagggcgctggcgtcgtcaccattccgcagatcgtcaggtacctccaggggaagctggagcggatcggatgccaggccaggttcggatgatgatgatgacggtgatggttcgcctgcgttgcgtgcgcgggcgatcagcgtatcatcatcgtctttgttcttctttaacagcctgtctgtaccatcaaatgtacaaaagcgcgtggcttttcttctgtggatgcccagaatctgttggtgtcgatcagtcgatagaggaaccaaagtgagttgctgactgcaattggaagcggagtgcagttttctcttctgatggacatttttttcgagatgttttgctgtgctttttgtgacgtgacaagaacagagattgccatggcagttt

SEQ ID NO: 142636 - DNA, 1473 bp, Zea Mays
gcaaaggcgagtggcgtgttcgatcatcatcgccgccacccttccttgttgaattgtcgatgctagcaggcagtagtaatagcagtcccgtcgcgtccatccatccatccaccaaccaccaccattgtcatcaccctgctctgcaactgcaagtcacaggcgcggcctctgacaccgcccctccgactccgatcctctgtcgttcggtgacactgacatgggctgctgcctccaccgccgcctctgcctcggcggcacgggtaccctgccgttcgtcaggcggttcacggccaaggaggtggaggccgccacgcgcggcttcaccgcggtgctcgacgccgccggcacggcctacagggcgcgcttcgccggcggcctcgtcgccaccgtcgtcaggcgccgccgcgacgccgacgacaacgacgaccaccatcgccagggagagggaggaggaggagggaccacggacgccttctacctggagctgcagctgctggcccgcctcaaccaccgccacgtcgtcaggctgcgcggcttcgcgctagcccaccacgcaaggttcctcgtcttcgatcacatggagaacaggagcctcaaggaatgcctccacgatccgctccggacgccgctggactggcggaccaggctgcaggtcgccattgacgtcgcggcagcactgccgattcatcattcaggaatacctctactaccactgcgaccccccggtgttccacgtgtccgtcaactccggcaccgtgctcatggacgccaacttcgtcgccaagctatcggatgtcggcgtggtcagccacgacgtgaggctcgccaccactgactccttccaagaccgggtcgagcggaggcgggcgggcctggcgttccagtacggcgtgctggtgctggagctggtgacggggcagtccccgggcgccgacggcgagctcgtgcgctgggcgcaggaccccggctccgccgcctccgtgcaccggatggtggacgccgacctcggcggcgtctacgacgcccgcgagctccgcgacctcgtcgccgtcgccaggctctgcaccagggacagggacgacagggacgagggcgctggcgtcgtcaccattccgcagatcgtcaggtacctccaggggaagctggagcggatcggatgccaggccaggttcggatgatgatgatgacggtgatggttcgcctgcgttgcgtgcgcgggcgatcagcgtatcatcatcgtctttgttcttctttaacagcctgtctgtaccatcaaatgtacaaaagcgcgtggcttttcttctgtggatgcccagaatctgttggtgtcgatcagtcgatagaggaaccaaagtgagttgctgactgcaattggaagcggagtgcagttttctcttctgatggacatttttttcgagatgttttgctgtgctttttgtgacgtgacaagaacagagattgccatggcagttt

SEQ ID NO: 142637 - DNA, 1541 bp, Zea Mays
gcaaaggcgagtggcgtgttcgatcatcatcgccgccacccttccttgttgaattgtcgatgctagcaggcagtagtaatagcagtcccgtcgcgtccatccatccatccaccaaccaccaccattgtcatcaccctgctctgcaactgcaagtcacaggcgcggcctctgacaccgcccctccgactccgatcctctgtcgttcggtgacactgacatgggctgctgcctccaccgccgcctctgcctcggcggcacgggtaccctgccgttcgtcaggcggttcacggccaaggaggtggaggccgccacgcgcggcttcaccgcggtgctcgacgccgccggcacggcctacagggcgcgcttcgccggcggcctcgtcgccaccgtcgtcaggcgccgccgcgacgccgacgacaacgacgaccaccatcgccagggagagggaggaggaggagggaccacggacgccttctacctggagctgcagctgctggcccgcctcaaccaccgccacgtcgtcaggctgcgcggcttcgcgctagcccaccacgcaaggttcctcgtcttcgatcacatggagaacaggagcctcaaggaatgcctccacggttggtgaatcaaagactctcatctcagtctcctcccccctcctcctcctgaaccctgatgcctgccgcttcactccaccgcagatccgctccggacgccgctggactggcggaccaggctgcaggtcgccattgacgtcgcggcagcactggaatacctctactaccactgcgaccccccggtgttccacgtgtccgtcaactccggcaccgtgctcatggacgccaacttcgtcgccaagctatcggatgtcggcgtggtcagccacgacgtgaggctcgccaccactgactccttccaagaccgggtcgagcggaggcgggcgggcctggcgttccagtacggcgtgctggtgctggagctggtgacggggcagtccccgggcgccgacggcgagctcgtgcgctgggcgcaggaccccggctccgccgcctccgtgcaccggatggtggacgccgacctcggcggcgtctacgacgcccgcgagctccgcgacctcgtcgccgtcgccaggctctgcaccagggacagggacgacagggacgagggcgctggcgtcgtcaccattccgcagatcgtcaggtacctccaggggaagctggagcggatcggatgccaggccaggttcggatgatgatgatgacggtgatggttcgcctgcgttgcgtgcgcgggcgatcagcgtatcatcatcgtctttgttcttctttaacagcctgtctgtaccatcaaatgtacaaaagcgcgtggcttttcttctgtggatgcccagaatctgttggtgtcgatcagtcgatagaggaaccaaagtgagttgctgactgcaattggaagcggagtgcagttttctcttctgatggacatttttttcgagatgttttgctgtgctttttgtgacgtgacaagaacagagattgccatggcagttt

SEQ ID NO: 142638 - DNA, 107 bp, Zea Mays
ttttttttggaaatttggatccataccattaaaagatcaccactttggatccataccattactatctcacttacatgtgggtccacatgagtcaatgacatgtgggg

SEQ ID NO: 142639 - DNA, 426 bp, Zea Mays
atggaaaagacccgagctaggctgtgggagctccaagctaagcgcgcacagggaagctgggcgcgagctcagaacagaggccgagaagggagagaggaagcaggcgcggtggccaggagatccagggcgcgacgagcagagggcttcgcgcgcagccatggaaggactcgcggcagcacacgcatggagatgagcgcgcatcgaggaagaagtagagggagggagagaagcagctgggcgcacagggagaacgcgccatggctgagggagctcgggacacaggagcgccgcgcagaggaagctctacgagctaggatccgacgccggggaaggaagaaagaagagcggctgtcaggaggggaggagacacggctggggagggactcgagctggcaccggcgcacgccatgggagcagtggagctag

SEQ ID NO: 142640 - DNA, 323 bp, Zea Mays
ctctgaatgggcaaagggatcatattttggaacatttaggagggcttgatccattatcacctcttcaacttggcagcagattctctcggtgtatttctgacaacggggtccagaaagaacacattaggggagtacttggtgacttacaaccaggatgggtctcacattgtaatacccaaattgtaattgttatgagataatgaaaaaggggacacaatttcacttcatcgatatgtgagtttgacttttatgcatcatcacatgtgaacaccatctttaaaaacaagtaataaaaatatatactactaaattatgcatcatgc

SEQ ID NO: 142641 - DNA, 888 bp, Zea Mays
atggcgtcgctgcggcatcccccgcaatcaactcccagatctcgtgctcatctccccgcgatccccctccccagctcttccaccccgaagcaccacacctcccgccatgcactgcatcgccccccgcctgctcctcctcccactcccgaccgcctcccgccatgcgctatcgccaacccagatgccacctcttcctccccttctcccctcccgcgctttcactttatggacggtggttcctgtggtctcgagggagcgtcggtagtgacatctactaccagcgctggtattcagcttctgccagagaagcactacgccgatgaagcttgtggagccatggcgagcagtaatggtcctgaaggagtgccagtagtgacttctgctgatgaccctccgacccgtgccgatattccatttctctgcaattcagttgatgaaacctgtgaagccacaggggacgacagtgctcccttgaatgctcagatatgtacgggtttctctaagttgatcagcttggaggtgaagaaaggcctccagaagtgcgcgacgttcccaccctcgtctggtcagcctcagcaggaggattgttcatgctcccatgtaggtgatggcctcacgggtgctcctgctttctggcgatttgtgtccttacctgaatttatcgaggaggttatggctctggtaaagcttgatcagctgagatatgcattagtagggaagcagggttctactgggttatcaacagagcaaaggaagcgccttactattttttcaaattatgttgcttattgtagcagattgccagagttaccttacttttttcttgtaaaagaactattttgtttgttactgaatctcaatttagggggggaatacgtccgcaactaa

SEQ ID NO: 142642 - DNA, 1994 bp, Zea Mays
tgagcataggattctcaagtcctcgtgtaccatcgtgctcaaatgtgaaattaaacgtgcacctcaaataatcatagaatttagttaaccagaaaacaaaaacaaaaaaaaacccctcattatatagcacataccaccaggaagcgccccaccactcaaggtttgctgtgttgtgtctccagcaatggagctggcatcaacaatgtccgtggcaatggctctggcggcggccatcttcgtcgtcctctgctccgtcgtcgcctcggcacgtggccgccgcgagaaggccctgaagctcccgccgggcccgcggggctggcccgtgctgggcagcctcggcgcgctggcgggcgcgctgccgccgcaccgcgcgctggccgcgctggcggcgcgccacggcccgctcatgcacctccgcctcggctcctaccacacggtggtggcctcgtcggcggacgccgcccgcctcgtcctcaggacgcacgactccgccctcgccgaccgcccggacaccgccgccggcgagatcacctcctacggctacctcggcatcgtgcacaccccgcgcggcgcgtactggcgcatggcgcgcaggctctgcgccaccgagctcttctccgcgcgccgcgtggagtcgttccaggacgtccgcgcgcaggagatgcgcgcgctcgcgcgcggcctgttcgggtgcgccgccgggcgccgcgccgtcgccgtccgggagcacgtggccggcgccacgatgcggaacatcctccgcatggcggtcggcgagaagtggtcgggctgctacggcagccccgagggcgaggcgttccggcgctcgctggacgaggcgttcgcggcgaccggcgcggtcagcaacgtcggcgagtgggtgccgtggctgggctggctcgacgtgcaggggttcaagcggaagatgaagcgtctgcacgaccttcacgaccatttctacgagaagatcctcgtcgaccacgaagaacggaggcgccttgctcaagcttccggcggcgagtttgtggcgactgacctcgtcgacgtgctgctgcagctcagcgaggagagcacgaagctggagtcggagtcggaggccaggctccctcgcgacggcgtcaaggccctcatccaggacatcatcgccggtggcacggagagctcggcggtgacgatcgagtgggccatggcggagcttctgcgacacccggaggccatggccaaggccaccgatgagctcgaccgcgtcgtaggcagtgggcgctgggtcgcggagcgcgacctgccggagctccactacatcgacgccgtcgtgaaggagacgctgcggctgcaccctgtcggcccgctcctcgtcccgcactacgcccgcgagcgcacggtggtggccggctacgacgtccccgcgggcgcgcgcgtgctggtgaacgcgtgggccatcgcgcgcgacccggcgtcgtggcccgacgcgcccgacgcgttccagccggagcggttcctgggtgctgccgccgctgtggacgtgcgcggggcgcacttcgagctgctgccgttcgggtccggccgacgcatctgccccgcgtacgatctcgccatgaagctggtcgccgccggcgtggcgaacctggtgcacgggttcgcgtggcggctgccggacggggtggcggcggaggacgtgagcatggaggagcatgtcgggctatccacgcgccggaaggtgccgctcttcgccgtggctgagcccaggctgccggtgcacctctacagcgcgaccgaatgaaaaccagggtctctatatacaaaactactggtattgtatatttgaaagtctacgttttgtatctcataatgttggagtactagtcaatccgtacattgccacagtttctatatattagatgagtaaactctattttaataagacataatagtatgtgtgtactatttgttagttgagtgtgaatttggagctaaaaaccaatattcaaatcttc

SEQ ID NO: 142643 - DNA, 709 bp, Zea Mays
cagatgaccaaaggatgagccagtcatcctctagtcttccaccttctacagctgatatgcaagaaaccatgaggaattctatgaaagaccctgcaatgcggcagatgcttacatccatgatgaagaacatgagccccgagatgatggcaaatatgagcgagcagtttggaatgaaactgtcaaaggaggatgccgcaaaagctcaacaagccatgtcgtcattatctccagaggatttggatagaatgatgagatggatggagcgagcacagaaagcggtagaagtcgcgaagaagacaaagaactggctcttgggccggcaaggcttgatccttgctattgtcatgctgatcctagctttcatccttcatcagtttgggtttatcggcagatgatggggggtgacttgggtggctgcatcagcatggaaatagattgttagatggcgatgcagagttccctcttgctaacaactgcttaaaagcgctttgggggaaggccggattacgagaattctttgtatccgtatcttttgaaagtgtaactctgtccataaagctacatcctatttttaccagcaaaggtagtagaaaggaatcgagccgaaactgttgtgataacaagccgacatgtaatatgataatatccttgtggtgctttcagttttaagtagcagttttgtttaataaagcatatgcaaaaggtgaag

SEQ ID NO: 142644 - DNA, 999 bp, Zea Mays
ccacccaaattttcgtctatataccacgtgtgcgcgctggagtctggaggtgcaggcagcggataacgtgctaaagtgtcctcactgctgctctcctccgctccgcagctcatggcttcctcggtctccctccgtggcgccatcctccagcgcccccacctcacgccccgccccgacgcccgccgcgcgcccacgacgaggcgccgcgccgtgcctgcaaagatctgctgcatcggatgggaccccgagggcatcctgggcgcgccgcagggcggccacatcgcgcgcctcgagttccgccgccgcctcgagagggactccgaggcgcgcgaggacttcgagcgccaggtgcgcgaggagaaggagcggcgccgcagcgagcgcgaggcgcgggtgatcccggacacggacgccggcctcgtcgagttcttcctcgacaccgacgcgcgcgagatcgagatcgagatcggcaggctgcggcccaggctcagccaggacttcttcggccacgtctcgcgcgagatagcgcagatcaaatttgcagtcaccaggacagcggagatggaagacagactgatcgagctggaggcgatgcagaaggttcttcttgagggagttgaggcgtacgacaagttgcagaacgaccttgttacagcgaaagaacggctcatgaagattctgcagtcaagtgacagaaaatcgacactgctggaaatggtggagcggaacgagctcaatatatccatactaacacttctcgatgagaacatcgcgagcgcgaagacgagtaatcaggatgaggcggccgctttcatggaggacgtgaggtcatctcttgtgaaatatataacaatatagatctgggacgcttttacataccaatggttcgttcattgtttaggcatggttcgtttttagaagtgtggttgctgttcgttcattgagaaatatataacaatataaatctgaattatttccgcctgtttgtagttgggctgc

SEQ ID NO: 142645 - DNA, 378 bp, Zea Mays
atggatccagagatgctgcggctggcgcaggagcagatgcgccgcatgtccccggacgacatcgcccggatgcagcagcagctgatgtctaaccctaacctaatgaggatggcgtctgagagtatgaagaacatgaagcctgaggacttaaggcgagctgcagagcaactgaatcaaacaagaccggaggatatgcgtgatatgaccgagaaaatcgccaacactactccggaggagtttgctgctatgaaggcgcaagcagatgctcaaatgtcctatgcgatgtctggtgctaagatgttaaagaagcagggaaacggacttcataaccagggaaagtattcagatgctgctagtaaatataagcttatgacctaa

SEQ ID NO: 142646 - DNA, 570 bp, Zea Mays
gaagttgggatttgggctggtgaccttgtaggtagatgacaattttattccatagatattgtgagcacaacaaatggaagtttaagtcaatttcttgctcatacgtcatatttatgcgtcaacagcaacattagctactatggtagaggctgatgaagttgatgtggttattgatccaaaagatatcgaccttaaaataacaagatctggtggagaagggcatcttcggcatttatgaggacgtcgagaagttgttgcaggcactgtccaaggaggaggaggccgtgcctggtcaccttctgcgccaacgtccttatcaacttctatgtgaagctcgatcctcaagccaccacgtgtaggttgttcgtcggaatgccagagcggaatatggtgtccttcgtcatgctcgtgcagggctacaacacgcacgctgacatgaatagagcatgatgatgctggtgaacacctggatgagagttgggattttgcgtcatcgctataaacggcaagcaacacggtgtgcgtcgtctgcatatgtaacctttgactgtccaacttcatggtacatgt

SEQ ID NO: 142647 - DNA, 1104 bp, Zea Mays
cgagagccataggccccgagcgcgcccgtccaccacacagcacgcacttcgcgccacagcggacgctcttctcgcgagcgcgcaccgatcgatcgagactcgagagacgccggaggaggggagggatgatgtggctcccgttcctgtacccggcgccggcgtcggcgtacgtggcggcgatgtcggcggtgtcgttcgtgtccatggcgaacgcgggcctcgccgagctccgcggcgaccacatgccctactccaagttctggcacgccgtggcgggtgccgccggcggggacgccaggcagcggggcgggatgccgctcctgcgaagccgggacggcatgctgctggcctacgccccggcgctgctcgccgccgccgcgtccttcgcggtgccgggcgccgtcgagggcgcgcgcgccgagctgctcagcgccgcgctcgccgcgcacttcctcaagcgggtcctcgaggtgctgtgcgtgcaccggtacagcgggagcatgccgctgggcacggcggccaccatctcctgcagctacctggtcagcacggccaccatggtctacgcgcagcacctcagccgcggcctcccggaccccgccgtggacctgctctgtcccggcgtgctcgtcttcgccgtcggcctcgccggcaacctctaccaccaccgcctcctctcggggctgagggccgacgacggcacagggtacaaggtccccaggggcggcctgttcggcctcgtcgcctgcccgcactacctcttcgagatcctcgccttcttcggcttcgccatgatctcgcagacgctgtacgcgctcgccgttgccaccggaacggcggcctacctcgccggccggagctgcgccaccaggaggtggtaccggtccaagttccaggacttcccgccgaggatcaaagcgttgattccgtacgtgctgtagtgagctagctaggagagtgatgagtcgcatgtacaagacagtaagacactgttcatttggtacgtacagagcatcatctgttgcagctgaacgtaaacttcatgggaaacaaattgttatctcccttgcaacatactaatgtgttagataagatctgaatcca

SEQ ID NO: 142648 - DNA, 441 bp, Zea Mays
acccaaacccgtgaacccgtgggttttttaaacccgaccaaacctagtgcatattgtcattttattttataaacgaacaacaaacttgttattccttatttacttcataatttttaacaattggtgaatgtatcagtaatcggtgagagtgttgcttgcttgctattatagtttttactagcgttatatatgtggtggatggataacttagtgcaaggtcacttaattatacaacttattatttgtatttcattctctctactaataattttataccaaatcatgaactcgttgttcattacatagattttggatcatgatatcattaatcattacgatacttattgattatgagaagataattatattggagatgaaacccgcgggtaacccatgggtacccgttaacccgatggctccgcaaaactgccgctgaccgag

SEQ ID NO: 142649 - DNA, 1302 bp, Zea Mays
atcagttcagtaagttcagccttcttgacttgtacagttgtactgaggtaggtctcgtctgagttggcaacgaccatgcctgccgtctcggccgccgcctgctgcgccgccacaacgccggcaaacgaggtggcggaggacctcctcggcttcctccgcgttctcagagacggcaccgtgctccggtcgccggcggacccagtgttctgcccggccaccttccccggcagccacccgtccgtgcagtggaaggaggccgtctacgacaagcccaagaacctccgcgtccgcgtgtacaggccgacgacgccgccggggacgaagaagaagctcccagtgctcgtccacttccacggcggcggcttctgcctggggtcgtgcacgtgggccaacgtccacgagttctgcctccgcctggccgcggaggccggcgccgtcgtgctctccgcgggataccgcctggcccccgagcaccgcctccccgcggccttcgacgacggggccgggttcatgcgctggctccgggaccagtcagcgatcggcggcgccggcgcctccgacgcctggctcgcggaggccgccgatttcggccgcgtgctcgtcaccggcgactcggcgggcgccacgatcgcgcaccacctcgccgtgcgcgccggctcggccgcggcggagccagagccggagccggagccgggcctcctcacggtccgcggctacgttctgctcatgccgttcttcggcggcgtccggcgcacggcctcggaggccgagtgcgcggaggaggcgttcccgaaccttgacctggtggaccggttctggaggctgtcgctgccggccggcgccaccagggaccacccggcgtccaacccgttcgggccggacagccctgacctgggcccggtggacttccggcccgtgctcgtggtggccggcggcctcgacctgatacgcgaccgcaccgtcgactacgccgagcggctggcggcgatgggcaagcccgtggagctcgccgagttcgccggcatgccccacgggttctacctgcaccagccggggtcccaggccaccggcgagctcatccagaccgtcgcccggttcgtccacgtcgttgcgccagaggctgcggcttaatttactcggcatatgcatgcatccgtgcatgtatcccgtttcttgtcgtcgtgttgtggttcactcgtatacctcatcttttttctcttatgaaattcttgtagagtaaaacccttctctctctgatgtctcggttgaatgatccaaataatggaccactggtttgggatt

SEQ ID NO: 142650 - DNA, 1420 bp, Zea Mays
aattctcccattagttatttagatgcaacatttaaatcatatattatcctataaaattgtttcatgaaactctcggttaagagagcatgtttgcatggtattcagtggatttgcagtggtcatggtcatgggatgactatatataagaggactaagcttgaggtttgctgaatatcatcgacttatatagcttaatcacattataatgcacgttaacaagggcacgccagcagccatgcccgccgtcttggttcccggctgctgtcccgccgctacggcggcgaacgaagtcgtcgaggacgtattgggcctggtgcgcgtcctcggcgacggcaccgtcgtccggtcggcggtcggcccagtgttcagcccagcgaccagcttccctgagaaccacccgtgcgtggaatggaaggaggcagtgtacgataagcccaacaacctcctcgtccgcatgtacaagccgtcgccgccggccgccggcgggaaggcgccggtgctcgtccacttccacggcggcgggttctgcatcgggtcgtgcacgtgggccaacgtgcacgcgttctgcctccgcctcgccgcggacaccggcgccgtcgtgctgtccgcggggtaccgcctcgcccccgagcaccgcctgcccgtggccgtcgacgacggggccggcttcatgcgctggttacgcgggcagtcgtcgtccgcggacgccgcggacgccgacgccgacgcctgggcctggctcgccgacgccgccgacctgggccgcgtgttcgtcaccggcgactcggcgggagcgaccatcgcgcaccacctcgccgtgcgcgccggcgtggcggcggccggcgctggtgaagccggcgacggcgagcgcaagacgccaggccagcaggtgactacggtccgcggctacgtgcttttgctgccattcttcggcggcgtcgagcgcacgccgtccgagaaggcggggtgtcccgccggcgccggggcgctactgagcctggacgtgctcgaccggttctggcgggtgtcgctgccggtaggcgccaccagggaccacccggtggcgaacccgttcgggccggacagccctgaactgggctcggtggacttcccgccggtcctcgtggtggtggccggcctcgacctgctgcgcgaccgagccgtcgactacgccgagcggttggcagcggcgggtaaacccgtggagctcgccgagttcgccgccgcggcccatggcttttacctgcacgagccgggctccgaggcgaccggcgagctgatacgggccgtgggccggttcgtcgacagctgcgtgtcagcgtccgaggtgctgcttgattagctgtttgcatgagtgcaatttggcttcgtatatttctatcgtacgtgtgtttctcagtactttaaaagaagttaacca

SEQ ID NO: 142651 - DNA, 313 bp, Zea Mays
ggtctcactctgtcacccaagctgaagtgcaatggtgggagctccgctcgcggcaagatctgcctaccaggttcatggcattctcctgcgtcaacctcccaagtagctggggctacaggcgcccgccagcatgcgcagctaatttttggtaattttggtagagacagggtttcaccatgttagccaggatggtctcgatctcctgacctcgtgatcctcccgccgcggcctcccaaagtgctgggattactggtgtgagccgccgtgccagccgaaacgcctttcaaaactccacactgctctccacttccac

SEQ ID NO: 142652 - DNA, 1303 bp, Zea Mays
gaaccactcgtctcccaaacgacaaaaaagcgcctccacttgcgcaccccacgcttcccgctctatctatatgactcacacttgtcactcaccccgcgccgctccactcgaccactccagccacgcgccagcgcccacccacccatggcgtccgaggccgcgccgcgggtcgtcgtggacgagtgccggggcgtgctgttcgtgtacagcgacggcacggtggtgcggcgcgcgcagccggggttcgcgacaccggtgcgggacgacggcacggtcgactggaaggacgtgacgttcgacgaggcccgcgggctggcgctccgcctctacctcccccgggaccgcggggccggggccgggcggcgcctgccggtcttcttctactaccacggcggcggcttctgcatcgggtcccgcgcctggcccaactgccagaactactgcctgcgcctggcctccgacctgggcgcgctcgtggtggcgccggactaccgcctcgcgcccgagcaccgcctccccgccgccatcgacgacggcgcggcggcggtcctgtggctggcgaggcagggcggcggggacccctgggtcgccgaggccgccgacctcggccgcgtcttcgtgtcgggcgactcggccggcggcaccatcgcgcaccacctcgccgtgcgcttcggcggctcgcccgcggacctggcccccgtcgccgtgcggggatacgtccagctcatgccattcttcggcggcgtggcgcgcacgcggtcggaggccgagtgccccgccgacgccttcctcgaccgccccctcaacgaccgctactggcgcctgtcgctgccggagggcgccacgcccgaccaccccgtggccaacccgttcggcccgggcgcgccgccgctggacgccgtcgacttcgcgcccaccctggtcgtcgtcggcggccgcgacctcctccacgaccgtgccgtcgactacgccgccaggctcagggccgctgggaagcccgtcgtggtcagggacttccacggccagcagcacggcttcttcaccatcgacccctggtccgacgcctccgccgagctcatgcgcgtcatcaagcgcttcgtcgacgccgacggccgcttcgacttcgactgacacgtcggtgtcgaactctagtattaaatccgagggtttagggttgagccgtcgagttgttcccgggttgaaatcaatgtggtttggtgattgtgatatttttcttgctcgttttttattatggacggttctcctgttaaaaagtagtagcccggtgtgtttagtaggaata

SEQ ID NO: 142653 - DNA, 3684 bp, Zea Mays
gaattcttatctatgtatttggatgtggctgattctggggtattgccctatgggtggactagatatgcacaattcagcctctctgtggttaatcaaattcacaacaaattcacaataagaaaagaaacacaacatcagttctctgctcgagaaagtgattggggtttcacttcatttatgccgttgggtgaactctacaaccacagtagaggttatcttgtaaatgatacttgtatagtggaagctgaagttgctgtatgtaaagttgttgactattggagttatgactctaaaaaggaaactggctatgttggtcttaaaaatcaaggtgctacctgctatatgaattctcttcttcagacgctgtaccacatcccatatttcagaaaggctgtttatcacatgcccaccactgagaatgatatgccctcaggaagcatccctttagctctacagtcactcttctataagttgcagtataatgacagcagtgtctctacaaaggagctcacaaaatcattcgggtgggacatgcatgattcatttatgcaacatgatgttcaagaattgaacagagttctttctgagaagttggaagataagatgaagggaactgttgtagagggcacaatacaacaattgtttgaagggcaccacatgaactacattgagtgcatcaatgtagatttcaaatcaacaagaaaggaatccttctatgatctccagcttgatgtcaaaggttgtcaggatgtctacgcttcatttgacaagtacgtagaagtggagcaattggaaggtgacaacaagtatcatgccgataagcatggtctgcaggatgcaaagaaaggagttctttttatcgacttccctcctgttctgcagcttcagctaaaacgttttgaatatgatttcatgcgtgacacgatggtgaagataaatgatcgctatgaattcccacttcaattggaccttgatagagatgatggaaaatatttatctcctgatgctgacaggaatgtgcgtaacctttatacccttcacagcgttcttgtccatagcggtggtgttcatggtggacattattatgctttcatacgacctaccctttctgatcaatggttcaagtttgatgatgagcgtgtgacaaaagaagatgcaaagagggcactggaagaacaatatggtggtgaggaggagctacctcagacaaatcctggcttgaacaacactcccttcaagtttactaaatattcaaatgcatacatgcttgtgtacattcgtgaaagcgacaaggacaaaattatttgtaatgtggatgagaaagatatagcagagcatcttcggattagattggaaaaggaccgtgaagagaaggaacgtcggaagaaggaaaaagctgaggcacacctctataccataatcaaggttgcaagggatgatgacttaaaaactcagatagggaaagacatatattttgatcttgttgaccatgataaagtcccaagcttccgtatccaaaagcagatggcctttgctcaattcaaggaggaggtagcaaaagagtttggtattcccacacagttccaacgattttggctgtgggccaagcgacaaaaccatacttaccgacctaacaggccattgtgtcctcaagacgaagcgcatactgttggacagctaaaggaattggtgaacaaggcccacaacgctgaattgaaattgttcttggaagttgaacttggactggaccttaaacctcttcctcttccagacaagactagagaagatatatttcttctcttcaaactctatgaacctgaaaaggaacagctacggtatgttggtaggctctttgtaaaggcttcaggaagaccacaggacattctgccgaagctaaagatgttggcaggtttttcacaagatgatgatattgaactttatgaggaaattaagttcgaacccaatgtgatgtgtgaatacattgataacaggcttctgttccgatcttgccagcttgaagatggggacataatctgttttcaaaaatcttcaaaggcagatagtgctgaccgatatcgatttcctgacgtaccatcctttttgacgtatatacgtaaccgacaggtggtccactttcgttcactggagaagcccaaggaggacgattttttcctcgagatgtcaaagattttcacatatgatcaagtcgtggaaaaagtagctgaaaaacttggcgtggatgacccatcgaaaattcggcttacatcacataattgttattcgcagcagcctaagcctcagccaataaagtacagaggcgttgaacgtctactggacatgctgattcattataaccagacttctgatattctgtactatgaagtattggacataccacttccagaattacaagcgctgaagacattaaaagttacataccatcatgccacaaaagatgaggtgtcagttcacagtataagattgccaaaaaacagcactgttggcgatgtgctaaacgatatcaaaacaaaggttgagttatctcatcccaatgctgaactgagattacttgaggtcttttatcacaagatatacaaggtgtttgcaccaaatgaaaagattgaaaacattaatgatcagtactggacactgcgtgcggaggaggttccagatgaggaaaaaaaccttggtccctttgatcgattgattcatgtatatcattttacaaaagatactcaaaaccaaacgcaagttcagaactttggagaacctttttttatggttattcgtgaggatgagaccctatcttctatcaaagagcgtatacagagaaagcttaaggttccagatgaggatttctcaaagtggaagtttgcatacatttcacttggtcgtccagactattttgaagattcagatactgtagctttaaaatttcagagaaacatgtatggagcttgggagcagtatcttggactggaacatccagacacagctcctaggaaggcacacacaattaatcagaaccggcattcatttgagagacctgtaaaaatttataactaggcatgatagaaatttgagcaatgagctgccaagcaagggctaaaattgctgtcctgaaataaagcgtgccggggcatgttgctcaggtttttcgtggagctggtgagctagttcatgagactccaagtatgatcggggcggcttctcatctttccctgcttttccccggatacatataaagttgtgcagagatgaccccaccgaacaattgtctttagtagataagccagtacttcccgttagatgactttatacagtcgaatagccggcattttagtcgatctttccgttctccagttgctgttggtgctaggaggccttgagctgttgagggtacttgccctgctgtatattatgacgtagagtgtacaagtctttgttgttgacaattacacggtgttttgtaatttcagtgatacacttccaggtccttcagtacgtacttgcctggatggtgtcaatttggcattctatgttagatattgatccatctgttctaaattaaaattataaggcagtttgacttttttaagatatactgcctccgattttctattagttgtcgtttagaatagtgacacggtctccatattataacgtgtctccatattataactt

SEQ ID NO: 142654 - DNA, 2874 bp, Zea Mays
gaattcttatctatgtatttggatgtggctgattctggggtattgccctatgggtggactagatatgcacaattcagcctctctgtggttaatcaaattcacaacaaattcacaataagaaaagaaacacaacatcagttctctgctcgagaaagtgattggggtttcacttcatttatgccgttgggtgaactctacaaccacagtagaggttatcttgtaaatgatacttgtatagtggaagctgaagttgctgtatgtaaagttgttgactattggagttatgactctaaaaaggaaactggctatgttggtcttaaaaatcaaggtgctacctgctatatgaattctcttcttcagacgctgtaccacatcccatatttcagaaaggctgtttatcacatgcccaccactgagaatgatatgccctcaggaagcatccctttagctctacagtcactcttctataagttgcagtataatgacagcagtgtctctacaaaggagctcacaaaatcattcgggtgggacatgcatgattcatttatgcaacatgatgttcaagaattgaacagagttctttctgagaagttggaagataagatgaagggaactgttgtagagggcacaatacaacaattgtttgaagggcaccacatgaactacattgagtgcatcaatgtagatttcaaatcaacaagaaaggaatccttctatgatctccagcttgatgtcaaaggttgtcaggatgtctacgcttcatttgacaagtacgtagaagtggagcaattggaaggtgacaacaagtatcatgccgataagcatggtctgcaggatgcaaagaaaggagttctttttatcgacttccctcctgttctgcagcttcagctaaaacgttttgaatatgatttcatgcgtgacacgatggtgaagataaatgatcgctatgaattcccacttcaattggaccttgatagagatgatggaaaatatttatctcctgatgctgacaggaatgtgcgtaacctttatacccttcacagcgttcttgtccatagcggtggtgttcatggtggacattattatgctttcatacgacctaccctttctgatcaatggttcaagtttgatgatgagcgtgtgacaaaagaagatgcaaagagggcactggaagaacaatatggtggtgaggaggagacaaatcctggcttgaacaacactcccttcaagtttactaaatattcaaatgcatacatgcttgtgtacattcgtgaaagcgacaaggacaaaattatttgtaatgtggatgagaaagatatagcagagcatcttcggattagattggaaaaggaccgtgaagagaaggaacgtcggaagaaggaaaaagctgaggcacacctctataccataatcaaggttgcaagggatgatgacttaaaaactcagatagggaaagacatatattttgatcttgttgaccatgataaagtcccaagcttccgtatccaaaagcagatggcctttgctcaattcaaggaggaggtagcaaaagagtttggtattcccacacagttccaacgattttggctgtgggccaagcgacaaaaccatacttaccgacctaacaggccattgtgtcctcaagacgaagcgcatactagggtgttcagctgcaagccaaaatttgccactcctctgttaggcaactttgatcatagtagtaaggaccttaaacctcttcctcttccagacaagactagagaagatatatttcttctcttcaaactctatgaacctgaaaaggaacagctacggtatgttggtaggctctttgtaaaggcttcaggaagaccacaggacattctgccgaagctaaagatgttggcaggtttttcacaagatgatgatattgaactttatgaggaaattaagttcgaacccaatgtgatgtgtgaatacattgataacaggcttctgttccgatcttgccagcttgaagatggggacataatctgttttcaaaaatcttcaaaggcagatagtgctgaccgatatcgatttcctgacgtaccatcctttttgacgtatatacgtaaccgacaggtggtccactttcgttcactggagaagcccaaggaggacgattttttcctcgagatgtcaaagattttcacatatgatcaagtcgtggaaaaagtagctgaaaaacttggcgtggatgacccatcgaaaattcggcttacatcacataattgttattcgcagcagcctaagcctcagccaataaagtacagaggcgttgaacgtctactggacatgctgattcattataaccagacttctgatattctgtactatgaagtattggacataccacttccagaattacaagcgctgaagacattaaaagttacataccatcatgccacaaaagatgaggtgtcagttcacagtataagattgccaaaaaacagcactgttggcgatgtgctaaacgatatcaaaacaaaggttgagttatctcatcccaatgctgaactgagattacttgaggtcttttatcacaagatatacaaggtgtttgcaccaaatgaaaagattgaaaacattaatgatcagtactggacactgcgtgcggaggaggttccagatgaggaaaaaaaccttggtccctttgatcgattgattcatgtatatcattttacaaaagatactcaaaaccaaacgcaagttcagaactttggagaacctttttttatggttattcgtgaggatgagaccctatcttctatcaaagagcgtatacagagaaagcttaaggttccagatgaggatttctcaaaggttcctgacttccaaatgttttgttcttaa

SEQ ID NO: 142655 - DNA, 114 bp, Zea Mays
ctgcaagctcttggtattcttcggcaactaaagagtttggatcttaaattaagcaagggagccttgtcaactatagaagaagaatttaacaaggaaagcaaattggggatatga

SEQ ID NO: 142656 - DNA, 6339 bp, Zea Mays
ctggcgcggacgcgcggtggcgccgtcgccgcctcaatgcagttcggaacgccgcttcctccggccgctcggcgcgcacccaccttccacgcagaccccgccgccgacgcgaggcagctcctcggcgcgctcctgccgccacgccctgcgctctaccacgttttgcaggcccacgcccgcctcgccgttctcggcctcgctaccgcgcgtgccctcccgcaactcctcgccgcccttccgcgcctgacgctcgccgccgccgacgtttcccactcctacccgctcctcctgttccgttgctccaactgtacctcggccttcgcgtcgaaccacctcctccgcgtgctcccgcacccgctcccgctccgcctcttcccgcgcctcccacgccgcaacccccactccttcactttcctcctcgcttccctctccaatcacctagacactgagcctgccgctgcaggctccatcgcctcccgcttcatgggcacccacgtgcacgcgctggccgtgaaggctggcgccgcgggcgacctgtacgtgcgtaacgcgcagatccacttttacggcgtctgcggagacgtggcggcgatgcggaaggtgttcgacgagctgccgatcgtgcgggacgtggtgacgtggaatgccgtcctcgctggctacgtgcgagcgggcatggtgggggttgcgcgggaggtgttcgacggaatgccagtgagggatgaggtttcttggagtacggtgataggaggctatgtgaaagaaggagagccggaggtcgcgctgggagtgtttaagaatatggtggcgcagggggtgaaggcaaatgaagcggcaatagtgacggcactgtcggccgctgcacagctgggtttgcttgagcaggggaaatttgtgcatgaagtggtcaagagagtaggaatgacgatgagtgtgaacttaggtgctgcactgattgatatgtattccaagtgtggaagtgtggcagcggccaaggaagtttttgatgccatgcctaggagggatgtttttgcttggaactccatgatctgcgggcttgccacccatggattggggcatgacgcagtccagctctttgagaagtttgtcagtgaggggttttgcccgacaagcatcacatttgtgggggtgctgaatgcctgcagccgtactggccttgttgatgaaggacggcggtatttcaagctgatggcagagaaatatgacattgagtcagagatggagcattacggatgcatggttgatcttctgagtcgtgctggtcttgttcaggaggctgttgaattgattgaagggatgcgcatcccacctgacccagttctctggggcacaatactgtcagcttgcaagagacatggccttgtggacttgggcattactgttggtaataagctaattgaactggatccagctcatgatggatactatgttctccttgcaagtatatatgcaaaagcaaagaaatgggacgaagtcaggaaagttaggaaattaatgtctaaccgtggcaccagcaagtcagctggttggagcttgatggaggcacatggaattgtgcacaagtttctagtaggggacatgaatcacaaagattctgcgcggatatataacatgctttgcacgattaacagaaggttggctgaggcgggctatgtaccagacgtgtcatcagtcttgcatgacatcggggatgaagagaaggttcatgcgattaaggtgcatagcgaacggcttgcaattgcttacgggttcattgttgttgaagctggcagcccaatccgtattgtcaagaaccttagtgtgtgtggtgattgtcatgagttcagtaagatggtgacaaaggtttttggcagggaaattgttgtgagggatgccaatgatccctacatcttgttgcctcctaagaaatttctggggcatcggtgcagcggtagagcctaccgtctgtaaccggaaggtctcgggttcgagccccagcctctgcatattacgtgggtaagacttgtcgcttaaagatacccttccccaaaccccgcacagtgcggaaagcctacaacactgggtgcgccctttttatcctcatgaagcaagaggtaccttcagctctctctttttctccaaaatttagacaaaattggtggcatcaacaggtggtatgtattggtcaaatgtttgtatgaaggtccactgctcaattgtcatcttatggttttgcctctctcacaatatgtattttcatttgtctccttcaaaggttatcagaaccccatttttattatctgtagggtaagcttgtcctgttatttgttagcaccagctgcagtgtaggaaatggaggaagtcagtacgtgaacaatgttagaatcacaagaaaaatatagatatgctcaaatacgtttattggaagaagatttactatactttcctgaaactgtcagtttaagcaactaagcaagcactaaaatgctgttcagaattctgcactggaagtcttcatttcttcaataagaattttaaacagctaacaaagactgagaagctgtgcttttgtaagtgagctgatgattcattaatatcccccttttttggttataatttcagtgtgctttatcttttctgggatactgaaggcaatggttaaaaagtgcatgatggagttggatcatttctatggatacatcaaagaacagattgaaagcagtgcaacctttacaaatactgaaggtcaagtgttttactatccacttgcataaattatactccttcctggtgacgaaggataagcaaaggaatatttgctaggacctgggaagccacaattatttgagataggaacagggggctattatgaggtatcaacatgaattttatgtaaatcaactctcagtcaaccaaattgcaagttttgtagttgaactgcctcctaggaggctaggacttgatcctccctgcctcttgttagttgtcccgttacctttccaaggtatctagaggttagagttgatctgagctgccatgttaacacctcaatcttctaattgatataactaactgtttgaaatccaccagtatcatgtagcaatagcatccttgcataaagctgtttcttggagttaactgtacaagttttgtaagaaactgaaccattaaaagattataaatcttttttctatcttccattatctacacagagttgaattcctctattagcaaaatgtactatttttcccgatgctcattttcaggtaggtttgagctgagtatctggtagtattcttgattcatttactagagcattgagattatcacatgtatcatgtctccagtatgcagaagttgaggaagaattctttgacatatacaagtgttcgtctgttcgactagctatgtttatttggaacagcacaactggctagattatcacttgtataaatgatcaattctgtgaaaggttaggctagttggtccggcagaatggaaacattagggcttgattgacatacttgagacttagcaatctgggtttcttggactagttttgtcaatgggctaagacgagatcgtacggttcacttttctatctttagcattccacttcactccacaaggggacacctaattcacattaggctggtctctttttgtttctagcctgaatgtcaggcgagaagtcaagcccgtgtttggtttcgaatggttccatcccatttttcatggaatcgtcagttttcatgcccctgcctgtcatcttcctgtgtgcatcttcttcctcctcactggaccaccgctcgccggtctcttactctctttgcagcagccccacctcgtctactgtcgctgaacgcaggagcctcgagctctcccagacgccatgtgctcgctcggtttctcccctgcctcaacgggccctgtgggatggcgggcagttctctaacccatcagagcatcagcaacacgattgggatttgggagcagcattgtcttcctcacgccgctatttctcgcttgcctcagttggcctcccccgcctatccaggcacagcgggtggactgagtgttcgctgatcagatgtggcatgcgggtccttactcagcggtgaggctggaaggtctgaacagattagatgtggatggcatggaagttcctcttcacaatccatctctgaggtaagactaaacgagcttgggcttttgtcatctcaccacgacaccacctgcaccgatgtttcttttggtctaattgattcaatcaatcctagccccgacgacaggcaagaggccaagattggagtccggggttccgccaataatgcccctgagctgagtaccaacaaacggagtttgttgtgaggtggaggcctctttgtggagaagcgaaattcaatctttgcttgcgctccacaggagtctggtggctccaatttagagcagaaagctggacaaacgttcaaagtcgaaacaaagctgtcttcgatggagtaaacccttccttgagctctgttaaaagtttgtttctgaatgagttaagttgctgggatagggctggggctaagcagttacctagcattgatcttcctgctgttttagtagggtctaggctgggttccaatctggtctagtgttttggcttgccctctgggcattgtactttggtcctcttggacctttttcctctcttaaaataatggcgtgcatttctcctgcccgttcaagagaaaaaagtcaatgtccattctgaattaaaatcatgctctggaattgggagtctagttatagcgaagtgctctcagatatctaagagaaatgaggacacctttgatggaaagtacagcttgcaagatgttcttaagcctggtttatggctctcaccggagacctccgctggttttgccgggcctatgggctgatgcctaaggattgttttgacattttgattggttttggactcagtgcagcagaagtgagaaagagaagatttctatggaatttgtataggtgggcctcactacagagcaaggagttccaaccagtgtttacaagtcgtccgactaatcgcgattagtcgggctggtcgcctggaagagggtgattaggtggatgacgcgattaggatttcaagtcgtcctagtcgtcgacttgggcgattagccatccggtcgaaagcttcctggttgttttttgtcgtcgcaattttggtactgtgcttcactctagtttttggcccatctacagtagtccgcccctccagcagtaaatcagccgccagaaaccctcccagccgccagtaaccctcccagccaccagtaaaccctactcctctcctctgtcatctctggtttctgccgacgtctctgctccaagtgctccagccgtccagcgtctgccaccggcgtccagtaccccagtgctccgacgtctgtcacctagtcaagaattgaagatgagctcatcatctgaaggtagcacctgctctcccttctctgattatctcccagtctcccttccctctattaccactggtagcactagcacctgaaggtgcacctgcagacctctgtttgagcagtcaccctgagttcagattacctctgtttgagcagtcaccctgcagtacctatattactttcagtttggactttggatggattcagttttacacttttactgaattactgctagtatgctactaattatgcctatattattgcagaaatgcagtgcttatatagttaatataagttatatacatatacatatgtccataaatctataggacgactaacggacgaccagaggtcgaccaggaccgattaatcgacctaatcgtcgccctaatcgcgattaggcgcctggtcgctgctctagctcgaccagctggtcgcccgacttgtaaacattggttccaacatctgccaacagggacggatttgaacctgggactacctcggctgcagccccggtcgcggtgccggcaacaaggcgagtatgcagcagccaacagagagtcacgtgtcggtgtaagcaggccaagacgccagacacgctgtcctgcagtgcacgctataggctgcactgcaagccatggcccacgagatacaaaagaaaaggcgtggcaagggctggaggaacggtgtagtctgtagtgtcatttcaagactgtgccttgccctttttcttttcaatcgacgtcatttatcttccctctagaatctagactttactctatatgattgcctttcaccaagagattaggttttatactttggttattttggattggtcaattatttgctaggttaattgataaaattatttttt

SEQ ID NO: 142657 - DNA, 1037 bp, Zea Mays
ctgggttccaatctggtctagtgttttggcttgccctctgggcattgtactttggtcctcttggacctttttcctctcttaaaataatggcgtgcatttctcctgcccgttcaagagaaaaaagtcaatgtccattctgaattaaaatcatgctctggaattgggagtctagttatagcgaagtgctctcagatatctaagagaaatgaggacacctttgatggaaagtacagcttgcaagatgttcttaagcctggtttatggctctcaccggagacctccgctggttttgccgggcctatgggctgatgcctaaggattgttttgacattttgattggttttggactcagtgcagcagaagtgagaaagagaagatttctatggaatttgtataggtgggcctcactacagagcaaggagttccaaccagtgtttacaagtcgtccgactaatcgcgattagtcgggctggtcgcctggaagagggtgattaggtggatgacgcgattaggatttcaagtcgtcctagtcgtcgacttgggcgattagccatccggtcgaaagcttcctggttgttttttgtcgtcgcaattttggtactgtgcttcactctagtttttggcccatctacagtagtccgcccctccagcagtaaatcagccgccagaaaccctcccagccgccagtaaccctcccagccaccagtaaaccctactcctctcctctgtcatctctggtttctgccgacgtctctgctccaagtgctccagccgtccagcgtctgccaccggcgtccagtaccccagtgctccgacgtctgtcacctagtcaagaattgaagatgagctcatcatctgaaggtagcacctgctctcccttctctgattatctcccagtctcccttccctctattaccactggtagcactagcacctgaaggtgcacctgcagacctctgtttgagcagtcaccctgagttcagattacctctgtttgagcagtcaccctgcagtacctatattactttcagtttgga

SEQ ID NO: 142658 - DNA, 2774 bp, Zea Mays
atgcagttcggaacgccgcttcctccggccgctcggcgcgcacccaccttccacgcagaccccgccgccgacgcgaggcagctcctcggcgcgctcctgccgccacgccctgcgctctaccacgttttgcaggcccacgcccgcctcgccgttctcggcctcgctaccgcgcgtgccctcccgcaactcctcgccgcccttccgcgcctgacgctcgccgccgccgacgtttcccactcctacccgctcctcctgttccgttgctccaactgtacctcggccttcgcgtcgaaccacctcctccgcgtgctcccgcacccgctcccgctccgcctcttcccgcgcctcccacgccgcaacccccactccttcactttcctcctcgcttccctctccaatcacctagacactgagcctgccgctgcaggctccatcgcctcccgcttcatgggcacccacgtgcacgcgctggccgtgaaggctggcgccgcgggcgacctgtacgtgcgtaacgcgcagatccacttttacggcgtctgcggagacgtggcggcgatgcggaaggtgttcgacgagctgccgatcgtgcgggacgtggtgacgtggaatgccgtcctcgctggctacgtgcgagcgggcatggtgggggttgcgcgggaggtgttcgacggaatgccagtgagggatgaggtttcttggagtacggtgataggaggctatgtgaaagaaggagagccggaggtcgcgctgggagtgtttaagaatatggtggcgcagggggtgaaggcaaatgaagcggcaatagtgacggcactgtcggccgctgcacagctgggtttgcttgagcaggggaaatttgtgcatgaagtggtcaagagagtaggaatgacgatgagtgtgaacttaggtgctgcactgattgatatgtattccaagtgtggaagtgtggcagcggccaaggaagtttttgatgccatgcctaggagggatgtttttgcttggaactccatgatctgcgggcttgccacccatggattggggcatgacgcagtccagctctttgagaagtttgtcagtgaggggttttgcccgacaagcatcacatttgtgggggtgctgaatgcctgcagccgtactggccttgttgatgaaggacggcggtatttcaagctgatggcagagaaatatgacattgagtcagagatggagcattacggatgcatggttgatcttctgagtcgtgctggtcttgttcaggaggctgttgaattgattgaagggatgcgcatcccacctgacccagttctctggggcacaatactgtcagcttgcaagagacatggccttgtggacttgggcattactgttggtaataagctaattgaactggatccagctcatgatggatactatgttctccttgcaagtatatatgcaaaagcaaagaaatgggacgaagtcaggaaagttaggaaattaatgtctaaccgtggcaccagcaagtcagctggttggagcttgatggaggcacatggaattgtgcacaagtttctagtaggggacatgaatcacaaagattctgcgcggatatataacatgctttgcacgattaacagaaggttggctgaggcgggctatgtaccagacgtgtcatcagtcttgcatgacatcggggatgaagagaaggttcatgcgattaaggtgcatagcgaacggcttgcaattgcttacgggttcattgttgttgaagctggcagcccaatccgtattgtcaagaaccttagtgtgtgtggtgattgtcatgagttcagtaagatggtgacaaaggtttttggcagggaaattgttgtgagggatggtagtaggtttcatcatatgaaagatggaaagtgttcttgccatgattattggtgattaatcattcgatatgtttcttctcaactatgatgtggagtttaggccatgatttcaatatatttgattggcaagctggtaattgacatgagttctgtttctgagagattccgatataccatttcagatgccatgtaaggcctctcctcacgagttcatagctccacttataagaggcagccaatgatccctacatcttgttgcctcctaagaaatttctggggcatcggtgcagcggtagagcctaccgtctgtaaccggaaggtctcgggttcgagccccagcctctgcatattacgtgggtaagacttgtcgcttaaagatacccttccccaaaccccgcacagtgcggaaagcctacaacactgggtgcgccctttttatcctcatgaagcaagagtgtgctttatcttttctgggatactgaaggcaatggttaaaaagtgcatgatggagttggatcatttctatggatacatcaaagaacagattgaaagcagtgcaacctttacaaatactgaaggtcaagtgttttactatccacttgcataaattatactccttcctggtgacgaaggataagcaaaggaatatttgctaggacctgggaagccacaattatttgagataggaacagggggctattatgaggtatcaacatgaattttatgtaaatcaactctcagtcaaccaaattgcaagttttgtagttgaactgcctcctaggaggctaggacttgatcctccctgcctcttgttagttgtcccgttacctttccaaggtatctagaggttagagttgatctgagctgccatgttaacacctcaatcttctaattgatataactaactgtttgaaa

SEQ ID NO: 142659 - DNA, 1941 bp, Zea Mays
ctggcgcggacgcgcggtggcgccgtcgccgcctcaatgcagttcggaacgccgcttcctccggccgctcggcgcgcacccaccttccacgcagaccccgccgccgacgcgaggcagctcctcggcgcgctcctgccgccacgccctgcgctctaccacgttttgcaggcccacgcccgcctcgccgttctcggcctcgctaccgcgcgtgccctcccgcaactcctcgccgcccttccgcgcctgacgctcgccgccgccgacgtttcccactcctacccgctcctcctgttccgttgctccaactgtacctcggccttcgcgtcgaaccacctcctccgcgtgctcccgcacccgctcccgctccgcctcttcccgcgcctcccacgccgcaacccccactccttcactttcctcctcgcttccctctccaatcacctagacactgagcctgccgctgcaggctccatcgcctcccgcttcatgggcacccacgtgcacgcgctggccgtgaaggctggcgccgcgggcgacctgtacgtgcgtaacgcgcagatccacttttacggcgtctgcggagacgtggcggcgatgcggaaggtgttcgacgagctgccgatcgtgcgggacgtggtgacgtggaatgccgtcctcgctggctacgtgcgagcgggcatggtgggggttgcgcgggaggtgttcgacggaatgccagtgagggatgaggtttcttggagtacggtgataggaggctatgtgaaagaaggagagccggaggtcgcgctgggagtgtttaagaatatggtggcgcagggggtgaaggcaaatgaagcggcaatagtgacggcactgtcggccgctgcacagctgggtttgcttgagcaggggaaatttgtgcatgaagtggtcaagagagtaggaatgacgatgagtgtgaacttaggtgctgcactgattgatatgtattccaagtgtggaagtgtggcagcggccaaggaagtttttgatgccatgcctaggagggatgtttttgcttggaactccatgatctgcgggcttgccacccatggattggggcatgacgcagtccagctctttgagaagtttgtcagtgaggggttttgcccgacaagcatcacatttgtgggggtgctgaatgcctgcagccgtactggccttgttgatgaaggacggcggtatttcaagctgatggcagagaaatatgacattgagtcagagatggagcattacggatgcatggttgatcttctgagtcgtgctggtcttgttcaggaggctgttgaattgattgaagggatgcgcatcccacctgacccagttctctggggcacaatactgtcagcttgcaagagacatggccttgtggacttgggcattactgttggtaataagctaattgaactggatccagctcatgatggatactatgttctccttgcaagtatatatgcaaaagcaaagaaatgggacgaagtcaggaaagttaggaaattaatgtctaaccgtggcaccagcaagtcagctggttggagcttgatggaggcacatggaattgtgcacaagtttctagtaggggacatgaatcacaaagattctgcgcggatatataacatgctttgcacgattaacagaaggttggctgaggcgggctatgtaccagacgtgtcatcagtcttgcatgacatcggggatgaagagaaggttcatgcgattaaggtgcatagcgaacggcttgcaattgcttacgggttcattgttgttgaagctggcagcccaatccgtattgtcaagaaccttagtgtgtgtggtgattgtcatgagttcagtaagatggtgacaaaggtttttggcagggaaattgttgtgagggatgccaatgatccctacatcttgttgcctcctaagaaatttctggggcat

SEQ ID NO: 142660 - DNA, 3173 bp, Zea Mays
gcccaccgcagcgaacaatcccttccactcccctcccctaaacccctcgccgcccgcggggctcgccggccggcgcccctccaggcccccactccctccgcgtgggcgcgatgccaacggcggtgccgacgcccaaggcggtggtccaccagcggttcggcgccaaggcgcggtacacggtcgaggaggtgcgggaggacgtgggcggctgcccgggcctcgcgccgcagaccaggaacgtctaccgctgcgcgctcgacctcccgggcctctccgttgccacgcccggtaccttcctcaggaagaaggacgctgagcaggccgccgcgcagatcgcgctcgacaagcttggtattcatcctacagcaaatagtcccaccacaccccaagaagcttgggctgaactgattgctcgcatatctggttttttcatagatgagaactttctgtcatctacccatcctcttattggccatttgtgtgtgtctctccggagaactggagacctcattgggaggttacctttgtcggctattgctgcatgtgatgtgaaggtcaatacattgtgtaaattgatcgaccatagggcagaatttgatcctctattggtcttgtcattattgtacaatgctgcaaaacaatctcctggagtctctgttagtgacagcaacttctggattcagagtgaaaagccttattctccggaggctgttgactcggcacttgagcgttggtctggtacaacagatcccgtagaagtagaggcagttcttgttccccacatgttggaggatgaactgaagacagtaagaattaatctacgagataatgaacattatatgagttatgttgcagcagagctctcagcaattgattcctctcatgttcttgtatcaagaacaattggaaaaacatcatccgagataagactgtattttgcagccgcaaatatacatgctgtttctgatatgtcaaaacacgcgcttgattctcttggagatggtgacatcaactggcaagtaaataagcgagcttcctacatttgtggccaaacaatttatggagatgcactcttggcaaatattggatacacaaggagagattcggaacttcacactgaagatgtcaatctatgttcctattacaggatacttctgggcaagttacctgatggaaattgtaagatgtctagggattcgattcttgcagcggagcttccatctgcatactctcgttttagttggaaaggcctctctccacgagatcttctttgctcattttgtcgccttcagaggttgccagagccccattttgctgtcagtagggtctcttgtgatacattaatgtcagctgtgagctctgaagaaagaggagcaccagcaggcagcgcagaaaatcagtacaccaatgatgtcaggatcaacaaggaaaaaccagatctttttaaatgtgaagtgaacatacgttcacggaagcaagaagttttactagagtattctgcagctgacacttggagcaaggaatctgatgctattcagaattcttcattaaaggtcttgatttggttcaataattattttaagaaactaacctcaaaaacaggcaagctatatctttctgagtctactgctggtgtcaaggtacattcaaatatttttcttcaagagtttgcaatgtgtctatctgtttatggcaagaatggatgcagtgattcagcaatgtgcagtgcagttggaccattttctatggatacacaaaagaagcaccttgaaagcactgcaaagttaacacacattgaaggtccagactctggtgttttcccgtcccacggatcattgacttgtataagttatactgcttcccttgtgacgaaggataaagcaaaaacatatttgttggagagccacaacgagtttgagtttgagattgggacgggtgctgttagtaatcagcttgaatcatgtgtaactcagctgtcagtgaatcaaactgcacgttttgtagctgaactgcctcctagggatttaatcatggctgcatcttgtgagttctcacatgacctctccaatgtatctagcgagagctgcttcctggagttctctgtaaaggttctgcaggtaactgaaccattagaagatagaatggagaaagccctgttcagtcctccattatctaaacaaagagttgaatttgctgtacggcacatcaacgagctgcatgctaccacacttgttgattttggctgtggatctggtagccttcttgattcgttgttagagcatccaaccacgctggaaaagcttgttggcgttgatatttctcgaaaaggcctcacacgtgcagcaaagagccttcatcagaagctgagcaaaaaatcaacgacgcagacaaatgttccaactgctgtgctgtatgacggatcaataacggactacgattctcgcttatatgggtttgatattggcacttgtcttgaggtgatcgagcacgtcgaggaggaccaggcgactttatttggcaacgtcgtcttgagctcattccgcccgaccgtgctcattgtttccacacccaactacgaatacaaccctatcctccaggggtctgctatgcccaacaaggacgacgaggcagacgaaagcgctggtccctgcaagttccgcaatcacgaccacaagttcgagtggaccaggctacagttccagtgctgggctactggcctcgcggtgaagcatagctacagcgtggaattctccggcgtcggtggctcaggcgaggagccaggctacgcttcccagatcgctgttttcagaagactggtgcagggccaggaagcgatgtgcctggacgaggatggcgatcagccttacgaggttctctgggagtggcctaacgcgtgtgtgaactaggtagattgcacgtctaatctctctagggcttggaactttgaatcgtgcccccggtttggaactgagtaatatatgtgtcaggaaagtgggcatccgacttgtggcaagaacacaaaaaattaacattgctgcatgcaagtgcagaaattcagtctgcttctaggttctggatgtacggtagttactacactgtatatgatacactgtatatacgaataggtctggacgaaatgctcgtgcctcgttggctcgctcggtttatttgaa

SEQ ID NO: 142661 - DNA, 174 bp, Zea Mays
ttttttttttctcgttgcccgcttgtacagcttttacaacttttctatcactcacgccacacagatgttacaacatatgcaaaccgtgccgcggttatgaacctctgtcagatgcctgttccaccttcatcactctgttgctggcatctttagaagcgccgcaacaacttcgcc

SEQ ID NO: 142662 - DNA, 1694 bp, Zea Mays
gttatatgacctacctgtacttgtggtcctccccgaaccattgtcaagcatccgagtgctgccactgctcatctccatgtgcctcttgcctccttccctcgcctgttttccatatatgcgctgctgccgcacgcaaccatcctccctacctcttcccctccccttgctcactgctggtgctgcccccttctagatcccctgtactagaacttctggcctgctgctgcccctcccagatctccaatgacacagaagttggctggtgaagaaagttgcaatgatcacatgagctccagataatggggatgggagcagagacgggcgcacttggccttgtctgctcctccagttcttcctctctttcctcccttccctcctctcattttgccgatttttggttgtggctacagtgatgcttaagtttttttagtgcctggacgcctagacgacaagacaactaagtgtcaccttataaaaacatgatcaagggtacaccctcatgtaagtactgctaaaacttttttggggatgatctagatctcgttatgacagtataatgcaagatgcatgtttcttttgttgtacttggcagtaggtacaaagtactggcaacaatataagcgattaagttcactgaagtattcaattggaatactggaagcaacattttcagtgcaacctttgattgatattactccttgttttctagtcggttgttctgtagactttcagtttttttattgtttgaattgtattaacgttttctggtgtgcaattacatgctgaagccacattatgctaactcatagtttgtgtaactttccttcttcaatattaggtcactccaactggatactcttggatgacatccctgctagctggttcctcaaatggaagattgttggtgatacttgagggaggatacaatctccggtcgatatcctcatcagctactgaagttgttaaggtcctacttggggagggtcccaatcgtgcttcatttgtagtttcaccatcaaaagaggccttgagtactgtttctcaagtcctgaagattcaacaacagttttggccagttttaggtccaacatacgcatcactacaggcgcagcaggggtcggtttcttccaatcatagtaatgagctgaagaaaaggaagcgtccaggaggaggaccagggcccttctggtggaagatgggaagcaaaaggcttctatacgaagcgcttattgagcctcgcagccgtccgaggaaactcaaggggtcaactggttcagcagcgccttagacttagatgggcagtttgctggccgttgatcttctagacatgaacagggtagctcgctgaccgcgtttcctcaagcagagtaggctgcgtttacctagaaaacctagttttggctggttacttgcatgatggtcgaccgtttcagatggagtttgacagcaaacccgttgtgttaaccatgcgtggcgtatcagccgatgtttcatgcatgctactgtctttttctttggttggtttcgtaccatagatagacgtgtgtagcgaccatcgatggaaaaaaaccttgcacatctggaacggcatgcatctcagttattagcccctgctgttgcacatgcattttttttttgcggattttctgtgcgacttgactgcgacgtctgatgtgcatttgttacacatcaga

SEQ ID NO: 142663 - DNA, 2265 bp, Zea Mays
ttccgctttctcccttactcgcgctcagcacgcaggcgacggcgtcggcgctcaggtcgggctctgggcgacggcgtcatcggcttctcctcccgcctctctccagtcgcctcgcgccctcgcctccggtcctccgcacaccggccggtgaccctgctcacactgatgtggaggcctcaaaagagaaccgtggagcatgcagtttgaacaatgatcgtgctgatgctctagaagaagaggccaatgtttccacagctaggataggtcatgttgagagtgctgaccctggtggctctgtgggtgtagaaaaggaaattttcatggctgttaatgaggagtctgagggggagcaagctggggcaacactggaggatctgtttttctttaatggtgaagaggatgatgacagtgattgggaacctgctagtcgccttgttgtgaatagatggttttgcttgaactgcacaatgccaaatgtggacaagattacatattgcatgaattgccgtgagcttccaggatctgttgtagatggatatgatgtcttcaaaaagcaaattgcacaaacagctttgttatctgctgacacagggttgctgccagtgtctacggcgattggttttgatgaaagaatgctgctccacagtgagcagctagaagttaaaccaaatccacatccagaaagaccggatcgccttcgcgccattgctgcaagtcttgctgctgcagggatctttccctcaaaatgtgctttggtacctcctcgagaaatcacgaaggaggaacttcttatggttcatagtccagaccacattgaaagtgtcgagcagacaaagaacatgctttacagttacttcacttcggatacttacgcaaatggacattcagcatgtgctgccaaacttgcagctggattatgtgctgatcttgctagtttgatagtatctgggcgtgttcgcaatggctttgcgctggtaagacctcctgggcatcatgcaggggtgaagcaagcaatggggttttgtcttcacaacaatgcagcagtagctgcgttagctgcaaaaagagcaggtgccaagaaagtcctcatagttgactgggatgtgcaccatggaaatggcacacaagagatattcgacggggacaaaacagtcttgtacatatcattacatcgtcatgaggatggaaacttttaccctggaactggagctgctcatgaggtgggagttcttgatggtcaaggattctcagttaatataccttggagccgtggtggtgttggagatgatgactacatctttgcttttcagactgtggtgcttccaatagcttcagagtttgccgcagacatcactataatatctgcaggattcgatgcagctagaggtgaccctctgggttgttgtgacgtcactccaactggatactcttggatgacatccctgctagctggttcctcaaatggaagattgttggtgatacttgagggaggatacaatctccggtcgatatcctcatcagctactgaagttgttaaggtcctacttggggagggtcccaatcgtgcttcatttgtagtttcaccatcaaaagaggccttgagtactgtttctcaagtcctgaagattcaacaacagttttggccagttttaggtccaacatacgcatcactacaggcgcagcaggggtcggtttcttccaatcatagtaatgagctgaagaaaaggaagcgtccaggaggaggaccagggcccttctggtggaagatgggaagcaaaaggcttctatacgaagcgcttattgagcctcgcagccgtccgaggaaactcaaggggtcaactggttcagcagcgccttagacttagatgggcagtttgctggccgttgatcttctagacatgaacagggtagctcgctgaccgcgtttcctcaagcagagtaggctgcgtttacctagaaaacctagttttggctggttacttgcatgatggtcgaccgtttcagatggagtttgacagcaaacccgttgtgttaaccatgcgtggcgtatcagccgatgtttcatgcatgctactgtctttttctttggttggtttcgtaccatagatagacgtgtgtagcgaccatcgatggaaaaaaaccttgcacatctggaacggcatgcatctcagttattagcccctgctgttgcacatgcattttttttttgcggattttctgtgcgacttgactgcgacgtctgatgtgcatttgttacacatcaga

SEQ ID NO: 142664 - DNA, 2263 bp, Zea Mays
cttccgctttctcccttactcgcgctcagcacgcaggcgacggcgtcggcgctcaggtcgggctctgggcgacggcgtcatcggcttctcctcccgcctctctccagtcgcctcgcgccctcgcctccggtcctccgcacaccggccggtgaccctgctcacactgatgtggaggcctcaaaagagaaccgtggagcatgcagtttgaacaatgatcgtgctgatgctctagaagaagaggccaatgtttccacagctaggataggtcatgttgagagtgctgaccctggtggctctgtgggtgtagaaaaggaaattttcatggctgttaatgaggagtctgagggggagcaagctggggcaacactggaggatctgtttttctttaatggtgaagaggatgatgacagtgattgggaacctgctagtcgccttgttgtgaatagatggttttgcttgaactgcacaatgccaaatgtggacaagattacatattgcatgaattgccgtgagcttccaggatctgttgtagatggatatgatgtcttcaaaaagcaaattgcacaaacagctttgttatctgctgacacagggttgctgccagtgtctacggcgattggttttgatgaaagaatgctgctccacagtgagctagaagttaaaccaaatccacatccagaaagaccggatcgccttcgcgccattgctgcaagtcttgctgctgcagggatctttccctcaaaatgtgctttggtacctcctcgagaaatcacgaaggaggaacttcttatggttcatagtccagaccacattgaaagtgtcgagcagacaaagaacatgctttacagttacttcacttcggatacttacgcaaatggacattcagcatgtgctgccaaacttgcagctggattatgtgctgatcttgctagtttgatagtatctgggcgtgttcgcaatggctttgcgctggtaagacctcctgggcatcatgcaggggtgaagcaagcaatggggttttgtcttcacaacaatgcagcagtagctgcgttagctgcaaaaagagcaggtgccaagaaagtcctcatagttgactgggatgtgcaccatggaaatggcacacaagagatattcgacggggacaaaacagtcttgtacatatcattacatcgtcatgaggatggaaacttttaccctggaactggagctgctcatgaggtgggagttcttgatggtcaaggattctcagttaatataccttggagccgtggtggtgttggagatgatgactacatctttgcttttcagactgtggtgcttccaatagcttcagagtttgccgcagacatcactataatatctgcaggattcgatgcagctagaggtgaccctctgggttgttgtgacgtcactccaactggatactcttggatgacatccctgctagctggttcctcaaatggaagattgttggtgatacttgagggaggatacaatctccggtcgatatcctcatcagctactgaagttgttaaggtcctacttggggagggtcccaatcgtgcttcatttgtagtttcaccatcaaaagaggccttgagtactgtttctcaagtcctgaagattcaacaacagttttggccagttttaggtccaacatacgcatcactacaggcgcagcaggggtcggtttcttccaatcatagtaatgagctgaagaaaaggaagcgtccaggaggaggaccagggcccttctggtggaagatgggaagcaaaaggcttctatacgaagcgcttattgagcctcgcagccgtccgaggaaactcaaggggtcaactggttcagcagcgccttagacttagatgggcagtttgctggccgttgatcttctagacatgaacagggtagctcgctgaccgcgtttcctcaagcagagtaggctgcgtttacctagaaaacctagttttggctggttacttgcatgatggtcgaccgtttcagatggagtttgacagcaaacccgttgtgttaaccatgcgtggcgtatcagccgatgtttcatgcatgctactgtctttttctttggttggtttcgtaccatagatagacgtgtgtagcgaccatcgatggaaaaaaaccttgcacatctggaacggcatgcatctcagttattagcccctgctgttgcacatgcattttttttttgcggattttctgtgcgacttgactgcgacgtctgatgtgcatttgttacacatcaga

SEQ ID NO: 142665 - DNA, 2114 bp, Zea Mays
cttccgctttctcccttactcgcgctcagcacgcaggcgacggcgtcggcgctcaggtcgggctctgggcgacggcgtcatcggcttctcctcccgcctctctccagtcgcctcgcgccctcgcctccggtcctccgcacaccggccggtgaccctgcaaaaggaaattttcatggctgttaatgaggagtctgagggggagcaagctggggcaacactggaggatctgtttttctttaatggtgaagaggatgatgacagtgattgggaacctgctagtcgccttgttgtgaatagatggttttgcttgaactgcacaatgccaaatgtggacaagattacatattgcatgaattgccgtgagcttccaggatctgttgtagatggatatgatgtcttcaaaaagcaaattgcacaaacagctttgttatctgctgacacagggttgctgccagtgtctacggcgattggttttgatgaaagaatgctgctccacagtgagctagaagttaaaccaaatccacatccagaaagaccggatcgccttcgcgccattgctgcaagtcttgctgctgcagggatctttccctcaaaatgtgctttggtacctcctcgagaaatcacgaaggaggaacttcttatggttcatagtccagaccacattgaaagtgtcgagcagacaaagaacatgctttacagttacttcacttcggatacttacgcaaatggacattcagcatgtgctgccaaacttgcagctggattatgtgctgatcttgctagtttgatagtatctgggcgtgttcgcaatggctttgcgctggtaagacctcctgggcatcatgcaggggtgaagcaagcaatggggttttgtcttcacaacaatgcagcagtagctgcgttagctgcaaaaagagcaggtgccaagaaagtcctcatagttgactgggatgtgcaccatggaaatggcacacaagagatattcgacggggacaaaacagtcttgtacatatcattacatcgtcatgaggatggaaacttttaccctggaactggagctgctcatgaggtgggagttcttgatggtcaaggattctcagttaatataccttggagccgtggtggtgttggagatgatgactacatctttgcttttcagactgtggtgcttccaatagcttcagagtttgccgcagacatcactataatatctgcaggattcgatgcagctagaggtgaccctctgggttgttgtgacgtcactccaactggatactcttggatgacatccctgctagctggttcctcaaatggaagattgttggtgatacttgagggaggatacaatctccggtcgatatcctcatcagctactgaagttgttaaggtcctacttggggagggtcccaatcgtgcttcatttgtagtttcaccatcaaaagaggccttgagtactgtttctcaagtcctgaagattcaacaacagttttggccagttttaggtccaacatacgcatcactacaggcgcagcaggggtcggtttcttccaatcatagtaatgagctgaagaaaaggaagcgtccaggaggaggaccagggcccttctggtggaagatgggaagcaaaaggcttctatacgaagcgcttattgagcctcgcagccgtccgaggaaactcaaggggtcaactggttcagcagcgccttagacttagatgggcagtttgctggccgttgatcttctagacatgaacagggtagctcgctgaccgcgtttcctcaagcagagtaggctgcgtttacctagaaaacctagttttggctggttacttgcatgatggtcgaccgtttcagatggagtttgacagcaaacccgttgtgttaaccatgcgtggcgtatcagccgatgtttcatgcatgctactgtctttttctttggttggtttcgtaccatagatagacgtgtgtagcgaccatcgatggaaaaaaaccttgcacatctggaacggcatgcatctcagttattagcccctgctgttgcacatgcattttttttttgcggattttctgtgcgacttgactgcgacgtctgatgtgcatttgttacacatcaga

SEQ ID NO: 142666 - DNA, 1920 bp, Zea Mays
cttccgctttctcccttactcgcgctcagcacgcaggcgacggcgtcggcgctcaggtcgggctctgggcgacggcgtcatcggcttctcctcccgcctctctccagtcgcctcgcgccctcgcctccggtcctccgcacaccggccggtgaccctgcaattgccgtgagcttccaggatctgttgtagatggatatgatgtcttcaaaaagcaaattgcacaaacagctttgttatctgctgacacagggttgctgccagtgtctacggcgattggttttgatgaaagaatgctgctccacagtgagctagaagttaaaccaaatccacatccagaaagaccggatcgccttcgcgccattgctgcaagtcttgctgctgcagggatctttccctcaaaatgtgctttggtacctcctcgagaaatcacgaaggaggaacttcttatggttcatagtccagaccacattgaaagtgtcgagcagacaaagaacatgctttacagttacttcacttcggatacttacgcaaatggacattcagcatgtgctgccaaacttgcagctggattatgtgctgatcttgctagtttgatagtatctgggcgtgttcgcaatggctttgcgctggtaagacctcctgggcatcatgcaggggtgaagcaagcaatggggttttgtcttcacaacaatgcagcagtagctgcgttagctgcaaaaagagcaggtgccaagaaagtcctcatagttgactgggatgtgcaccatggaaatggcacacaagagatattcgacggggacaaaacagtcttgtacatatcattacatcgtcatgaggatggaaacttttaccctggaactggagctgctcatgaggtgggagttcttgatggtcaaggattctcagttaatataccttggagccgtggtggtgttggagatgatgactacatctttgcttttcagactgtggtgcttccaatagcttcagagtttgccgcagacatcactataatatctgcaggattcgatgcagctagaggtgaccctctgggttgttgtgacgtcactccaactggatactcttggatgacatccctgctagctggttcctcaaatggaagattgttggtgatacttgagggaggatacaatctccggtcgatatcctcatcagctactgaagttgttaaggtcctacttggggagggtcccaatcgtgcttcatttgtagtttcaccatcaaaagaggccttgagtactgtttctcaagtcctgaagattcaacaacagttttggccagttttaggtccaacatacgcatcactacaggcgcagcaggggtcggtttcttccaatcatagtaatgagctgaagaaaaggaagcgtccaggaggaggaccagggcccttctggtggaagatgggaagcaaaaggcttctatacgaagcgcttattgagcctcgcagccgtccgaggaaactcaaggggtcaactggttcagcagcgccttagacttagatgggcagtttgctggccgttgatcttctagacatgaacagggtagctcgctgaccgcgtttcctcaagcagagtaggctgcgtttacctagaaaacctagttttggctggttacttgcatgatggtcgaccgtttcagatggagtttgacagcaaacccgttgtgttaaccatgcgtggcgtatcagccgatgtttcatgcatgctactgtctttttctttggttggtttcgtaccatagatagacgtgtgtagcgaccatcgatggaaaaaaaccttgcacatctggaacggcatgcatctcagttattagcccctgctgttgcacatgcattttttttttgcggattttctgtgcgacttgactgcgacgtctgatgtgcatttgttacacatcaga

SEQ ID NO: 142667 - DNA, 2690 bp, Zea Mays
ggacagagccgcccggtcgccctttcttcatctcccatcttaatttcctcgcagcgccggcgctcatcttccgctttctcccttactcgcgctcagcacgcaggcgacggcgtcggcgctcaggtcgggctctgggcgacggcgtcatcggcttctcctcccgcctctctccagtcgcctcgcgccctcgcctccggtcctccgcacaccggccggtgaccctgcgtgcgtgcctctctctctctctcccccttcccgcctccggtggatcgtcaacgccgcccggcccgggtggcagcaccgcgcgcgacctgaggggtgagggcagcgggagccagcagccgctgctccaccaaggcggtcgcgccgcttttggagcgcttatgccccccggtccgctgagcgcttagtgcagtttttttggaacatgagacctcctagcagtggcaaaaagactgaggtctcccatagcgtggggaaatgtggggtttctgatcaagcttgtcatggcaaatgccaaagctgtggcattgatgcaaaacctttttgtgctggagtgaacgaagtctccttgttgactggcagtcacactgatgtggaggcctcaaaagagaaccgtggagcatgcagtttgaacaatgatcgtgctgatgctctagaagaagaggccaatgtttccacagctaggataggtcatgttgagagtgctgaccctggtggctctgtgggtgtagaaaaggaaattttcatggctgttaatgaggagtctgagggggagcaagctggggcaacactggaggatctgtttttctttaatggtgaagaggatgatgacagtgattgggaacctgctagtcgccttgttgtgaatagatggttttgcttgaactgcacaatgccaaatgtggacaagattacatattgcatgaattgccgtgagcttccaggatctgttgtagatggatatgatgtcttcaaaaagcaaattgcacaaacagctttgttatctgctgacacagggttgctgccagtgtctacggcgattggttttgatgaaagaatgctgctccacagtgagctagaagttaaaccaaatccacatccagaaagaccggatcgccttcgcgccattgctgcaagtcttgctgctgcagggatctttccctcaaaatgtgctttggtacctcctcgagaaatcacgaaggaggaacttcttatggttcatagtccagaccacattgaaagtgtcgagcagacaaagaacatgctttacagttacttcacttcggatacttacgcaaatggacattcagcatgtgctgccaaacttgcagctggattatgtgctgatcttgctagtttgatagtatctgggcgtgttcgcaatggctttgcgctggtaagacctcctgggcatcatgcaggggtgaagcaagcaatggggttttgtcttcacaacaatgcagcagtagctgcgttagctgcaaaaagagcaggtgccaagaaagtcctcatagttgactgggatgtgcaccatggaaatggcacacaagagatattcgacggggacaaaacagtcttgtacatatcattacatcgtcatgaggatggaaacttttaccctggaactggagctgctcatgaggtgggagttcttgatggtcaaggattctcagttaatataccttggagccgtggtggtgttggagatgatgactacatctttgcttttcagactgtggtgcttccaatagcttcagagtttgccgcagacatcactataatatctgcaggattcgatgcagctagaggtgaccctctgggttgttgtgacgtcactccaactggatactcttggatgacatccctgctagctggttcctcaaatggaagattgttggtgatacttgagggaggatacaatctccggtcgatatcctcatcagctactgaagttgttaaggtcctacttggggagggtcccaatcgtgcttcatttgtagtttcaccatcaaaagaggccttgagtactgtttctcaagtcctgaagattcaacaacagttttggccagttttaggtccaacatacgcatcactacaggcgcagcaggggtcggtttcttccaatcatagtaatgagctgaagaaaaggaagcgtccaggaggaggaccagggcccttctggtggaagatgggaagcaaaaggcttctatacgaagcgcttattgagcctcgcagccgtccgaggaaactcaaggggtcaactggttcagcagcgccttagacttagatgggcagtttgctggccgttgatcttctagacatgaacagggtagctcgctgaccgcgtttcctcaagcagagtaggctgcgtttacctagaaaacctagttttggctggttacttgcatgatggtcgaccgtttcagatggagtttgacagcaaacccgttgtgttaaccatgcgtggcgtatcagccgatgtttcatgcatgctactgtctttttctttggttggtttcgtaccatagatagacgtgtgtagcgaccatcgatggaaaaaaaccttgcacatctggaacggcatgcatctcagttattagcccctgctgttgcacatgcattttttttttgcggattttctgtgcgacttgactgcgacgtctgatgtgcatttgttacacatcaga

SEQ ID NO: 142668 - DNA, 2713 bp, Zea Mays
ggacagagccgcccggtcgccctttcttcatctcccatcttaatttcctcgcagcgccggcgctcatcttccgctttctcccttactcgcgctcagcacgcaggcgacggcgtcggcgctcaggtcgggctctgggcgacggcgtcatcggcttctcctcccgcctctctccagtcgcctcgcgccctcgcctccggtcctccgcacaccggccggtgaccctgcgtgcgtgcctctctctctctctcccccttcccgcctccggtggatcgtcaacgccgcccggcccgggtggcagcaccgcgcgcgacctgaggggtgagggcagcgggagccagcagccgctgctccaccaaggcggtcgcgccgcttttggagcgcttatgccccccggtccgctgagcgcttagtgcagtttttttggaacatgagacctcctagcagtggcaaaaagactgaggtctcccatagcgtggggaaatgtggggtttctgatcaagcttgtcatggcaaatgccaaagctgtggcattgatgcaaaacctttttgtgctggagtgaacgaagtctccttgttgactggcagtcacactgatgtggaggcctcaaaagagaaccgtggagcatgcagtttgaacaatgatcgtgctgatgctctagaagaagaggccaatgtttccacagctaggataggtcatgttgagagtgctgaccctggtggctctgtgggtgtagaaaaggaaattttcatggctgttaatgaggagtctgagggggagcaagctggggcaacactggaggatctgtttttctttaatggtgaagaggatgatgacagtgattgggaacctgctagtcgccttgttgtgaatagatggttttgcttgaactgcacaatgccaaatgtggacaagattacatattgcatgaattgccgtgagcttccaggatctgttgtagatggatatgatgtcttcaaaaagcaaattgcacaaacagctttgttatctgctgacacagggttgctgccagtgtctacggcgattggttttgatgaaagaatgctgctccacagtgagctagaagttaaaccaaatccacatccagaaagaccggatcgccttcgcgccattgctgcaagtcttgctgctgcagggatctttccctcaaaatgtgctttggtacctcctcgagaaatcacgaaggaggaacttcttatggttcatagtccagaccacattgaaagtgtcgagcagacaaagaacatgctttacagttacttcacttcggatacttacgcaaatggacattcagcatgtgctgccaaacttgcagctggattatgtgctgatcttgctagtttgatagtatctgggcgtgttcgcaatggctttgcgctggtaagacctcctgggcatcatgcaggggtgaagcaagcaatggggttttgtcttcacaacaatgcagcagtagctgcgttagctgcaaaaagagcaggtgccaagaaagtcctcatagttgactggtaggttctcaattgttgttgcaggatgtgcaccatggaaatggcacacaagagatattcgacggggacaaaacagtcttgtacatatcattacatcgtcatgaggatggaaacttttaccctggaactggagctgctcatgaggtgggagttcttgatggtcaaggattctcagttaatataccttggagccgtggtggtgttggagatgatgactacatctttgcttttcagactgtggtgcttccaatagcttcagagtttgccgcagacatcactataatatctgcaggattcgatgcagctagaggtgaccctctgggttgttgtgacgtcactccaactggatactcttggatgacatccctgctagctggttcctcaaatggaagattgttggtgatacttgagggaggatacaatctccggtcgatatcctcatcagctactgaagttgttaaggtcctacttggggagggtcccaatcgtgcttcatttgtagtttcaccatcaaaagaggccttgagtactgtttctcaagtcctgaagattcaacaacagttttggccagttttaggtccaacatacgcatcactacaggcgcagcaggggtcggtttcttccaatcatagtaatgagctgaagaaaaggaagcgtccaggaggaggaccagggcccttctggtggaagatgggaagcaaaaggcttctatacgaagcgcttattgagcctcgcagccgtccgaggaaactcaaggggtcaactggttcagcagcgccttagacttagatgggcagtttgctggccgttgatcttctagacatgaacagggtagctcgctgaccgcgtttcctcaagcagagtaggctgcgtttacctagaaaacctagttttggctggttacttgcatgatggtcgaccgtttcagatggagtttgacagcaaacccgttgtgttaaccatgcgtggcgtatcagccgatgtttcatgcatgctactgtctttttctttggttggtttcgtaccatagatagacgtgtgtagcgaccatcgatggaaaaaaaccttgcacatctggaacggcatgcatctcagttattagcccctgctgttgcacatgcattttttttttgcggattttctgtgcgacttgactgcgacgtctgatgtgcatttgttacacatcaga

SEQ ID NO: 142669 - DNA, 1949 bp, Zea Mays
ggacagagccgcccggtcgccctttcttcatctcccatcttaatttcctcgcagcgccggcgctcatcttccgctttctcccttactcgcgctcagcacgcaggcgacggcgtcggcgctcaggtcgggctctgggcgacggcgtcatcggcttctcctcccgcctctctccagtcgcctcgcgccctcgcctccggtcctccgcacaccggccggtgaccctgcgtgcgtgcctctctctctctctcccccttcccgcctccggtggatcgtcaacgccgcccggcccgggtggcagcaccgcgcgcgacctgaggggtgagggcagcgggagccagcagccgctgctccaccaaggcggtcgcgccgcttttggagcgcttatgccccccggtccgctgagcgcttagtgcagtttttttggaacatgagacctcctagcagtggcaaaaagactgaggtctcccatagcgtggggaaatgtggggtttctgatcaagcttgtcatggcaaatgccaaagctgtggcattgatgcaaaacctttttgtgctggagtgaacgaagtctccttgttgactggcagtcacactgatgtggaggcctcaaaagagaaccgtggagcatgcagtttgaacaatgatcgtgctgatgctctagaagaagaggccaatgtttccacagctaggataggtcatgttgagagtgctgaccctggtggctctgtgggtgtagaaaaggaaattttcatggctgttaatgaggagtctgagggggagcaagctggggcaacactggaggatctgtttttctttaatggtgaagaggatgatgacagtgattgggaacctgctagtcgccttgttgtgaatagatggttttgcttgaactgcacaatgccaaatgtggacaagattacatattgcatgaattgccgtgagcttccaggatctgttgtagatggatatgatgtcttcaaaaagcaaattgcacaaacagctttgttatctgctgacacagggttgctgccagtgtctacggcgattggttttgatgaaagaatgctgctccacagtgagctagaagttaaaccaaatccacatccagaaagaccggatcgccttcgcgccattgctgcaagtcttgctgctgcagggatctttccctcaaaatgtgctttggtacctcctcgagaaatcacgaaggaggaacttcttatggttcatagtccagaccacattgaaagtgtcgagcagacaaagaacatgctttacagttacttcacttcggatacttacgcaaatggacattcagcatgtgctgccaaacttgcagctggattatgtgctgatcttgctagtttgatagtatctgggcgtgttcgcaatggctttgcgctggtaagacctcctgggcatcatgcaggggtgaagcaagcaatggggttttgtcttcacaacaatgcagcagtagctgcgttagctgcaaaaagagcaggtgccaagaaagtcctcatagttgactgggatgtgcaccatggaaatggcacacaagagatattcgacggggacaaaacagtcttgtacatatcattacatcgtcatgaggatggaaacttttaccctggaactggagctgctcatgaggtgggagttcttgatggtcaaggattctcagttaatataccttggagccgtggtggtgttggagatgatgactacatctttgcttttcagactgtggtgcttccaatagcttcagagtttgccgcagacatcactataatatctgcaggattcgatgcagctagaggtgaccctctgggttgttgtgacgtaagattcctcttaattctgatcgctaaactctaaaatgcagccactgctctcatgtcctgtgtatgcattacatttttactttgtttctattgggaaatgattgataagactc

SEQ ID NO: 142670 - DNA, 1310 bp, Zea Mays
gagatgcccgggcgacaccgcggatcgctcgccagtcgccacgcggctccaccgtcgccaaacgtccccgaccgacggacgcggcgacgcacgttctcacacaccttccgccgcgggccttcttctcctttccgctcgcctcttctccacctgtctgtccgctctactgtatagaggaaggccgaaggccgtttccatttctcgaagccgcggcagcacgcgtcctgcttgcctcccggtcccggatcttgcccaccccgcaacgcgccgccacctccgccaagcaagggcagcttgatcatattcaagatggggaaggacaaagaagctgccaatctgaaggagggggagacagagatcaaggccaagtttgttgagaaggaagaggccaaagactcgggtggtggcgcagggtctgtgggaggaaagagtaaagaggggaagaaagacagagagagaaaggaggaggagaagtcggtggagcatgaatatggcgaaggcgatgagaaggcgatcaagaagaaggataaaaaggagaaagacaagaaaaagaaggaagatgatggagattcagggaaggcagagaaagataagaaggataagaaggctaaagagaaggacggatcagagttgaagggttcaagtggtgagaaacaagagaaaatcaaagataagaaagagacaggagatggcaaagatgtgggggaggaagataaacgcaagaagataggaaacaaggacaaagataagaaggataaaaaggccaaagaaaaggatggatcggaaccaaagggtgacaaggatgaagatggtaagaagaaagaggccgatggcgatgaagacgaagaaggtaagaaggaggacaaggaaaagaaagagaagaagaggaaacacaagggtgcaaaggagaagacgattgatccggtgaagctgaaggcaaaactggagaagattgatgccaaattgcatgacctacaggccaagagagaagacatcctgaggcagctgaaagagctggaagaaggcggcaagggaaacgcgaatgaagaggagcctgcacatgtgcaggaggacaaagggaaggatgttgtgcctgcacagatactggaacaggttggagagagcaaggtcgaggaacagaatcctgttgccacagcctgatcttgtggagatcctgtagcggttcatgtaacaataactctgatctggttttgcacacatgcattacacagtgtaaaggaatacagccatatagggcgtgtttgaatgcctggatgggctgagacacgtgcatcttcaattgtttgttt

SEQ ID NO: 142671 - DNA, 3654 bp, Zea Mays
atggctgcttcgccctcgccgtcgaccgcgaccgcgaccgcttctccctcagcgtcagcggcggcggtcttggctgtaaacggggagcgggttgagctccgcgagggggacgtgaaccccggcaccacgctcctcgagttcctccgcacccgcacccgcttcaccgggcccaagctcggctgcggcgaaggcacgtcaccccgccctcctcctccctctccccgcgctcttccgtttcgcggatgcggcgcgtgcgtggtgctcctctccgcctacgacgcggcttcgggcgcggtgtcgcacgcggcggcgagctcctgcctcacgctggtgcacggccttcatcaccgcgccgtgaccaccaccgaggggctcgggggcggcggccgcctccacgccgtgcacgagcggctcgcggggttccacgcctcgcagtgcggcttctgcacgcccggggtgtgcatgtccctcgccgccgcgctcgcgggggccgaggccgaggccaaggccaaggcggggaggaggcccgccccacccgaggggttcgcgaggctcacggcggctgaggcggagtgggccgtggcgggaaatctctgccgttgcacggggtaccgcccgatcgccgacgcctgcaagagcttcgcggctgacgtggatttggaggacctgggcctcaactccttctggaggaagggggacgcccatgcttccaagctgccgcggtacgacgaggggagcatcggtgtgttcccggagttcctcaaggctgagatcagagcttcttctggggttgaccagtacacaccgccggcattgctgggaagtgccaccacttggcaccggcctcggagcgtggaggagtactataagctggtagattctgagttgtttgaccaaagtaaaacaaaggtggttgtggggaacacagcttcaggcgtttacagagaaacagaggtgtatgataggtacatcgacctcagatgcatcccggagctgaattcggttagtaaggaagccaatggtgttcaaattggagctgcagtaacgatttctcaggcaattgagattttaagagtagaagctggtggctgcaatgatgtaatcttctgtaagattgctgatcatatggaaaaggtggcgtctccatttgtccggaacactgcaagtttgggtggaaatttggtgatggcacagagggaccagtttgcctctgacatcgcaacgatccttcttgctgctgggtcatcgatatgcatccaggcatcatcaaaaaggttgactgtcatgatggaggacttccttcagatgccaccttgcgatcacaagacactgctattaagcatttgcattcctcgttggactcctattggtggcctattttctggtgataaaaccatggctgggacagaaagtaagacaggaacttctgtgctgtttgagacgtaccgagctgctccacgccctcttggcaatgcagttgcatatcttaattctgctttcttggctcaggtctcttcagatggaacttcaagcagattaatattgagagagatatgtctggcttttggtgcatatgggagccaacatgccatcagggctaggaatgttgagaaactgttagtgggtaaacctattactacatcggtgctacttgaagcatgtagacgtctcaaggaaacaattgttcctaaagaaggcacaaggcatgctgcttataggtcaagcttggcagttgcctttctgtttacttttctttacccagtaactgaaggaactttgaagactgtaaaggaagttcatcttaatggctatgcaacttttggcaccaatggaaatccaaattgtggacccgatgcacatgttgatgtttcacttaaaaaggtcattgatgtgaactccggttcatgtaccaatgaacgcattcttgaatattcaaatcagattattgaaatcaataaagactatttccccgttggcataccaaccaagaaggttggagcagaactccaagcctctggtgaggctgtatttgtggatgacatccccgctcccaaggattgtgtttatggagcatttatatatagcacaaaacctttagcccatgtgaagagcatagaactcgacctttcactcaagcagcttaaaacgctgggagtagttactgttaaggatattccagaatgtggcagcaatgttggggccaacactatatttggacctgaacctctgtttggtgatccagttactcagtgtgcaggggaacctcttggtgttgtgattgcagaaacacaaagatttgccaatatagctgcaaaaaaagctgttgttaactacagtactgagaacttagatgctccaattttatccatagaggaggctgttaaaaggtgcagttatttcgaaaccccgccgtttcttcttcccctgaaaattggtgatttctcaaaaggaatggcagaagcagatcagaaaatctattctgaggttaaactcaattctcagtactacttttacatggaaacacaagctgctctggcaatacccgatgaggataactgcatggtagtgtatagctcaagccaatgccctgagacagcacagaatgtcattgcaaagtgccttggtttaccttgtcacaacgttcgtgttattaccagaagagttggtggtggatttggaggaaaggctgttagatcattacctgtggcaactgcttgtgcacttgcagcatttaagttgcaccgtcctgtccgtatgtatcttgaccgcaagactgacatgatagtgactggaggaatgacaaaagatattagcctcataatccctcataatttcattgaggcactgaagaaatataattggggtgccttttcttatgaagcaaaggtctgcagaacaaaccttgctacaaagtctgcgatgcgggggcctggagaagtacaaggttcttatgttgccgaagctataattgagcatgttgcttccacgctctccgctgatgctaatttggttagacgtaaaaatcttcacacggttgagagccttgctttgtttcacagtgagtgcactgaagatgccatgggttatacacttcactctatatgtgatcaagtgactgcatcagaaaactatcagcatcggcttgaaataatccagtctttcaacaaaaacaacaaatggaaaaagaggggcctctcttttgtgccaatagtacacaaagtattatctcgaccgacacctggaaaagtgtctattcttaatgatggatctgttgctgttgaagttggaggcattgagttaggccaggggctttggacaaaagtgaagcagatgacagcttttggtcttggacaactctgtcctaatcgaagtcaagagctgttggagagaataagagttattcaagcggatacattaagtaacgtacagggagggtggaccactgggagtaccacatcagaatctagttgtgaagcagttcgtctcgcatgcaatgtcttggtcaacaggctgaagccagtcaaggagcaatctcaagaaaagcaagacaatgtttcatgggatgaacttatttccaaggttattagtcaatttctttcttacaaactatcttttgaaatgactggtgtgatacgagggtgtcctcctgattga

SEQ ID NO: 142672 - DNA, 3213 bp, Zea Mays
atggcggcgacggcgaggaagctgatcgtggaggtggtggaggcgcggaacctggtgcccaaggacggcaccggcacgtccagcccctacgcgcgagctgacttcgacggacagcgacgcaagacgcgcaccgtggccagagacctcaacccggcgtggaacgaggcgctcgagttcgacttcccgcccgccggcgtcgaccccgtcgccggggagccgctcgaggtcaccgtgctgcatgacctccgcatcgggcctactcgccggaacaacttcctcggccgcgtccgcctcgacgcgcgccagttcgtgcgcaagggcgaggaggcgctcatctacttcccgcttgagaagaacaagggcctcttcaacttcaactgggtccgcggcgacattggcctcaaggtgtactacgtcgacgtcccgctcgcgccaccagagccggagccggaggcatccgtcgctcctcctgatgcgacggtggcggaagcagcagcgccgccgccgccgccgcctgatgctactgctacggcttccgcggatgagcctcccaaggccgaggagctggtggacgcagctccggcgccgcaaccggagccggcagaggcatcagccggtgacggagctaccacggagaagccatcggaggctgattctgaaccggcaacgctggcgccggaagacgcacaagtaatgacggcagaggcggtggcagcatcggaggagaagccgccggaagaggagcctgtgttgagcccgccaccactgccgacgccgactctgatgccacggcaggtatcgatgcctgtacgccagttggagccgacgccgactctgatgccacggcaggtatcgatgcctgtacgccagttggcgccgccgccgccccaactggaggagccgatggtgcagagcaagcacgatctggtggacaggatgccatacttgttcgtccgggtggtgcgcgcgcgggggctgcccgccggcgcgcacccccacgtgcgcgtggccgccggcggccaccatgcgtccacgcgggaggcacgccgcggcgccttcttcgagtgggaccagaccttcgcgttcgtgcgcgatccggccaccgactcgccgggcccgacgctggaggtctccgtctgggacctgccgcccgacgccgacgtgtccatcgccgacgatcgacacttccttggcggcctctgcttcgacaccgccgacgtgcacgcgcgggacccgccggacgggcctctcgcgacgcagtggtacaggctcgagggcgggcgccgcctcggtggcgccgacctcatggtcgccacgtgggccggcacgcaggccgacgaggccttcgccgacgcgtggaaggcagactccccagcggcgaccacggccacggccgcggccgccgccacgtcgcgcgccaaggtttacgtgtcgcctaagctctggctccttcgcctcaccgtcatcgaggcgcaggacacgctcacggcgccgcctccccgcgacgccggcatcgctgtgcgcgctacgctgggctcccaggcgctcaagacgcgcaccacgccggtggcgcgcaacggagggcctgcgtggaacgaggaccttctcttcgtcgccgccgagccgttcaccgacgacgactgcctcgtcatctccctcgaagtgcgccacggcaaagaggccttccctgtcggctcggcgagcatatcgctggctaccgttgagaggcgcgtcgacgaccggaaggtggcgtccaagtggctcgacctcctcccgtccgacgaagccgcgatgagagtcggcaagagagcggctatgcacatgcacggaggccggctgcacgtgcgcgtgtgcctcgacggcggctacaacgtcgccgacgagccgtcctacgcgtgcagcgacttccggccgtcggcgcggcagctgtggtccccgccccttggcgtcgtggagctaggcatcattggatgcaagggcctccttccgatgcgcgccgccgacggcaagggctgcacggacgcgtacgcggtggccaagtacggacccaagtgggcgcgcacgcgcaccatcgccgacagctacgacccggcctggaacgagcagtacacgtggccggtgtacgacccctgcaccgtgcttaccgtcggcgtgttcgacgacccactgccgttgcagccgtcagaaggcggcggcaaggatgccgccgccgtcgcgtgctcgcggccgatgggtaaggtgaggatacggttgtccacgctggagcgaggccgcgcgtaccgtggcctgtacccgctcatcatgatgctgcccaccggcgcaaagcgaatgggcgacgtcgagctggccatccgcttctccacgtccgggtcgatgctggacgtgctgcacgcgtacggccgaccattgctcccggcgatgcaccaccagcggcccatcccactggtgaaccgcgaggctctgcggctggcggcagtgcgcatctccgcggcgcacctggcgcggtccgcggagccgccgctgcggcgcgaggtgtcgacgtggatgctggacgccgcggagcctcgcgggttcagcatgcgcaagttccgcgccaactggaaccgcgccgtggccgcgctctcctgggtcaccgacgcggcgcgctgggtggaggacacccggtcgtggcgcaacccgacggcgaccgcgatggcgcacgccgtgctggtcctcctcgcgtggcacccggacctcgtcgtgccgacgctgacgctccacgccgccgcggtgggcgtgtggaagtaccggcggaggccgcgcgcgccggcggcgcacccgtgcgtgcgcgcgtccatggcagaggcgcccgacagggaggagctggacgaggagttcgacacgatcccgagcgcgaggccgcccgatgtggtgcgggcgcgctacgaccgcgccaggatggtgggcgtgcggctgcagcagacggtcggcgacgtcgcgacgcaggcggagaggctgcaggcgctcgtgtcctggcgcgacccgcgtgccaccgggctgttcgtcgcgctgtgcgtcctcgtggccatggtgctgtacatggtgcccatgaagatggtggccgtggtcgccgggttctactacctgcgccacccgatgttccggaatcggatgccagcaccggtgatcaacttcttccggcggctgccttccatgtctgaacgaatcatgtag

SEQ ID NO: 142673 - DNA, 105 bp, Zea Mays
ccgaaaggtggcaaagtatatcttgcttattgatacaaaggcagatgctgtctgtgtggggccggttaatttcttctagccatgaggaacctttgcttcttgtaa

SEQ ID NO: 142674 - DNA, 3947 bp, Zea Mays
gaggtagagagggccggggcgaagggggcaaagatgcgttcttgaggagcctgtgcaggggaggtccaatccagaggccgccattccttttcttttccccccaacctctgcaggctcttcagatccagcaatccggcttgtttcttttgctggttgatttatactctatagtggttctctacttagcatcaagtcttggcatggcaatggcctcgtagctcgcggctctctaataggaataattttactcaaaatgaagctatagcgtcatgctatcttaggttgtttggacagttccttaggatactgaaactgtcttagataatggagatgatgttcactcaaacatttctcccgatagatatacaattgtaattacaccagaactgtacttacaattaagaacaacatcagctgtaacattagtagtaagaaacagttcagatagtgtgaagaagttcatctgttggcctgctatttcagatactgtgtgtgttcctgaaacttcatggagacttccatatctccaccaggcacatcaaagcagtcagctgtccgcaaaccttctcctggaagctctcttaaggatctgtgccttgtttccaaacaagggtcaatagctgaagtagaatctgctttggccttgttgaaaaaaagtggtgggaacattgatggtagaaatgcatttggtcttagtgccctccaccttgcaacatggagaaatcatctacccattgtgaggcgactcctagatgctggcgctgatccagatgcaagggatggagaatctggctggagtagcctgcatagagcacttcattttggtcacctatgtattgctggtgttcttttacagtttggtgcttccctcgctttggaggacactaagggccgtacacctgttgaccttatctcctgtccagtatcacaggccaatggagattttccagatgcagttgcaacggaagtcttcagttggggaagtgggacaaattatcagctgggaactggcaacgcccacatacaaaaactaccatgcaaagtagaagctttgcatggatcatatatcaaaacagttgctgcatcaaagtttcacagtgtagcagttagttctaatggtgaactatacacatggggatttggtcgaggtggtcgtcttggtcatccagatattcacagtggacagacaactgctgtgattacccctcgccaggtgacagtaggattaggccgtaaacgagttaatgctgtggctgcagccaaacatcatactgtgattgctacagagctgggggaattgtttacctggggatcaaatagagagggtcagcttgggtacccttctgttgatacccaaccaacaccaaggcgtgttggttcgctcaagcaaaggataatttcagtagctgctgcaaacaagcactccgctgcagttgctgatactggcgaagtattcacctggggttgcaataaggagggccaactaggatatggcacttcaaactcagcatcaaactgtatcccaagaatggtggagtacttgaaaggaaaagtacttagaggtgtttctgcagcaaagtatcatacaatagtgttaggagctgatggagaggtgttcacttggggccatcgccttgtcaccccacggcgtgtcgtagtagctcgatgccttaagaagggtggaaatacaaatctgaagtttcatcgtatggaacgacttcaagtgatttcagtggctgctggaacaacgcacaatactgctttaacagctgatggtgctcttttctactgggtttcatcagatcctgatctaaaatgccagcagatattttcaatgtgtggaaggaatattgtgaacatctcggctggaaagtactggaccgctgtggctacatcaactggtgatgttttcatgtgggatgcaaagaaacgtaaggacgaaacgccaattttcactcgggtgcatggtgttaagcgagcaacatttgtttgtgttggtgaaacgcacatgcttgtgctctcaagtatataccatcctgagtatccacccaagcctaaaagccaaggcttaaaatccatgttagaatggaacggtggaacagaagagctgggtgaagatatcctgtttgatgatgttcagcccaacagtggtttatcaggaagcagtggtgaaatgagcaaaggtgtgcctagcttgaaaagcctctgtgagaaggttgcagttgagtatttattggagccaaaaaactcaatacagcttcttgaaattgctgattccttggaagctaaggagctcaagaagcattgtgaggatttagctattcgcaacctcgattacattttcacagtgggagcttcttcaattatgaatgcttcttctgaaattcttgtgaacttagagaaattgctagatgagaaatcctcagagccttggagtcagcaccgtcttcccacaatgacagctacctatcctgctgtcattgacagtgatgtagaggaagatgaagcaagagaattccccaagacccgtaaatgtgggaaatctgcatcaaggccatctgcgatgtctagtgatgacagcttccttcagaaagactgcaccgctgaacaagccgtctctaagcagatcagagcacttcgcaagaagctgcaacagattgagattctcgaggctaaacaacttgcaggtcatcagcttgacagtcagcaggtagcgaagctcgagtctagggctgcccttgaaggtgaacttgctgaacttggcattccctcagagatatactcaacttcctctgcttgtccagcagaaggtaggacaaacagaaaacctgaggtttctaagaaacagaagagaaagaacaagcagtcaacacagaccccgtcagtgaaaaatgagcctgggcaacaaatccccattacggaacttcaagttctacaagtcaatgtctctgctgaaaaggaggcgtatgccgctgatccaattaaacctatggaggctgccgcgttcagcaacacaaaggacaccgcttctccaccggagaagaaaccttcccaaccaactccatcaaagaagaagaacagaaaaggcggcctgtcgctgttcctgagcggcgctctcgacgacaccccaaaaccaagcctccctgcccccgctgtgcctgccacaccgaagcccgaaggacccgcctggggcggcgtgaagataaccaagggacccgcttcgcttcgagacatccagaccgagcagagcagaacaaacgagcccgcgtcggccaaggcgaaggaccgccacgagaactcgccggacagcgccggccgcgcgacaaggctctcctcgttcatccccgacgcgcgttccagcccagtagccgtcgtggcgcctgctcgcgcagcggcggcgccttcttccgaaggtgacaggagcacgccgccgtggtcgtcctctgccacctcgcccaacgtgtcgcagccttcgctcagggacatacaacagatgcagcagaggcaccatggcggcgtctcccacagcccgaaaacccagacatcgggcttctgtataccgccccacggcggagcgccagaggccgctggcggtggcggcgtgaaggacaacgtgcccaaccggtggttcaggccggagaccgacgccccgtcctccatccgctccatccagatcgaggagcaggctatgaaggacttcaggcgcttctacagcagcgtgaggatcgtcaagccgcaggtctagtagcactggcggcggcggcggtggcggccttggcggagagtgactgatggcacaacaaccccctttaggctcaccctcccatttgacactggctcgttgtacattcgagtgtacagttggttctgttcgccataggttccttgagctgaacaataaacaaacaccctttgctgctgttgctgctgctttcgcagtgagtggt

SEQ ID NO: 142675 - DNA, 1507 bp, Zea Mays
cagtgttctttcgtagaggagtgaagaggcctatctataactcgacgcgctagggttttccatcaccgccgccgccgacgcatccaaacccaaatcaagccaccaccctctcctcctcctcagcggcgagcaccaccagcaacagcgagacacgatgaggccgatcttgatgaagggccacgagcgcccgctcacgttcctgcgctacaaccgcgacggggacctcctcttctcctgcgccaaggaccacacccccacggtctggtacgccgacaacggcgaccgcctcggcacctaccgcggccacaacggcgctgtctggacctgcgacgtctcccgcgactcggcgcgcctcatcaccggatccgccgaccagaccgccaagctctgggatgtcagcacggggaaggagctcttcagcttccgcttcgacgcgcccgccaggtccgtcgagttcgccatcggggacgcgctcgccgtcgtcaccaccgacaacttcatggaccacgtccccaccgtccaggtcaagcgcatcgccgaggacatcgacgaccagacggaggagtctgcactcgtcatcaccggcatcaagggaaggatcaacagggccgtttgggggccgctcaacaggaccatcatcactgccggagaggatgccaccgttcgcatttgggattcagagactggacaacttctgaaagagtctgacaaggaatccggacatcagaagaccatttcatcattgtcaaaatccctagattggtcacattttattactggctccttggataaatctgccaagctatgggatacaagaacgctgaccctgatcaagacatatgtcacagagagacctgttaatgctgttgacatctctcccactcatgatactgtggttctaggaggtggtcaggatgcaatgaatgtgactatgactgaccgccgtgctggtaaatttgaggctaaattctaccacaagattttgcaagaggaaattggtggtgttaaagggcattttgggccaattaatgctttggcatttaatcctgatgggcggagcttttcaagtggtggtgaagatggatatgtaaggttgcatcattttgattctgactactttagcatcaaaatgtagataaagaacagacgaatcagaggctgtttgatgaccaaccggttcagtttcttggttcagatgttagatgttgctggttggccatggcgcatgtagagcaggctcagatcctaggtttttggtctgcttgtttgatgatgttgctctggataagcagctttttggtctgcttgaggaatttgtacacacttggcaatgaaaagatccttggactgagttgtcattctcgctcatgtttccagttttgtttcgatttgtagtgctcacatttcaaaacctgtgttttaactctacatatgaggctgctgtattactgcattggctaaacggctaaacctactacgttccccacttaaatgactgaacgatcaa

SEQ ID NO: 142676 - DNA, 720 bp, Zea Mays
cctatcaacatgctttgtagataccttttctcttgcgttctggagttatttttaaattttagaagtttttttactaactccatgttcattcttttatcttattattagcttttcaagtggtggtgaagatggatatgtaaggttgcatcattttgattctgactactttagcatcaaaatgtagataaagaacagacgaatcagaggtaccacttcagctctcagctgttttattaagattggtttgttaattttgttatcgcttgctacctgtgtactgttgacatggcatattgtttttcttgcaacccgaccttttggtttgactttttaggtgggttttctggttattatacacgtcagatgtatctatggcatgttctaacagattgacaatgttgaaacatcaatgatgtctatcctaagaattccatttcttgcatccagaccgaaagccctgttgcttatgtttttaggtcgtgtttgttttaaccttcatccttcaattccttttcaggctgtttgatgaccaaccggttcagtttcttggttcagatgttagatgttgctggttggccatggcgcatgtagagcaggctcagatcctaggtttttggtctgcttgtttgatgatgttgctctggataagcagctttttggtctgcttgaggaatttgtacacacttggcaatgaaaagatccttggactgagttgtcatt

SEQ ID NO: 142677 - DNA, 1533 bp, Zea Mays
cccagctgagcttcttctttcccccagcacgccgcacttctctgctccctccagtccacagaagctcccagccgtggcgttctctctgctcggccgcgcccctgcgcttgccgagctgctctctggcgctcgcccatggccacgcctgcccctgctcgcgtccttcagctccagcgctccctcggctcgcctggccggagcgccctgcgctctgctcgcccatcctccgctcctatctccatggccgtggtgcttctccatggctgtcgtcgcccaaatccagaaccttgccgagttcgtcctccactcggctcatggcgcttggcctcagctcggccttacctcctggctattgtataccgctctgctggtggctgccgtcaacctggagcaccgcctcgagcacccgttgccccgcgctctgttctcccggcgagtcgcgcccaggctgcactgagcccttccctggtcgcctgctggcctgctaccgcgtccctggctctagctctgttgccgcgcacgctccctgctcggtgtccctctccactcgtctgggtactccttcgctgctcgtcgtgcacgtgctggccaacgttcggtgtctggctcgccgcgcgcccagcttcttgcgcgccatggcggccgtcgtcgtgttttcctgcgcgtggcgttcctccagctcgcccatggatgcgcgctccattttccccaaccgcgcatccctctgttggccagagttccctggtccgaccccgtgctgtgctcgcctcggccggccatgttggccgcgcagacttcctggccgcgggcagttctggcctatgccgccatcgcgcccgggattttggtgcgcgtccctgcttcccgatagcgccgaccgccgtcgttctctgcctgtgacctccggccgtgttggtcgtggttgctatcttcagctcaccggcatgctgctaggactcgcgtgcgccatggctctgattgccacgctctcgcgcctccctgggctccttttgtcgtgtccagttctagtcacggttatctgctgaaccatcgtcacgccgggttgcccctgattcgtggagttcaccggctttcccgtacacagtcacggatgtcatcacccggtccttgtctcttgccgagctcatcaccaccgtgagactctgcgttgctgtactcggccgcgtctcctagtcatcttatgcgtactcatctccaaatttgaccgtgcggccgacggtcgaccatacagttgcctcacagcatttcgacaccttgtcgtcactcggcaacgtgtttgctcgtcaccacaccatcttcagcatcatggttctgtaagactccgcgcactcgtcaacacccggctatcagtctccaccacgcggcgccacttcggacctctagcctcgtcctactctgctccagcttgcgtctaagcctagggtcaagttcgtacgccacctgctcgataaaataaagtgaactggtgagcgccagtgtttttgtaaattttgagttaaattactagttgtt

SEQ ID NO: 142678 - DNA, 327 bp, Zea Mays
atgatgcgcgggcggatgactacaataggatgtggtgagatggatacatcaaatatattacaatcgcatcctgattcgattgatcctagtttagttcctaggtttaggatgatgttccgagatgttgatgatgcttatgatttctataaatgttatgcatatgaggtcggctttcctttgaaaaggattgatctagttaaccttgtgcataatcatgattttgtaacccaagaaactgaaaaacaacacctctgttgtaacaagacacgtgatccggaatttatggactttgttggagcaatgcatgacagtagggaaagcagctaa

SEQ ID NO: 142679 - DNA, 251 bp, Zea Mays
ctgtgacggcgactcggcgaagccccaagctgccaagcccccagattcatctaaaatgacacatacttactacacttactactgattttattatgaaaggacagcaacagctcaaggcagacaaagaccatggcacaaatctcacacttgtccaaacctacaagtatgatcaggaagatagcttgaaaaaaattgtgaatgagacttgtatgtggctgtgaatgaacaattgtgtgattaggatttgttta

SEQ ID NO: 142680 - DNA, 527 bp, Zea Mays
cttttctattggtttgtgtgcagttcaagctctgcaaggtgaggtctgttcagtttggccagaaaggcatcccctacctgaacacctacgacggccgcaccatccgctatcccgatccgctcatcaaggccaacgacaccatcaagatcgatctggagactaacaagattatggacttcatcaagtttgacgtccgcaacgtggtcatggtgactggcgggaggaacaccgggcgtgtaggagtcatcaagcacagggagaagcacaagggcagctttgagaccatccacgtgctgcttggagttttttgctatgtctagttttctcctatttgttgtacaggaaaacatagaatgaaatttaaatttggtggccgcaaaagcgtggagacttgaattcatataaagttaggcttaacattagtgcaacagttgtattttagtttagatttagagtacactttatgtatgtgttgtttaacaatgcttatttatgatatattgaatggtacttatttatattatatt

SEQ ID NO: 142681 - DNA, 2057 bp, Zea Mays
ttggaattgtttcccagtgactaactttccatcattatatattgtgcttttataacagatctcgtacaaatggcttagccgtaacttctctgtatcatcgaacgatgccaagaggttgcttcaggagtttgtcgacaaacatggaaccgacctccaggtgatttacagtgtgtcagggtggttgaagagcaatcccgaaaattattgtgtaaagctcgtttcaggcccaaaacttgaagaagcaaggcatggtttcaaagattcttgttcagttcagatctacagcatccaggcctgtattccaaaagatacagctgtgctttggaatcatgaatttgtgcaggcagaggagcttttcaaccagccttttgatgatgagaactgtttgagagataatagattttgtggtgttttgaattcttttgtcaagcgaacatccaatgggaagcatgtgagttcattgccaccaaagcccttaaacagtgctgcagtggtcgaacagtctaaacctagtgttactccaaaggagcagtttgttactgctcagcagcaagatttgcttgtaagttcaaagcatggagcaggcaataagtctgagaaggataattccacattattagataaggctggcaatgctcctgttgtcaaagaacaatcaattgatgcccatgcaagtaaaagtagagctcacaatggaaagaccatgcctaataatggtggatctctggctaacatgtggggccgtgcatcaactaaacctaagcctccaagtaccactaattctacagttgtagaaagtgttgcagctactcttgatgcacaaatatgtgcaaaggaagaagcagatggaaatagcagtgatgacgaacagggaataaagtacaagagggaatccaccaatgcaaataacagaaagcgaagagcagtatttgatttttcggacgatgaggaagatgagaatattataagcattgcatctcctgaggtactaaaacagcgtaccccagaccctgttattgaaactgctgaagacgctgaagtaaatcaaaagaacttggaaaataaagatgatgtaccgaacactgagaaaggttcctcaatgggggtggattctgacttcacttctgaatgtaaaaccaaaactgtcaatactatgaaccattctgggattactttaaaagaaaagagcagcgatcctccagtcagtaacaagaaacaggattctgcagttgagcctgcctccaccgcaccgaagagaagaaaggttttgaagacacgcatagatgagaggggaagggaagttactgaggctgtttgggagggtgaaggttctgcagatgacaaggcagagaagaatgtcagcacaactgctgcgagcggggcgactctcccaagcaaaccgaagccagcaacaagcactgaccaaatcaaggctccaagcaaaacggcagcaggcaacaagaaacccgcgaaggcgaaggctggaaccaagcaagggagcattatgtcattcttcaagaaagcatgagccagcgcggtgcgcaccaaaacgagacaggactgggttcagcaaactgtctgctgccgcgcttactgaaccaggtcgctagccaggcatctgaactggtagccctacggctctctacctgaatatcgtcaggccagcgagcaagaagggctccaagcagagagcacgtctgttagttcagtgattatcttgctgtaggtgtacatatagttgtactgagaggcactcacagcctgtttgcactttttggacgggtctgttgtgttgtgtggaagtagaagagagaaacgctttgggtatctgagtatctctatccggtattgcaacctactggagtttatgggccaaagctggtggaaagtgtagtgaagaggagagattgtccgtgagtttaattatgtgtatctaataaacttttatattatttaattatgagttttatttcttattggagcgaaggaaagtatgatacaatgttcagtccagccgagccgtgtcgtgcattgtttggaaattggaatatatatat

SEQ ID NO: 142682 - DNA, 1298 bp, Zea Mays
tatatacccatgcagccagcagtagtgcgtggtggcgccaacaagaccagaccgacggccggcggcggcagcggcggcggcgagacagccaccgatgacgccgccgccaacgcgaaacgctcccccgcggacaagccgccgttcacgctggccgacatcaagcgagccatcccagcgcactgcttccggcggtccgcgctgaggtccacgtcctacctcctgcgcgacctctccgccgtggccgcgctcttctacgtggcgctggtggcgatcccgtcgctccccgccggcggcgcgctccgcctggccgcgtggccgctgtactgggcggcgcagggctgcgcgctgaacagcgtgtgggtggtcgcgcacgagtgcggccaccactccttctcggagcacgcagcgctggacgacgccgtcggcttcgcgctccacacggcgctcctcgtgccctacttctcctggaagcacagccaccggcggcaccacgccaactcggcgtcgctcgaccgcgacgaggtgtacgtgccgtggaggcggtcggagctgccggcgctcgtgcgggggctccacgccaacgccgccgtccgcctcgtcctcctggcgctggtgctcgtcttcggcttcccgctctacctgacgtgcaacatcaccggcaggccgtacccgcgcctcgccagccactacgacccctactcgcccatcttctccggcggccgggagcgcgcccaggtcgtcgcctccgacgccggcatcgccgtcttctcgctcgccctctaccgcctctcgtcctcctccggcggcggcgggctcgccacgctggcgctcgtgtacggcgcgcccctgctcgtcgtcaacgtgtggctggtgctcatcacgttcctgcaccacaccgacgcggccgtgccccgctacgactccggcgagtgggactggctccgcggcgcgctcgccaccgtggaccgcgactacggcgccttcctcaacgccgccttccacaacatcgccgacacgcacgtcgtccaccacctcttcccgtccatgccgcactaccacgccgccgaggccaccagggccatccgcccggtcctcggcgagtactaccgcttcgacgacacgcccatcgcgcgcgcggcgtggcgcgccgccaaggagtgcttgtacgtcgagcccgacgcacgccgcgagggcgtcttctggttcgccagcaataagcaggcgtaattaattaggttgcatgcatcggatcacggtggcgtacactacagacagaaaaatcttatatatatagtgta

SEQ ID NO: 142683 - DNA, 2425 bp, Zea Mays
cacggcgccggccacggctccggccttgcccttggccttgccgccgccccgcgcctgcacgggcacgatgcccacggccagcgcctggttctggcagaacagggccgggtgctgcgtgctgccggcgccgccggacaggcagttggacgccgccaggaccgtcacctgcttggagttggaggacgacgggagcgtcttcaggcacgacgggagcgtccccgtcaggaggttcgacgacacgtccacgaaccggaggttctcgccgcaggacatgttggcggcgagcaggcccgtgaagcggtttccggcgacgctgaggtactcgatggacgggagcgcgagcagcgccggcgggagcgggccgacgaaccggttcctcgacacgtccaggcgctccaggaggtagagcgaggcgacctcctcggcggggaccccgttgccgaagcggttgccgctgagcacgacgctggccaccttccgccccaggcgcgggaacgccgggccaagcgagttgttggagaggtccaccgcctgcaggttcgtcagcgcgctcaggtccggcacctggccggagaggttgttgcacgcgagcgccagcgaccgcagcgaccccatgtcccggacggactccggcaccgcgccctgcagcgagttgttccggaggctgagcacggccagcgacgccagcctcccgagccacccgggcagctcgccggagagcatgttgtcgtcggcgatgaacgtctggaggccgcccagccgggatagcccctccgggagctgcccgtagaggtagttgccgctgacgttgacgatctccagcgacgccagccgcgacaccttccccggcagcgggccccagaggccgagcccggtgagcgtcagcacccggaggtcggggagcctcgtcagcgtcgtgaagagggcgtccaggttgaacgtcttgggcagcggcggggcgccgccggggcccatgatgtggagctgcgtcacgctgtcgccgtagcactcgacgaaggcggaggcggtcttgtagtccccgccgtagcagaagtcggtgccgttgccccaggtgcggagcaccggcgggtagctgagcagctgctggatcttgagcagcgaccacgtctgcgacgactgcagctgcgccgactcgggcaccattgctagcactagcagcaacggcagcaagacggcgagcagaggatgcctgcaaccgcaactccctcgacccatccttgaaccttacttacttacgcttgctagctctagcttgccacacacagagagaattctcctcctcctctctcttggaattcttctgatgattgccagcttttctactgcgcaaccgatggcagcgaggccagaaatgatgagcaaatgatcagaaacggcgaaagaaaccttttctcgacctcgagctggaaccgaagagagtgggagtctccagcctcttggtaatcacccacacatctagaatctggaagaaaagatttctaagctctgaatgcagttacgcagggagcctgagccagcaaaacgaaggcagcaacgaacttgggaactcgcagcaacgaggtatagttattggagatagctactggcgaccagaaaaaaaaatgtccaatcctgcactgcacaggggacggatctgagtggtagaccgccggttcttttcaccccctggcaagcaagcaagcaagcactggatgccaatgcctctcccctcttccaccccctcctgcaggcaccccagatttgctccctttcttcacgaactggcaacagggctgcacagcgattgcaccgtcaggttaaccaagcatcatctctgctcggcactgtcacctactcctcctagtactactaatcaccgtattttttttaaaactcaccagttgatatgattattagtagtaattccaagaaaccagaaacacaagttcaggagcttcagttattaccttacagctacagctactggagcagcacagcgcctcactgccagtgccagtgctgaaggaacgcagaggtcagcttgcgagggactgggactgggagagagcacgagctggggcagcagatgaacgcaatgcaactgatgaaccgagcgctgtctgtctctgaatggagtggagcactgcagcatctacagtccatattattttgcccttggggttttgtgaatgctgggtgggagatgatgggatgggatcatgggagtagggaatcgtatgcgcagtgtgtgtgtgtgtgtgtcggctaccactactctactgtcgccgagcatcacgggctggcttggcgcgtgaggaagaggccacaaaggattgagctggacgacggcggttggcaaaaggacaaggaggtgtgagcccggagccatcttttccctcccccctcccctcccctaccatacaaa

SEQ ID NO: 142684 - DNA, 1837 bp, Zea Mays
cagctcctccccttcctttcaatcctgctggttgcagcccctccttttcttcgattttgcagttcaacggcgaccggctgaccgccatctgccgggattggtccggtgtggaccctcttgccatctctggcgctgctgcagggcgcccaaccagcagccagggcccactggtggggcacccgtgtgagtgctgtacgccattttttgcaatggaggagggtcacgtgcgtcagacgggcgcgtgagggcggaccgacgacgaaggaattttctcccttacgtacttaatagtagtacagatggtctggtctccatgtatttcttgagaactaggactttttgccggtttaattagtttgtgatcctataccagtgaaaactagtcactttactggatcatgtttggtactgatctttttagatcaagaagtatttatttcctggttgagttgcatggttaaacctccaacctggagtttgtagatctttacccccctaggcccctactctagtcatttcatggctacaagcagtcacctttaatatccaactagtttatatgtgcaagttagtttagcgtaatttaatgtcttaatatgctctgtatctctgctacagcaatctggccctgttactttatatgtaaagcatattgtatccaggaattttttgtacatccttttgtagcagtgtcatatggttaagaaccactcacaatgagggatacatgattaatcaagtatgaatttaatggataattcgcagaagttatgaaagctgttttttatgctgggataccttcttattgacttagttaggttcatgttaagcttttttgattcaacactgtggctgtgatgtttcacttgttttacatagccttgaaacacgtgggaaacattttgaatgtgcgcttaaaatttaatgtacaatttatcagtatatttttaacggagacaattctatgcttttataaaaaacattttattagtatgttatgatcgtgacttttgattttcatgtttcattaaggtcaataagtttcccttagccttagcatgctgagatttttaaatggctttgtgctattatgtcagcattgcaaagttcactgactattgactgtatgttacatatgtaggcacgttcaagcttaccttgcagtttacagaagattacccaaacaagccaccaactgttcgatttgtctctaggatgtttcatccaaatatatatgctgatggaagcatctgtttggatatcctacagaaccagtggagtcctatatatgatgttgctgcaattttaacttctatccagtccctgctgtgtgatccaaacccaaactcccctgcaaactcagaagcagcaagactgttcagcgagaacaagcgggagtacaaccgcaaagtccgtgagatcgtggagcagagctggacagccgactagtgcataaggatgctcgtcgtgcccgataggggcacaataagaaagcgtgaaaaaaaaaacacacccactccttgtgtttctggttcgccaggcttgtcgaaacattgaagaaccccagtgattggtttgtagtctgtcgtcgtcgttctgcccccatcaagagccccggttgctcatggtggtggctgtcgtaatgtagcggttgttgacctatcttctcatgaattgaaaggatcctgcccatgtacaaaaattatagcgtgggaatggttgtttgacggaccgtgttgctcttgctttgtgggttgagtttgacagggacagagcacactcaacttggaacagcaaggcagacaaggtcgatctcgaagtgagatccgatttttgg

SEQ ID NO: 142685 - DNA, 1190 bp, Zea Mays
cgaggagcccgcgcatcagcggctccgacttccgagcgggttcgcgcctggaaacgaagctatacgtcgcgaggaggggagggcccaccgccccgcgtgggcgtcgcagcttccactcttcccccgtgaaacttttctcacgcgcacccattccacccaccacccaccttcctttcctctctctctgtctgactgtctccctccgtccctcgaagcttctctggtttcagacgcaaccccgcgggtcgcgggatcaaggagccagagagcgggacgcagcgagcgttccgccagagatcgagaccgtagctagggtttgaggcgccgggctgcggtggacgagatgtcgacgccggcgaggaagcggctgatgcgggacttcaggcgcctgcagcaggacccgcccgccgggatcagcggcgcgccgcacgacaacaacatcatgctctggaacgccgtcatattcgggccggatgatacgccgtgggacggtggcacgttcaagcttaccttgcagtttacagaagattacccaaacaagccaccaactgttcgatttgtctctaggatgtttcatccaaatatatatgctgatggaagcatctgtttggatatcctacagaaccagtggagtcctatatatgatgttgctgcaattttaacttctatccagtccctgctgtgtgatccaaacccaaactcccctgcaaactcagaagcagcaagactgttcagcgagaacaagcgggagtacaaccgcaaagtccgtgagatcgtggagcagagctggacagccgactagtgcataaggatgctcgtcgtgcccgataggggcacaataagaaagcgtgaaaaaaaaaacacacccactccttgtgtttctggttcgccaggcttgtcgaaacattgaagaaccccagtgattggtttgtagtctgtcgtcgtcgttctgcccccatcaagagccccggttgctcatggtggtggctgtcgtaatgtagcggttgttgacctatcttctcatgaattgaaaggatcctgcccatgtacaaaaattatagcgtgggaatggttgtttgacggaccgtgttgctcttgctttgtgggttgagtttgacagggacagagcacactcaacttggaacagcaaggcagacaaggtcgatctcgaagtgagatccgatttttgg

SEQ ID NO: 142686 - DNA, 1152 bp, Zea Mays
cgaggagcccgcgcatcagcggctccgacttccgagcgggttcgcgcctggaaacgaagctatacgtcgcgaggaggggagggcccaccgccccgcgtgggcgtcgcagcttccactcttcccccgtgaaacttttctcacgcgcacccattccacccaccacccaccttcctttcctctctctctgtctgactgtctccctccgtccctcgaagcttctctggtttcagacgcaaccccgcgggtcgcgggatcaaggagccagagagcgggacgcagcgagcgttccgccagagatcgagaccgtagctagggtttgaggcgccgggctgcggtggacgagatgtcgacgccggcgaggaagcggctgatgcgggacttcaggcgcctgcagcaggacccgcccgccgggatcagcggcgcgccgcacgacaacaacatcatgctctggaacgccgtcatattcgggccggatgatacgccgtgggacggtggcacgttcaagcttaccttgcagtttacagaagattacccaaacaagccaccaactgttcgatttgtctctaggatgtttcatccaaataaaccagtggagtcctatatatgatgttgctgcaattttaacttctatccagtccctgctgtgtgatccaaacccaaactcccctgcaaactcagaagcagcaagactgttcagcgagaacaagcgggagtacaaccgcaaagtccgtgagatcgtggagcagagctggacagccgactagtgcataaggatgctcgtcgtgcccgataggggcacaataagaaagcgtgaaaaaaaaaacacacccactccttgtgtttctggttcgccaggcttgtcgaaacattgaagaaccccagtgattggtttgtagtctgtcgtcgtcgttctgcccccatcaagagccccggttgctcatggtggtggctgtcgtaatgtagcggttgttgacctatcttctcatgaattgaaaggatcctgcccatgtacaaaaattatagcgtgggaatggttgtttgacggaccgtgttgctcttgctttgtgggttgagtttgacagggacagagcacactcaacttggaacagcaaggcagacaaggtcgatctcgaagtgagatccgatttttgg

SEQ ID NO: 142687 - DNA, 918 bp, Zea Mays
ctcacagcctcacatacatacgcggtgccgccccacggatacgcaaccccgcgggtcgcgggatcaaggagccagagagcgggacgcagcgagcgttccgccagagatcgagaccgtagctagggtttgaggcgccgggctgcggtggacgagatgtcgacgccggcgaggaagcggctgatgcgggacttcaggcgcctgcagcaggacccgcccgccgggatcagcggcgcgccgcacgacaacaacatcatgctctggaacgccgtcatattcgggccggatgatacgccgtgggacggtggcacgttcaagcttaccttgcagtttacagaagattacccaaacaagccaccaactgttcgatttgtctctaggatgtttcatccaaatatatatgctgatggaagcatctgtttggatatcctacagaaccagtggagtcctatatatgatgttgctgcaattttaacttctatccagtccctgctgtgtgatccaaacccaaactcccctgcaaactcagaagcagcaagactgttcagcgagaacaagcgggagtacaaccgcaaagtccgtgagatcgtggagcagagctggacagccgactagtgcataaggatgctcgtcgtgcccgataggggcacaataagaaagcgtgaaaaaaaaaacacacccactccttgtgtttctggttcgccaggcttgtcgaaacattgaagaaccccagtgattggtttgtagtctgtcgtcgtcgttctgcccccatcaagagccccggttgctcatggtggtggctgtcgtaatgtagcggttgttgacctatcttctcatgaattgaaaggatcctgcccatgtacaaaaattatagcgtgggaatggttgtttgacggaccgtgttgctcttgctttgtgggt

SEQ ID NO: 142688 - DNA, 564 bp, Zea Mays
ctcacagcctcacatacatacgcggtgccgccccacggatacgcaaccccgcgggtcgcgggatcaaggagccagagagcgggacgcagcgagcgttccgccagagatcgagaccgtagctagggtttgaggcgccgggctgcggtggacgagatgtcgacgccggcgaggaagcggctgatgcgggacttcaggcgcctgcagcaggacccgcccgccgggatcagcggcgcgccgcacgacaacaacatcatgctctggaacgccgtcatattcgggccggatgatacgccgtgggacggtggcacgttcaagcttaccttgcagtttacagaagattacccaaacaagccaccaactgttcgatttgtctctaggatgtttcatccaaatatatatgctgatggaagcatctgtttggatatcctacagaaccagtggagtcctatatatgatgttgctgcaattttaacttctatccaggcaagactgttcagcgagaacaagcgggagtacaaccgcaaagtccgtgagatcgtggagcagagctggacagccgactag

SEQ ID NO: 142689 - DNA, 694 bp, Zea Mays
cgaggagcccgcgcatcagcggctccgacttccgagcgggttcgcgcctggaaacgaagctatacgtcgcgaggaggggagggcccaccgccccgcgtgggcgtcgcagcttccactcttcccccgtgaaacttttctcacgcgcacccattccacccaccacccaccttcctttcctctctctctgtctgactgtctccctccgtccctcgaagcttctctggtttcagacgcaaccccgcgggtcgcgggatcaaggagccagagagcgggacgcagcgagcgttccgccagagatcgagaccgtagctagggtttgaggcgccgggctgcggtggacgagatgtcgacgccggcgaggaagcggctgatgcgggacttcaggcgcctgcagcaggacccgcccgccgggatcagcggcgcgccgcacgacaacaacatcatgctctggaacgccgtcatattcgggtagcccgtcccctcccctcccccctcccccgatttcgttaccccacaaacgccccccctggagtccgttaatcccgttcctgttctagggtttgattgagggactccggatctcggggagggagacgggatctcagctattccttttgttcttactcttgtgttcgttgtgctgatgagaggttcgtgtggtttcgcaggccggatgatacgccgtgggacggtg

SEQ ID NO: 142690 - DNA, 1000 bp, Zea Mays
aaaagcaatgtatctagaaaagtcaaaacatcttataatttggataaaaaagaataataaaagagagtaatagttatgatgtgttttataacaaggtctgggttggtggacaagtatatttttattccttgtgtcagagctgatattctgttattgccaaccttttccgtttcagcatggggtagttccagggcttgtccctggatacaagaaaattatgcctcgagtccacgataccatcgtttgaccttttggttgctttatttgctcaattaagtttgtacagcttctggtgcgattaagtttataaagcttcataacccattccagatacccttatgtgtctgcagctgtaatgcggagtgagggtttcatttacctcaaggacaactgcccatctctccagtcagagatactgaaaactgttgcagggtgtgaggaccagtgcagcagtgttgggaagagccagagcgtttgtgggcagctctcggacggtggcgattccagttgccgcagggttaggcaaagaacctgaggtcaacccagaactgacatggttagccagctcttgctctgtaaatgacgatggcaatcatctgtatgtgaagaaaaaacaatttgaaggagctgtaactagctgtatctcatcatgctccttacatcttacctgccgtcttgtttgtaactagttgactgtttggtcatgagcagttactgaatcgatgtgtagacagccctgcaaatgctcacgagtcaacgataaacatggtggccttgtgtcttggcaactggtgtttgcagcaggcgggccagcagctgtctgctactaatatggatccgttgattttgttgtattcttctttcgactggaaggtatcataagtcaattaggaggtgattcttatatgtattcgttatgctgcaaaagtgaaggtgacaatatttttggtttattggcaagtacatggaatttacatttttgttgagatggttcgtagat

SEQ ID NO: 142691 - DNA, 1832 bp, Zea Mays
gaattccccaatccccgccttcctcggttccctcaccgcgaaccctaaccctagtccaccccgctcccatggacgaggatgctggcggcgcctcgccgccgccggtgccactggctcacgtgccccctcttcagcaacccaccaccgccgccccctcgcatcgggacatggcggcgtcccccaccagctcgcgctccgtgacggagacggtgaacggctcccaccgcttcgtgatccagggctactcgctcgccaagggcatgggcgtggggaagcacatcgccagcgagaccttctccgtgggcggataccagtgggcggtctacttctaccccgacgggaagaaccccgaggacaactccgtctacgtctccgtcttcatcgccctcgcttccgatggcaccgacgtgcgtgccctcttcgagctcacgctccttgatcagagcggcaagggcaagcacaaggtccactcccactttgaccgctccatggagtccgggccgtacaccctcaagtaccgcggatccatgtggggttacaaacgattctttcggcgaactgcccttgaattatcagactatctcaaagatgattgtctgaaaataaattgcactgtgggagttgtagtgtcaactatcgattactccataccgcactctatccatgttccagactcagacatcggctatgattttggttcactgttggacagtcaggagggtgctgatgtcattcttaatgtgggaggagagaggtttcatgcccataagttagtgttggctgcacggtctcatgtattcggatctcaattttttgatgatgaatctgatggagagaagagtgaggttaatgagactgatgaactaaaagagttttctattgatgatatggagccaaatgttttcaaggcaatgcttcacttcatctatagagatacccttgttgatgatgatgagttgggcgcgtcaagctctgatggttctatctttgatactccggcagctaagttgttggctgcagccgataagtatcacttagcaagactaaagtcgctatgtgaatcttacctgtgcaagggcatatcagtggcctcagttgcgagtacgttagcattggctgataggcaccatgccatggagcttaaagctgtttgcctaaaatttgctgctgaaaatctttcagctgtaatgcggagtgagggtttcatttacctcaaggacaactgcccatctctccagtcagagatactgaaaactgttgcagggtgtgaggaccagtgcagcagtgttgggaagagccagagcgtttgtgggcagctctcggacggtggcgattccagttgccgcagggttaggcaaagaacctgaggtcaacccagaactgacatggttagccagctcttgctctgtaaatgacgatggcaatcatctgtatgtgaagaaaaaacaatttgaaggagctgtaactagctgtatctcatcatgctccttacatcttacctgccgtcttgtttgtaactagttgactgtttggtcatgagcagttactgaatcgatgtgtagacagccctgcaaatgctcacgagtcaacgataaacatggtggccttgtgtcttggcaactggtgtttgcagcaggcgggccagcagctgtctgctactaatatggatccgttgattttgttgtattcttctttcgactggaaggtatcataagtcaattaggaggtgattcttatatgtattcgttatgctgcaaaagtgaaggtgacaatatttttggtttattggcaagtacatggaatttacatttttgttgagatggttcgtagat

SEQ ID NO: 142692 - DNA, 1910 bp, Zea Mays
gaattccccaatccccgccttcctcggttccctcaccgcgaaccctaaccctagtccaccccgctcccatggacgaggatgctggcggcgcctcgccgccgccggtgccactggctcacgtgccccctcttcagcaacccaccaccgccgccccctcgcatcgggacatggcggcgtcccccaccagctcgcgctccgtgacggagacggtgaacggctcccaccgcttcgtgatccagggctactcgctcgccaagggcatgggcgtggggaagcacatcgccagcgagaccttctccgtgggcggataccagtgggcggtctacttctaccccgacgggaagaaccccgaggacaactccgtctacgtctccgtcttcatcgccctcgcttccgatggcaccgacgtgcgtgccctcttcgagctcacgctccttgatcagagcggcaagggcaagcacaaggtccactcccactttgaccgctccatggagtccgggccgtacaccctcaagtaccgcggatccatgtggggttacaaacgattctttcggcgaactgcccttgaattatcagactatctcaaagatgattgtctgaaaataaattgcactgtgggagttgtagtgtcaactatcgattactccataccgcactctatccatgttccagactcagacatcggctatgattttggttcactgttggacagtcaggagggtgctgatgtcattcttaatgtgggaggagagaggtttcatgcccataagttagtgttggctgcacggtctcatgtattcggatctcaattttttgatgatgaatctgatggagagaagagtgaggttaatgagactgatgaactaaaagagttttctattgatgatatggagccaaatgttttcaaggtctgtttctgttcttgtattgctttatccttccaataaacctgtgactagcaagtatttggtgaatatttgttgcaggcaatgcttcacttcatctatagagatacccttgttgatgatgatgagttgggcgcgtcaagctctgatggttctatctttgatactccggcagctaagttgttggctgcagccgataagtatcacttagcaagactaaagtcgctatgtgaatcttacctgtgcaagggcatatcagtggcctcagttgcgagtacgttagcattggctgataggcaccatgccatggagcttaaagctgtttgcctaaaatttgctgctgaaaatctttcagctgtaatgcggagtgagggtttcatttacctcaaggacaactgcccatctctccagtcagagatactgaaaactgttgcagggtgtgaggaccagtgcagcagtgttgggaagagccagagcgtttgtgggcagctctcggacggtggcgattccagttgccgcagggttaggcaaagaacctgaggtcaacccagaactgacatggttagccagctcttgctctgtaaatgacgatggcaatcatctgtatgtgaagaaaaaacaatttgaaggagctgtaactagctgtatctcatcatgctccttacatcttacctgccgtcttgtttgtaactagttgactgtttggtcatgagcagttactgaatcgatgtgtagacagccctgcaaatgctcacgagtcaacgataaacatggtggccttgtgtcttggcaactggtgtttgcagcaggcgggccagcagctgtctgctactaatatggatccgttgattttgttgtattcttctttcgactggaaggtatcataagtcaattaggaggtgattcttatatgtattcgttatgctgcaaaagtgaaggtgacaatatttttggtttattggcaagtacatggaatttacatttttgttgagatggttcgtagat

SEQ ID NO: 142693 - DNA, 3980 bp, Zea Mays
gcgagaaagtgataaggttcgtgggtgcgtcgccactcgccaccctcacgtctcccgagtggactcccgcctccttccttccgtcccttcccggctcaccgcccttcgcctcaccccgcgcctcctccctgtcccccctccagaactgtcccccaccgcctcgagatgctcgcggcccccgccgcgctccacctcctcctcccggcgccgccgctgccgcccccgcactaccaccaccaccacgtcgccttccccgcgccgccgctccacgcctcgctcccgtgctcacgccgcccgcggaggaggccgcccaggcatggggtcgccagggcctccgccgcaatggcggaggaggccagcagctccggaccgaccaagttctccgtgaggatccccgtcggcgaccgcgagatattggtggaaacgggccacattgggaggcaagcgagcgcttctgtaatggtcactgatggcgaaacgattctctactgttctgtctgtctgtcggatactccaaacgacccttctgactttttccctttatcggttcactatcaagagcgcctttcagctgctggaagaactagtggcggtttcttcaaacgagaaggcaagacaaaagaccatgaggttttggtttgcagattgatagacaggcccctacgacctactatgcctaagggtttctactttgaaactcagattctatcctgggtcttcagttatgatggcattcactccccagactgcttggctatcacagctgctggtatagccgtggccctctctgaaattccaaataaacaaacaattgctggagtaagaattggcctaattaacaaccagtttattgttaacccaactactgaacagatggagaattcagagttagatttgatgatggctgggactgatagtgccattttgatgattgagggctactgtgattttctgactgaggagaagctgcttgaagctgtcgaagctgggcaggtggcaattagagaaatctgcaaagcaattgatgttcttgttcagagctgtgggaagaagaaaatggtcgatgctatcagcctaccgccgcctgaactctacaggcatgttgaagatatttctggagatgagttgatgaaggcattacaaataaaaggaaagattcccagaagaaaagctctttcagcattggaagagaaagttataagtatactttctgagcagggctatgtttccaaagatggcttatctggaggcactgaaagtttggctgatattgttgaggatgaggatgaggatgaaattgtagatgacggagaagtagatgaaggcgatgttcacatcaagccggtttcaaggaagccccttcagctatttgcagaagttgatgtgaagctagtcttcaaggaaatttcatctaaatatttacgaaagcgcattgtagagcgaggaaagcgaagtgatggacggagtccttgggaacttcggcccatcaattctcaatgtggcttacttccaagagctcatggtagtgctctgttcacgaggggagaaacacagtcactggctgtggtcactttaggtggctatcagatggcacaacgaattgacaaccttgttgatacggaggactcaaaaagcttctatcttcagtactcatttcctccatcatgtgttggcgaagttggtcgaattggagcacctagccggagagagattggacatgggatgcttgcagaaagggcactggagccaattttacctctggaagaggattttccgtacactattcgtgttgagagtactatcactgaaagtaatggttcatccagcatggcttctgtttgtggaggttgtttagcacttcaagatgctggggttcctataaagtttcctgttgctggaattgcaatgggcctggtccttgatacacaagaatttggtggagatggtagcccacttatactttctgatattactggagctgaagatgcctctggtgacatggatttgaagattgctggtaatgaaagtggcatatctgcatttcagatggacattaaggtagttgggataactctacctgtgatggagaaagcactccttcaagctagggaagggagacaacatattctaaatgaaatgttgaaatcttcacctccaccctcaaaagcactatctccacacgctccattaattcatgttatgaaggtcaaacctaacaaggtgaatttaataattggttctggtggaaagacaataaaaagcataattgaggagactggggtagatgctattgatactggagatgatggcacggtaaaaattactgcaagagacctaacaagcttagagaagtcaaaaattataatagctaatcttaccatggttccaaaagtaggagaaatatacagggactgtgagatcaagtcaatagctccatatggtgcttttgttgaaattgctccagggcgtgagggtttatgtcatatcagtgagttaagttcgggctggttggccaaggctgaggatgcttttaaagttggagatcgcatagacgtcaagcttattgagataaacgataagggtcaacttcggctaagctctcgagctttgcttccagacgtggattccgaatccaacataggttcaacaaaagaaaaggtgccacaaaaagatgatgtcataaaaatgacaacaaaaagaccaaggcgcaagaaacagccagagccgtctggagctgaaaatgccacaacaaaggctcttgcgaaaagcgctgctgctccagctggttcaaagggcagtgaagcgtagtaggatgtggacagcttggtgccttaatcagacgattgactggccaagctagggatacatccttcaaccgactatatgatggtcatatggcatgagaaagagttcagacatgagggcacaactgtctaaacaggaatataatggagaagaattggttgatcgacctcgatgttagacaggtagagtgtctggttgatgcgttacacaaggcgtgcgcctatccagcagtaatggtgcccaggactggatcgtcgccatggttagcggaacagatcccgtaaccaccatggaaacttgattgtaatcgccagaagtgttgtatcgttctgtactaactacatattcttgccaatccggccaatgcaaactactgcatgaagtaattagccaaaaaaaatttggctcagcctgggaataaccggaacatggaacaaataatttgacagtcagaggcaatgcaactcctatctcacatttacaagccaaatccaactcctatcagttaactgtcccgaccggcaatacaaaatctaccaaaagagaaacagaaactaggatctggggtagctttccaccgacacatactagtttccatgctagcaaaatctaccaagaaggctgttctcaacactttaacgctcaagtctgagcagcgagatgtctttgtactctgtcaactgttccacgccaactcgttaccgttgagcagcccgctccccaccaattcattagcgatgagatgctccaggtcatcaaattcatggaagggcttggccttcaaagtcgcggcattgcctccagcaggagcagcagcaacagccagattgctgcttaccgacttgaaattgttacttctggctgtgctgttattgatcacactagtaggcccggtatagatggtggcagcaccatttacggccatgcgctgtccctgatctcctgtaccagcactgttggtgttagcacctcctgatgtgataccactgcttatgttagggatatctagaggtggttgctgtggcagtgtgtgccttttagcgttcttaacttcttgaatcagctgatttaaagcatgctgctgatactgtgggctcacgcccaggccccggtgattgttttgcaaccccaagccctggaggttgttgtgctggggcattgggtgctgaaatgac

SEQ ID NO: 142694 - DNA, 564 bp, Zea Mays
caaaacagcacccacaggggaaaaacaaaacagcaataataataataataataataataacgccagtggcagcggcatcgcgagtcagaagtagctggttaagatctcatctttcgcgtggaaatcaatgggaatccgatcgattttcttcgtcactctcgccattgccatcgctagccacatacaggaacaacaagcaaatgaaacaaaaaaattcgaaaataggagaaatttgcatgcttcgtcaccggcgaatcctgggacaaggcaggacggccggagcttagaaagcaggcgggaagagctaggaaagcgcccaaccctggggttcgttctcgcctaaggatagattgcccgccgcaccggatgcagcgacgggcaactgcaatgttaggcaaaccaaaccgaaccagcacaaacgaaacaagcaacggcgcaggcgaagcaagcgaaggaaagcgaggcgcgagcaggcgacgaacgaacctagtccgacggagagagcgcggcggcggcggcggcggcgtcagtagatgcggagtagtggttaagtgcagtggtctc

SEQ ID NO: 142695 - DNA, 905 bp, Zea Mays
ctggtcactcattcccccggaacagttttatctgatgaacactcattcccccggacagttttatctgatgaacaacggaagtgccggtatccatctccacagaaacaaaagaatgaaagaaagaaatttattgatcattcatttggttacaatcggacacagcgaggccctcagtcgtcggcaagctggccgcagtcctcgatgcgtacgctctcggccgtggcacctgactgagaaccgacagcctccatcttgtccacgacggcgtagccatcgacgaccttgccgaagacgacgtgcttgccgtcaagccagggcgtctgcgcggtgcagatgaagaactgggagccgttggtgtcgggccccgcgttggccatggagagcacgccgggtcccgtgtggcgcagcttgaagttctcgtcggcgaacctggcgccgtagatggactcgccgcccgtgccgttgccccgggtgaagtcgccgccctggcacatgaagcccgggatgacgcggtggaaggccgagcccttgtagtgcagcggcttccccgcggagcccaggcccttctcgcccgtgcacaggcagcggaagttctcggccgtcttgggcaccttgtcggcgaagagctccatcacgacccgcccggccttggacttgccgatgaggatgtcgaagaacaccttggggttcttcgccatgacggatcctctgactgtacggaagataggggagtgtcagtcgtcggaactcggaagcatatatctgtgggggtaggcaaagattgctgttgaaggaaacaagtgtgcagcgtcatcgtacgtatgcatgaccaagagagtcctgacctccacgtaaggtggtaggagatcatgccaatcataagtagagatgacgattgcgattga

SEQ ID NO: 142696 - DNA, 105 bp, Zea Mays
gatgatgagtatgatgtctattcaaattacttcctgtttgtgtttagtcctagactcctagttgcattcttactctccgttatgaggccacacattaactttacc

SEQ ID NO: 142697 - DNA, 663 bp, Zea Mays
cacgtcagatttatgatgatatagaagaaatagaaatagagagaaaatggaatcggactatttactaatagccagctctcaaagcaaggtgctcagtggtagccagcttaaaataaaatgctcacaaactccaagacagattgtaagaggagacaagccaagtattaaatgtacagcttgtgttagtgtatgactagtatgtgacacggcaataatacaaagcccgttataggttatactattaaacttgctcttatagatgatgttataactctataagaggcgttagtgaaagcaacaatagtaggtgcatcaagggcgacgtatgtgatcttataccttgagccattgcatgtatgatctggatgtcatcaacaataataacatatgtcatagacgatgatcttatatctttaacttgagcctcacatttattccaacttcacaccatttgatgaaccaatgcatttatgtgatcatgatctctatctccatcaattatatgtcttattcatcaggggtgtttacttgtttgtaaggggtgcaaatacacccaaaaatacaaaatctatagatttagttaaaattttactatatatgcacccctataaaatttcttatacacccacaacacaaatacacccctcctcaaatgtgctctag

SEQ ID NO: 142698 - DNA, 1330 bp, Zea Mays
aagcttcgtcagaatcctagtgttcctgtcgcacatgttccttgatcaataaatagtacagcgataaattgcagaatggttgtgttccctgcgaaattcctacgtttgtgattgtcgctttgatcaatggtatcttctgtctgagctgaaggctttgatgccaccacgccacgcgcactcagaggacaggacagcacaaggctcaccaagtcgcacgactcacgagacgtcgcggtccccatcggcgcccagtcgtgctctggacgcaacgcagcggccgggcccggcgagacgtggatggcagcaccgtcagtcacgcgcgtggataaacactggacgcgcccgcgcgtgcgagaggcccaagaaacccacagcagccgctagccgtacgatggcggacaccggtgacgtcgccgccgccgccgaggcctcggcgcgaccggcgggcagcagcagcacccagccgctggcggggcgcgtggcgatcgtgacgggcgcgtcgcggggcatcggccgcgccatcgccacgcacctgtcctccctcggcgcgagcctggtgctgggctacgcggcgcgcgccgacgaggcgggcgcgctggcggcgtcgctcccgcgcgcggtggccgtgcgggcggacgtctcggacgaggccggcgcgcggtcgctcttcgacgcggcggacgaggccttcggcggcgcgcacatcctggtggccagcgccggggtgctggacgacacgtaccccgccgtggccggcaccgccaccgaggccttcgaccgcgtgctcgccgtgaacctgcgcggcgcgttcctgtgcctccgggaggcggccaaccgcctccgccgcggcggcggcgggcgcatcgtcgccgtgacgtcgtccgtggtggggagcctcccgccgcggttcggggcctacacggcgtccaaggcggcggtggaggcgctggtgcggaccatggccaaggagctcgggggcacccgcgtcacggccaactgcgtcgcgcccggggccacggccacggacatgttcttcaagggcaagagcgaggccatggtgcgacacgccgtggagacaaacccgatgcagaggctcggcgagcccggtgacatcgcgccggtggtcggcttcctgtgcaccgacgccgccgagtgggtcaacggccaggtcatccgcgccaacggcggctatgtgtgatgtgatctttagctttcacagcttcttggtgtccatcgtcgttttcctttgccacgcactgtttcgccatcttgttatctttacctttaaccttattatcattctagcacaaattcataggaatattttctc

SEQ ID NO: 142699 - DNA, 563 bp, Zea Mays
gaggaggggggtcttggtcatggagatggcctggcaaggtactgcagccacacttcagggaggccatggttcctcttgagcgttctgaacgcagattttgtcaagggcacagccatgatatcgtactccttgggcgcctgcagtgcgatgcagtcagcaacagccgcaatcacaggcaaccttgttgcagcaagcaatcaatcaggatccaaaccgcctaccaaattctcccattcccatttaccgccacgcgagatcggaataacatggtcaattgtcaagtcgtcaccacaagaacaatatctgcaggtgaagtcatccctgtaaagaatgtttttacggctaaggctctgcttgacccttcttctctttactacctgcagcaactgtggaacctgaacagcagcagaggaggagaagatgatggcacctcaatactgtcacaactctcaacaaagagaaaaatccagtatatatatgtcacatatatgtaccctcaaaactgcagggatgtagaaggacccgctaggcgaagagacggtctggtcgtagtactccaacac

SEQ ID NO: 142700 - DNA, 2513 bp, Zea Mays
ctccctttctgctgcccagccgccgtccgtccgcgcttcactatccttcattccctcccctgtcagcgacgactgggtaggctaccgccgccgccctacgctaggtgcccatctcttcgccggcgaagagcgcccaccaagctccggccaagggcgtgatggcggctgtaggcagcttgaagccggggatggagactcttcatgtgcaggactacaaggacgcgcctccggccaaggccgcggtagagagcctccagccggcgatggagagtctgcatgtgcaggattacaaggacgcgcctccggccaagggcgtggccgccgccgccgtagggagcttgcagccgggggcggagaacctgcaggtgcaggactacaaggacggtaacatgtattatggtgcttacccggcttatgcctatggagcctatggtggctggggggagtacccatacctgagccatgatggagcacagacaccaactgctggtacctatgctgacatgtactatggctatgctccatatggtgttgcaaccatggggcatgatggtcagatttatgggtctcagaattaccagtacccgtcgacatacaccaagcaacagaactctactgccaagctgtcatccaatggtataagtgagaaattgactccagcgccgcaaacggatgtatctactattggtgtggatgaggtgaaaggtttgaaaaattcaaattcggtgctgaagacagaccggaacatgccaggttccaatggttcatatggccggtctagtgtgcgttctggcagctatcagaaccagactagttggtcacactatccatattatagtagtgagatgttctctgacaagcagcaaaagttcaccggcaaccacaattcgacttccaaccctaaaaccaaggggcagtcgaggaatcaaaacacgaggcagtatcctcatctcatgggtttgcaaacaccaacttcatcagtgtactcagctaatggaatttatgggtatgatgggagctatggacccggcctttggtatggatcgcacatgtataattctggattatatggtggatggaattcactgtatgatggaaagtacagaaccagaggaagaggtaacaatgggtattatgtttatggtaatggaagcatagatggctttaatgagctgaaaagagggccaagaagtggtatgtacaaaaaccagctggggcttgaagctactacccaagcaccagcaaaagagcaggatcttttgtttgctaatggttcacatcctgccatgaaggatcagtataatcaggctgactttgcggaaacatactcagacgctaaattcttcattattaaatcttacagtgaagatgatgttcacaagagcgttaagtacaatgtgtgggctagcactcccaatggtaataagaaacttgatgctgcctatcaagaggctaaagaaaaatcaagcgaaactcctgtttttcttcttttctctgtgaatgcaagtggccagtttgtcggccttgctgaaatggtgggtcgtgttgattttgaaaaaacagtagagcattggcaacaggacaaatggactggttgtttccctgtcaagtggcacattgtgaaggatgttccaaacagcttgctgaagcacatcattcttgagaacaatgaaaacaagccagtgacgaacagcagagatacacatgaggtgaagcttgagcaaggccttcaagtgcttaagattttcaaggatcatgtctgcaagacatccatactggatgacttcggcttttatgataatcgtgagaagatgatgcaagagaggaaagccaaacagcagcagtcgctgaaaaaggtcattgatgtgaagctgcccagcgtcaccgacatggagagaagtcctaaaggggagactggatcaacagaactcactggggttgggactgacgtcttgaacaaagagcgtttattaggcaaagcaggagagaaaaatggcgagaaaggaaatgatgtcgccccacaggacctgaaaacacaaactgagaagttggcgggtctaaatggctgttaatatttttcgttagctcaagccgttgacagtggtgtcggggtggaacctaaggctgtggtgggttgtttgaggaaattctgatgtcccattgagcttgtttcctatagttcataggagctagaggcttagctagttgcttgtgtttggtggtagtcatggtctgtgttctggcgtgtcaggtattttaggaatagaaggatgattaactgggttttgcaatgatggatcatgggttttgaggctgtatttttcgtttatttgcctttcctctctggattctagttcctctctctctctctctctagattctggacaagtgtagtgcttattttaagttggttggtttaagaacctgaaatgaacatgggaattctatcaagcatttacaaacttactttcctctgtacaatatgtgaaaaccgtctacttccatactttctg

SEQ ID NO: 142701 - DNA, 143 bp, Zea Mays
cgatatcatttttttgggagtggggatccggtcatttatttatccaaacgttgtgctaggagaagtttctttgattttccaaaagttattttggtttgcattgctgcttgtctctctaacacggtatgcctctcgtcaaaagt

SEQ ID NO: 142702 - DNA, 394 bp, Zea Mays
gtcggagtcatgatctctagcagggtagcggatctgctggtacgtaagggcttttcactgggctttgcgcgtaaaaacgccgattatctgcggcttgaaaatatccacctgcattatgggcgctaactacactaacgatccgatgatgattatgtgcctgatggcgctggcattcttcggtaacggttttgcttcgattacctggtcgctggtttcttctctggcaccgatgcgcctgattggtttaaccggcggcgtgtttaacttcgccggtggtctgggcggcatcaccgttccgctggtggtggggtacctggcgcagggttacggtttcgcacctgcactggtttatatctccgccgtcgcgttgatcggcccgctttttcaaatcttg

SEQ ID NO: 142703 - DNA, 191 bp, Zea Mays
gactaaaattctgtggtgtagtgctaaacgggctatatgggctaaacgggctaaacgggccggcacgacacgactaagcaggcttagtgccgtgcttgggcctggccttaggcactagtgccgtgccggcacgacacgactattaaacgggccaaacgggccgtgccctaaccatgtcgtgcctggccgtg

SEQ ID NO: 142704 - DNA, 1851 bp, Zea Mays
gcgatttgcgaccgaccgaccaacccagcgtagggctcgctgccccaagtgacatgtgggtcccagcggtcagcgaaacagccccatcccaagtgtcgtccatctagagactatccgtgaaactgccactctgccaggcgggcgggttgtgcggtcaacagagagagcagcactgtctccgtctctactcgtcaggcatcaccgttcatcatcaccgccttctcccgaggctttcgagatggcggcggcggaagcttcgaggacttcggaggcccgccgtgacgccgtgttcgggcggtgggtcgtcttctctccggcgcgctcgcgccgccccaccgacctcaagtcccacaaccccaccaaccctagcccgggcccgggggccgacgcgccgcccaagccgtcctgccccttctgcgccggccgcgagtccgagtgcgcgccccagatcttccgcgtgccgcccgacggctcgctgccgtggcggatccgcgtcatccagaacctctaccccgcgctgcgccgcgacgtggacccgccgcctgtgccagaggcagagggggatgtctcctcggacgagcctggggagcgcgccgtccccggcttcggcttccacgatgtggtcatcgagacaccgcgccacgacgtgcgcctctgggacctggacgccgagggggtccgcgacgtgctgctcgcctacgcggagcgcgtgcggcagctcggggagcaccccgcggtgcagtatgttcaggtgtttaagaaccatggggcatctgctggagcttcgatggcacattcacacagccaaatgttgggaactccctttgtccctccctctgttacaactcggcttaactgcatgaaggagatttttgacagatcagggaactgcagcctttgtgagattaggcccaaagatatcctgatcagtgaaacacctaatttttctgccattgttccttttgcagcatcatatccatttgagatatggattattcctcgacaacatatttcttattttcatgaaatagatcaagataaggcactggaccttgggtctctgttaaagactatgctgcaaaagttgtctaagcagcttaatgacccaccattcaattttatggtccacagcgcaccatttaagatttcatcatcctgcctgccttatacacactggttcctccagattgtgccccagttaagtgtagtaggcggatttgagcttggaagtgggtgctacatcaacccagttttccctgaggatgccgcaaagattctcagggaacttgactgctcagtctagtggtggtcgacgtctaaccttttaactagataggaacgagggatgtgttcctctgtacttttctgggaagcaaaaataccatgctaataatacaagcagacagctaacttgattatgtaacatcaggccctgctttggcgagggtgatctgctggggtatctttcttgcccttgcttcaaacaggaagcatgccaagttgggctttctttcttggccctgagattgatgttgcctgtctgtacagttgtttgatatctttttatctgatgatttggtttatgatatgatctaaatgttttctggttgttaacgtaaattggttacgtgcaatatatattagtattaactcctgatgtactcgtcgttggatgattgcctggaaatacttgcaagtacatagattcatgccgattgatgcacaaaatacaaagtttgagttctttgaagtccgcctgccagattttgagtaaaaaatggtgaaccaggaagaattgatgcgttttcttttcttgacaagtcattaaactgtttgaacctgaaaaaagaa

SEQ ID NO: 142705 - DNA, 1022 bp, Zea Mays
atccgacggccacgagactcccatcgttcggatataagtgcccctccaaccgaaaacctgtccttctccgcgcactccaccccactcgccgccgccgctgccaccgccgcttgctgccgcagccgccatgggggcgtacaagtacgtgtcggaactatggaggaggaagcagtcggacgtgatgcgcttcgtgcagcgcgtgcgctgctgggagtacaggcagcagccgtccatcgtccgcctcaccaggcccacccgccccgacaaggcccgtcgtctcggctacaaggccaagcagggatatgttgtctaccgtgtccgtgtgaagcgtggtggcaggaagaggcctgtgcccaagggtattgtctatggcaagcccaagcaccagggtatcacccagctcaagttccagaggaacaagaggtctgtcgctgaggagagagctggacgtaagcttggtggactgagggttcttaactcctactgggtgaatgaggatagtacctacaagtacttcgagatcatccttgtggacgttgcccacaaagccatcaaaaccgacccgaggatcaactggctatgcaaccctgtgcacaagcaccgcgagctccgtggcctcacctcagcaggcaagaagtaccgtggcctgcggggcaagggccacactcaccacaagaacaggccctcaaggagagccacctggaagcgcaaccagaccctctccctccgtcgctaccgctgagcagctcgtcgggtgcttggatactgccactgtccgaccattcccaatcaagacaacaagggtgcctgtctctggttgcattttcaaagttttgctatttgtgttcttggcacttttaatgttagaagtcaattatggagcatatgtcatgaactatttgcaattccgctgtattatcagacaacgaatggttagtgatcaaatgctgcctgctgctgtggactaaatgattggttttgccttgctgtattgcatcccgtgatgatggtgcatccagaat

SEQ ID NO: 142706 - DNA, 683 bp, Zea Mays
ctaattgttgagttggccttttttgtttcagcttccatatgaagtcatgacacctcttcaagcagcagttgccggtgttcaaaaggtatcgtagtttaacacacaagctattgtggtttgtcaaaaaaagaatagtagcacatcttgctgttatcataccacttttatttgctgaaaggaaaatgttccaaatagaaggtgaatgttgagttgtaactcatttgtattttttcagtgtttggtggggaagtaaaatattcttctgaaagtgttgtggagttcctgtttcgaatcctagtttggtagatacgatacctctgcatgtaggatctcagacttactattgccgctaatacacatcctatgctcgctgaactactacagagatgatggcagaaagatcctactctaagaccaacctttgcacagattgtggatacaccgaactctataaacgaggatggcaccatagcgctgatggagttggacgatgtcatcaggctcgactgggtgtggatgggatgaactctgctcgtgttgaaggagagagagagatcgtgcttggcttgcgtgagaccatattccggttcatattttttcatgggtcatgttaattattatgtcatattacacaacttcagatatttatgtctttgtgagagaagtaacaaaatagtttcact

SEQ ID NO: 142707 - DNA, 2410 bp, Zea Mays
acacccccctcgcctcgctttccccctcctctcattccattccacccacgccgcctgcctgccccctcgcctcgggggcgaaccacgagaaggggattccggctagggtttcgcggatcgagaagagtcagggaagaagcggggggagagaagagggcggcacctagggtttccgcgggcggcccccccgcatggcctcgccagctgcagcggcggcggcggcgccaccgccggccgccaaggagaaggagaaggacgcggaggaggcaccggtcacgggggacatggtcagcgccggcttcgcagagctcgagcgccagcagcagctgctggccacctgcacgcgcctctaccagcagctgtccgaccacttcggctcgctcgagcgggggctcgcggcgcgctccgacgcgctccgcgtccgccgcagggccttcgacgcgcgcacccaccgcgcgctcgactcgctccaccgccgggaggcctccatcgacgcctccgtctcgcgcgcgctcgaccacctccactccatctccgcctccgcctccgccgccgccgccgcttcctccaaggcccccgccacctccgactccgactccgagggcctcgccgagagcctgcgcgcgctgtgcgcgcggatggactccgccgcgttcctgggcttcgtggtggcccgccgcaaggaggcggacgcgctgcgggccgagatgccgccggcgctcaagctctgcgtggatccggccaagttcgtcatggacgccgtcgccgacgtcttccccgtcgaccgccgcgaggtccggaaccccgccgacctggcctgggcctgcgtgctcatcctcgaggccgccgtgcccgcgctcgccgacacggacccggacatcggccccgcgcgcccgctcgtgccgcgggccgcgcgcgaccgcgcgcggggcatggccagggactggaaggaggccgccgagaagaaggggggcgtcgagggcgccaagccgcccgacgcgcacgccttcctgcagctcgtcgccacgtttgccgtcgccgagagggaggacaggccgctgtaccgcaggattgtcgtcagcttctcctggcgccgccagatgccacgcctcgcgctcaccctcggactcgaggaacaaatggccgatatcattgaggaactaattgctaagaggcagcagcttgatgctgtaaatttcgcttatgaggctgggcttcaggagaagttcccaccagttcctcttttgaagtcctacctggaagactctaagaagacatcaaccgctgcttcagataattcaagcactagcagcggccaatcagggagcaatgtgaacaagaaagaacagtctgcactgcgagctgtcatcaagtgtgttgaggatcgtaaactagaagctgagtttccactggagggtcttcggaagcaacttgaagaactagagaaagccaagaccgagaagaagaaggcagcatcaagcgctaccagtggcggcagcggcggccctgcaaccaagcgcatccgtgcgagcactggaggcccaatgcctcctgccaaggcaggtcgtctcactaacaatgcttgcgtgtcttctctcccagctcccaccacattgacccagtctccctcccacgcgtcatacgccaacacctccccgtcccgcacctcatacgccaatacctccccatcccacgcctcatacgccacagtctccccaacccatgcatcatacgccacaccctcccctccccatgcatcatacgccacagcctccccttacccttacgacaggccggttggacacggcgtgtactgcacccggagcccgccggtgatcagggagccatatgtttacccagctgaggaggtagccaccgtcaacgtcggcattcccatggcctactccaccccgcccatgagctaccctgctgccccctacggcggctatggcaacgggatgccagcttacaccaatggaatggctcctgccttccaccaggcttactaccggtaggttcagtcaggaaacgaagaagtcgctgatgaatgacatgacaacaactgatgatgccaacgactcgaaaccccgctcaatggccctgttttgtagcgactgactacaacggtaggttgggtaccccatcttccatgtccttaccaccgctactactagatgtgttgtctttagctcctcgtctcatcttagtccgctaccgtaattttttttactactactaaggaacctggatgtaaattatgtatggtatcagcgagactgtcgtcgcagccttatgtaattctgttcagaacttttgaaaaacgaaaaaaaaagaagaaaccagcatgtaatcctgaagtaccggtctaccggatgtaccgtggacttaattagaagtgtttttttttata

SEQ ID NO: 142708 - DNA, 2643 bp, Zea Mays
acacccccctcgcctcgctttccccctcctctcattccattccacccacgccgcctgcctgccccctcgcctcgggggcgaaccacgagaaggggattccggctagggtttcgcggatcgagaagagtcagggaagaagcggggggagagaagagggcggcacctagggtttccgcgggcggcccccccgcatggcctcgccagctgcagcggcggcggcggcgccaccgccggccgccaaggagaaggagaaggacgcggaggaggcaccggtcacgggggacatggtcagcgccggcttcgcagagctcgagcgccagcagcagctgctggccacctgcacgcgcctctaccagcagctgtccgaccacttcggctcgctcgagcgggggctcgcggcgcgctccgacgcgctccgcgtccgccgcagggccttcgacgcgcgcacccaccgcgcgctcgactcgctccaccgccgggaggcctccatcgacgcctccgtctcgcgcgcgctcgaccacctccactccatctccgcctccgcctccgccgccgccgccgcttcctccaaggcccccgccacctccgactccgactccgagggcctcgccgagagcctgcgcgcgctgtgcgcgcggatggactccgccgcgttcctgggcttcgtggtggcccgccgcaaggaggcggacgcgctgcgggccgagatgccgccggcgctcaagctctgcgtggatccggccaagttcgtcatggacgccgtcgccgacgtcttccccgtcgaccgccgcgaggtccggaaccccgccgacctggcctgggcctgcgtgctcatcctcgaggccgccgtgcccgcgctcgccgacacggacccggacatcggccccgcgcgcccgctcgtgccgcgggccgcgcgcgaccgcgcgcggggcatggccagggactggaaggaggccgccgagaagaaggggggcgtcgagggcgccaagccgcccgacgcgcacgccttcctgcagctcgtcgccacgtttgccgtcgccgagagggaggacaggccgctgtaccgcaggattgtcgtcagcttctcctggcgccgccagatgccacgcctcgcgctcaccctcggactcgaggaacaaatggccgatatcattgaggaactaattgctaagaggcagcagcttgatgctgtaaatttcgcttatgaggctgggcttcaggagaagttcccaccagttcctcttttgaagtcctacctggaagactctaagaagacatcaaccgctgcttcagataattcaagcactagcagcggccaatcaggggttcgtataatataacagcaattctaaagtatctcttgaatctgttcaacatagaaaaatatctcttgaactcaggattgacttttgagtttaatatatgtgtctagtgctgctattatcctcttttagctacatgtaatgtcagttatgtatcatctcccttgttgggctggttccattttaatgtctctttgtttgtatcttatgggttctgatgttttattatactgcagagcaatgtgaacaagaaagaacagtctgcactgcgagctgtcatcaagtgtgttgaggatcgtaaactagaagctgagtttccactggagggtcttcggaagcaacttgaagaactagagaaagccaagaccgagaagaagaaggcagcatcaagcgctaccagtggcggcagcggcggccctgcaaccaagcgcatccgtgcgagcactggaggcccaatgcctcctgccaaggcaggtcgtctcactaacaatgcttgcgtgtcttctctcccagctcccaccacattgacccagtctccctcccacgcgtcatacgccaacacctccccgtcccgcacctcatacgccaatacctccccatcccacgcctcatacgccacagtctccccaacccatgcatcatacgccacaccctcccctccccatgcatcatacgccacagcctccccttacccttacgacaggccggttggacacggcgtgtactgcacccggagcccgccggtgatcagggagccatatgtttacccagctgaggaggtagccaccgtcaacgtcggcattcccatggcctactccaccccgcccatgagctaccctgctgccccctacggcggctatggcaacgggatgccagcttacaccaatggaatggctcctgccttccaccaggcttactaccggtaggttcagtcaggaaacgaagaagtcgctgatgaatgacatgacaacaactgatgatgccaacgactcgaaaccccgctcaatggccctgttttgtagcgactgactacaacggtaggttgggtaccccatcttccatgtccttaccaccgctactactagatgtgttgtctttagctcctcgtctcatcttagtccgctaccgtaattttttttactactactaaggaacctggatgtaaattatgtatggtatcagcgagactgtcgtcgcagccttatgtaattctgttcagaacttttgaaaaacgaaaaaaaaagaagaaaccagcatgtaatcctgaagtaccggtctaccggatgtaccgtggacttaattagaagtgtttttttttata

SEQ ID NO: 142709 - DNA, 335 bp, Zea Mays
aaaacacccttgactagtttgattataatagtttttccatttaaaggtggttcagttatttgctttccatttcatgctatatggttctgtctagtgtttacacagtcatcgtagacagagctccatgtcttgtgaatgagccaatttctccttatttcttttttgactttgcttctcagcaaagttcacctagtggcttcgcttgatctctgaggggaagagcgaagagtcttcatcagggagacagatacctagtggcttcgcttgatctccgagggggatagtcttcatcacggaggcttcattggtcttgaggcttcatctatcctttagtg

SEQ ID NO: 142710 - DNA, 141 bp, Zea Mays
tttcttcttcttttttctgtcttgatctattttctttttttttttttttttggcagcttgtactgggtctattttagacctctatctcctttttcttaatatataagatgcgcagttctcctgcgcgttcgataaaaaaaa

SEQ ID NO: 142711 - DNA, 1923 bp, Zea Mays
ggggtacacggctatacatttgccaataagatcaatgacaagtggacctacataattcatggtcccacctgcaattaaaggcatggtggtaagatttagttagaagaaaaaaaaaatccgtcattcaccatggcaggtaatctggaggggaggagcatgataaaaggaggggcagaaggggagacgaacgcagactgcagcaggagcggagcgggcggagaggttccgggttttcggggtggggtttgggagatgcctcccgtgaagaagtccaagaaggggaagcggaaatccaaggatggcaagctcaagattgtcagggcgcggggcgcgccgccggcgctgccgccggagctccgcgccctcgacaccgagtggtggtacgctttcctgaacaagcaagtcgagctagagcatgctgtgcctccagatgagggggaagcattcaggcacttcttcaggacttcaaggaagacttttgactacatctgctccattgttagggaagatctgatctcaaggccaccgtctggactgatcaacattgaggggaggctgctcagtgtggagaagcaagtggcaattgccatgaggaggcttgcgtccggtgattcccaggtgtcagtagggactgcttttggtgtgggccagtctactgtttcacaagtgacatggagatttatcgagtcgatggaagatagggctaggtatcatctggcatggccaagccaagagagacttgagcagatcaaagctgtgctggaggatgcttatggccttccgaattgttgtggtggtgttgatgccacccacgtaatcatgacgcttcctgctgtcgagtcatctgcagattggtgtgatcatgcaaagaactacagtatgttcctgcaagggattgttgatgatcagatgaggtttattgatattgttactggttggcctggcagcatgacattctcacgcctgatgaaatgctctgggtttttcaagctctgtgaagctggggaacgtttgaatggctctgtcaaagtttcagcagagggtgcagagatcagggaatacattgctggtgactcatgttatcctctactcccatggcttatgactccattcgaaggaaaacatctgcctgccccattgcaaaactttaatgcccgccaaaaagctgcaaggctgcttggaacaaatgccttggcgcggctgaagggatcctggaggatcttacacaaagtcatgtggaggcctgacaagaacaagttgccaagtataattcttgtttgctgtctgcttcacaatatactcatagactgccatgatgaattgcttccgagtgttcaacttcccgaacatcatgatactggctataatcgagaaaactgcgagcaggtggatcctaatggcaaagtgatgagagaaaacattacagcacatctccaacactgtgaagcttccaagtttctctgcaactgagctaagttagcttgttgttttgctgggattttgatgatgcatcattattccttttaccttatgcaatttcccttagtttctgttattgtagtgagactttctgattgcaattcagtaaagattctctagaaatggcatggttcagtactatagaaaatagctagttggaaaattacaaggactagccctcatgcttgggtttatgttcttcaggataatgccagtcctcatcatgctgagtgccatgaagttgcataatgtaacaaaattcatgaatgatctggtaactggtatcttattttttgaatgatttgatatcttaagttaggttggtttataaggtcccagtttatatgatgagacctttattgttggagagggcttgaacttgattgcatgaattccataccatgataaatgtgcaacaggcaggtccagaattttgtggcgtta

SEQ ID NO: 142712 - DNA, 680 bp, Zea Mays
ggaccgtagatattgtctgttcagtttcctggacgaaatgggctcgaggcgacagcgagttctgcatcgaccaacggaaggcgctgtttggcggcgaacgggctggcggcgagcgggcggtgacaaactgaactctccgtcctgaatcttggcacacccgcgctatatgtgaagcgacgaaccattccgttcttcatctcgtttgaagaaattttgatccgtgctgggaccaatgctatcgggttcagggtgatttgtccctgtgtcttttttggtgattcatctctctaagttttagagctaaggctccaaacaaatgatttacatgttacctttaaacattaagcccaccttaaattaaagttttagagcttttaaagcgagctaaagtgcactaaagcttttagaactctaaaacttagtcctgaggctctaaatttgtcgttaggacatgtataaccttatttaatatgaagtcttttgagcagtctctaaatgactaagtgtaaaaaaatataagagacaaactcttcacgaagaacctgtctcttcacgactttctatacacgttgtcttttaggtgcatttatgatccagagtctcagtgttgtaccacatagtctcttatccgtatcttgtacttaaaaaaacgaactggattctcagggttgtacatgccc

SEQ ID NO: 142713 - DNA, 750 bp, Zea Mays
atgctgaagaaagcgtcagcaggaagagctgcggccgcgacggggcgcggcgatcccgcagcgcccgcctcgcgtcccagtcccacagccaaggtcgccgagggcggcgcctgcagcgccaggccggcctctcggctcctctccacgaggtcagtcccgagcctcttcgcggagtccccgatgacgacgagccccgccgcctccgcgcccgagctgctgtccagggccccgctccgctccggcggtagcccgggcgcggcgggcctggcgggcgtgctggtggcggaggaggccgacgagcgggggtccttgttgaggaacgggcgcagggtgctccgcgggacgcggctccgggtgcagctgccgccgccgccgccgatcgagttcggcgtgaagaacagggaggcccagctggcgctgctctcccccgtgcagcggtcgccggcgcggctggcaaggcggaggagcgaggtggaggaggagctggccggcgaggactacacctgcgtcatcgcccgcgggcccaaccccaggatgacgcacatattcgaggaccgcgtcgtcgagagctcgacctcgacctcgagctcgacctcttgcgatgggtgcaacaaggatgctgctctcttgctggtgctggaaagtcagtgcaccaagagcgtttcagtgtcccgttcgatccgggatagtcatgagcattgggggatcatcatcgtcgttagtggcttccttgtgactgatgacgactag

SEQ ID NO: 142714 - DNA, 494 bp, Zea Mays
tagatgccttttgccttctggttcttgatccggaaaaggtttggcgtgtaaatgataaagacaaggttcaactctcaccctctgaccaatccaaattttacactggcgattgctacatatttcagtatacttatcctggagatataaggaggaatgtcttattggaacctggtttgggaaaaagagtattgaggaggataggctaatagcagtttcacttgcaagcaagatggttgaatctgctaagtttcaggctgtccaggcgcacttttatgaggggaaagaaccgattcagttctttgtgattatcaatcagtgcgggagtgatgtcgttgtggtgcttttgaacctattattagaatgcatcagtcaaacttgccttcagtctagtggcgttgtactcccatttcaacaaactgtaaatgatctagttgtgaatgatattataattgtgatgcttttgtgaatatataattgtggtgcttttgtgttta

SEQ ID NO: 142715 - DNA, 1316 bp, Zea Mays
gcgagaacctaacatctgccaacaatccaacatctcgcagtcgcgttcgctgctcctcggtcctcagccctcacacgccgcccgcccgcgacgaagcccgcatagccgccgccgagcgccggagttgccacctaccgcgcgcccatctgccgccgatgctgcgcactcatctgctacccgaggcttggcggcggccactgccccaggaggcaggagcgcgacaccaaagtccgcgcatttccttccaccgagccgcaccaagatccgggatccaaggtggccaagttcgttgcggcggccctgaacttcgatggctgtcctcgtcacggaattcgtcctcagattcacagccatggactacaatgtgcgtgaatgcagactataccactcctgctgattctgtcgccacctcggagcaagcaggtggtgaagctgaggccaccttagaaacaggtggtgaagctgcagccaccttggagcaaacaggtggcgaaaccgaagagccaacaattgtagcacctgctaatgaatatacagagcaggaggctgctcctcagcagaagtgtgcaaagatacacgacttttgcctagggataccttttggtggacttttactctccatgggccttattggatttctcttctggaggagccctgcgagtcttacctttggcgttgcacctggccttgccatattggccctggctgtacttagcctcaatgtctggaggagcgggaagtccagcttaccgttcatactggcgcaagcaggcattgccgctgccgtagcatggaagcacggccaggcgtacaccactacgaggaagctgcttccgtggggattctacgtcgcgctgagtgccgcaatgatctgcttctactcctacgttcttcttgccggagggaatccgcctcctaagaaggcgaaggcgaaggcgaaggctgctgcttgatttgatgttgaaggcattcaccggagcgtctcataattgcactaccttcctctggtaaatagggttgtggtatggcctctgtttacttagtaaaagactgaggagataagactgtcccccctatgctgcataactgttgttgtttcctttaaatatacatcaataagggctgggttggttccattccatcccactacccatctcatttatggtggtaaatagggttgccctttttttggctttggtttgaagtgtttgacgagattttgtaaatttcctttttagagagaagcacattctgccacaagaggctcaacatgctattgcaattcgatatgggctgctatgattttccttgtgggt

SEQ ID NO: 142716 - DNA, 1443 bp, Zea Mays
cgagaacctaacatctgccaacaatccaacatctcgcagtcgcgttcgctgctcctcggtcctcagccctcacacgccgcccgcccgcgacgaagcccgcatagccgccgccgagcgccggagttgccacctaccgcgcgcccatctgccgccgatgctgcgcactcatctgctacccgaggcttggcggcggccactgccccaggaggcaggagcgcgacaccaaagtccgcgcatttccttccaccgagccgcaccaagatccgggatccaaggtggccaagttcgttgcggcggccctgaacttcgatggctgtcctcgtcacggaattcgtcctcagattcacagccatggactacaatgtgcgtgaatgcagactataccactcctgctgattctgtcgccacctcggagcaagcaggtggtgaagctgaggccaccttagaaacaggtggtgaagctgcagccaccttggagcaaacaggtggcgaaaccgaagagccaacaattgtagcacctgctaatgaatatacagagcaggaggctgctcctcagcagaagtgtgcaaagatacacgacttttgcctagggataccttttggtggacttttactctccatgggccttattggatttctcttctggaggagccctgcgagtcttacctttggcgttgcacctggccttgccatattggccctggctgtacttagcctcaatgtctggaggagcgggaagtccagcttaccgttcatactggcgcaagcaggcattgccgctgccgtagcatggaagcacggccaggcgtacaccactacgaggaagctgcttccgtggggattctacgtcgcgctgaggtgctcctttatttcctgtattttttttctcttttggaaaatccactactataatctttgtcaaagttatatatgttaatatctcgtttctcatatcatgcttcactgcgcttctgtcaatctcttaatcctatcagtgccgcaatgatctgcttctactcctacgttcttcttgccggagggaatccgcctcctaagaaggcgaaggcgaaggcgaaggctgctgcttgatttgatgttgaaggcattcaccggagcgtctcataattgcactaccttcctctggtaaatagggttgtggtatggcctctgtttacttagtaaaagactgaggagataagactgtcccccctatgctgcataactgttgttgtttcctttaaatatacatcaataagggctgggttggttccattccatcccactacccatctcatttatggtggtaaatagggttgccctttttttggctttggtttgaagtgtttgacgagattttgtaaatttcctttttagagagaagcacattctgccacaagaggctcaacatgctattgcaattcgatatgggctgctatgattttc

SEQ ID NO: 142717 - DNA, 1475 bp, Zea Mays
tcgcgttcgctgctcctcggtcctcagccctcacacgccgcccgcccgcgacgaagcccgcatagccgccgccgagcgccggagttgccacctaccgcgcgcccatctgccgccgatgctgcgcactcatctgctacccgaggcttggcggcggccactgccccaggaggcaggagcgcgacaccaaagtccgcgcatttccttccaccgagccgcaccaagatccgggatccaaggtggccaagttcgttgcggcggccctgaacttcgatggctgtcctcgtcacggaattcgtcctcagattcacagccatggactacaatgtgcgtgaatgcagactataccactcctgctgattctgtcgccacctcggagcaagcaggtggtgaagctgaggccaccttagaaacaggtggtgaagctgcagccaccttggagcaaacaggtggcgaaaccgaagagccaacaattgtagcacctgctaatgaatatacagagcaggaggctgctcctcagcagaagtgtgcaaagatacacgacttttgcctagggataccttttggtggacttttactctccatgggccttattggatttctcttctggaggagccctgcgagtcttacctttggcgttgcacctggccttgccatattggccctggctgtacttagcctcaatgtctggaggagcgggaagtccagcttaccgttcatactggcgcaagcaggtagttttgttttctgcaacataccgtcttggcaggttttgttggagcagggctgggagtttggatgcaggctgatattctctggatctcattaaagtgcattctgaacaggcaaactatagtgtctgtaaatgtttggccctgttaaccagctgtcgtaagctgaactgaaattctgcacatggatggaacctatgataattaatatgctatgctacgctcgttatttgcaggcattgccgctgccgtagcatggaagcacggccaggcgtacaccactacgaggaagctgcttccgtggggattctacgtcgcgctgagtgccgcaatgatctgcttctactcctacgttcttcttgccggagggaatccgcctcctaagaaggcgaaggcgaaggcgaaggctgctgcttgatttgatgttgaaggcattcaccggagcgtctcataattgcactaccttcctctggtaaatagggttgtggtatggcctctgtttacttagtaaaagactgaggagataagactgtcccccctatgctgcataactgttgttgtttcctttaaatatacatcaataagggctgggttggttccattccatcccactacccatctcatttatggtggtaaatagggttgccctttttttggctttggtttgaagtgtttgacgagattttgtaaatttcctttttagagagaagcacattctgccacaagaggctcaacatgctattgcaa

SEQ ID NO: 142718 - DNA, 3063 bp, Zea Mays
ctcttccctccctgggggtttgggcgacaaggccgagagagagagaaaaaaaaaaggtggaggagagacaaggccaaagcaaagcagccagcgcgagcaggggaggtagagagagagagaaaaaaaagagcagcgccacgaacagaacaacaagcctcgcctcactttctctctcctccaccatccctttttttctctctctctactctctccccttgtcgtcctccggccctctccgcattcctctccccctgccacctcgtgtcctactactccaactcctagcacccccaccccacctccccctgtattctctctagtagtagcaactagcaagtgctacggggctacagcctacaagtagtaggccttggtacccagccgacgaatcccggctcccgcgtcgtcctagaggccggctaaagctggcgaggagggtggcggcgcggcggcagctgcactgccggcaggagagagcttctcggcctgcgccgtttgctgctccccactggtcgttggagggctggcggttccgccctctggaaaaaaaaaaaaaatccaatcttggctcggctcggctcgtggcggccggctgcctgatcgggcctcgccccgtggctagttcgatctgagattcgaagaccacccccgggtgaaaacctctccgcctctgaggagtggatcctggattcgagtcttcccgctgcagggagatcgcggcttgaggaggtacggtggtggtggtggcggcgcggcgacagatccccctatgcgccgcctgccgtgccgtgtgctgagcgcggagcaggagctatgagacaatgacggaagaaagcgccaagaagagcaagctttcgtggtccaagtccctcgtcaggaagtggctcaacatccggcccagggcgcaggacttccatgccgatttcgacgccggccaccaggcaagggacggcggcggcggcggcggtggatcatggaggcccagctgttcctcgagcgaagcgagcgcaagcactgccaagaaaagcagagctgaccggccgtcgtcgaagcggagcgccgaacgcgctcgccgagggaggaataatttcgacctagcacgcctgacagaagtgcaagattacaggatcttcgctgcgacgtggaacgtgggtggcaagtcaccacccagggggctaaatctagatgaatggctccatacttctccttctgccgatatctatgtcttagggtttcaagagattgtccctttgaacgcgggaaacgttcttggcactgaagataaccttccagccaagaagtgggtgtcccttatcaggcggacgctgaacaagaatcctggatctagtggctgtggtggtggctaccatacaccctcaccagtcctggatccggttgtcgagttagacgccgacttcgaggggtctgcgagaaggcaggacaacttctcattcttccaccgtcggtcgttccacaatctcagccgtagcttaagaatggacggggacttgatgttcccgcagccaaggctagatcgcaggttcagcgtctgcgatccagtcaacctaggaggcagaccaagcgattttgatggaagtctgcgttgccccggatcacctgatgaggatacaatcgatatggaaatgggtgacagcgtacaagtttcaccattccctcatagctacagtgcatctgcaccttccgaacagaacgatgaccaatcaaacagctccaggtattgcttagttgccagcaaacaaatggtcggcatatttctcacggtctgggtgcgcaatgaaataagagacgacgtcaggaacttgaaagtctcttgcgtgggtagaggattgatgggttatctcggaaacaagggttcgatttcagtgagcatgtgcctgcaccagacgagcttctgcttcgtatgttgccacctgacctcgggggagaaggaaggcgacgagctgcgcaggaactccgacgtcctggagatcctaaggaagaccaggttcccgcgggtccgcggcgccggtgacgtcaggtcacctgagacgatcctcgagcacgatcgggttatatggcttggggatttgaactaccggatcgccctgtcttactgctcggcgaaggctctcgtggaaatgcatagctggaagcagttattggagaaagaccagctgcggatgcaacagagatacggacgagttttccagggctggaaagaagggaggatctacttccctcccacgtacaaatactctttcaactcagaccggtacgccggcgagggcaggcaccctaaggagaagcggaggacgccagcatggtgcgaccgcatcctctggcacggcaacggcctgagccagctgtgctacgtccgcggcgagtcccgcttctccgaccaccggccggtgtatggcatcttcctggcggaggtcggcgtcgtgcgccagcggaggaggaacaacgccgggtacttcggatctagggtcgaggtggaggagctgttgccgcgctctcggagctatagactgagagatgatgaagttttgctgagctgacttatagcatgatataatagaaggtacccctcccccaacagcacccaagagagaatgtgcagacactaactggatgaaaaaaaaggacgctgggcggtattttttgctcaccaagagcaggcaggcaacagcgggacacgcacgacgagtatgtcgccgctcgtcgtcggagacgtagcagcagcaggcatgccgctgactggctatagagtttacccccagctttagccggcccacacttagttattcctcctcctagcaactgcatttgcttcaattttgttttcctcgtttttttggtaggtggaccttgggagtgtcagcaaacacaacatgttttcttcctcttctttttttgatgattcttttcgtttgtaagaaactttgtaaaaacctgctggtgtctgtgctgtgcttgccatgcaagtcgtggaacctttttaagataagctcagcatggctagagagcagtttggttggttgagggggcaaggcattttcactc

SEQ ID NO: 142719 - DNA, 2783 bp, Zea Mays
ctcttccctccctgggggtttgggcgacaaggccgagagagagagaaaaaaaaaaggtggaggagagacaaggccaaagcaaagcagccagcgcgagcaggggaggtagagagagagagaaaaaaaagagcagcgccacgaacagaacaacaagcctcgcctcactttctctctcctccaccatccctttttttctctctctctactctctccccttgtcgtcctccggccctctccgcattcctctccccctgccacctcgtgtcctactactccaactcctagcacccccaccccacctccccctgtattctctctagtagtagcaactagcaagtgctacggggctacagcctacaagtagtaggccttggtacccagccgacgaatcccggctcccgcgtcgtcctagaggccggctaaagctggcgaggagggtggcggcgcggcggcagctgcactgccggcaggagagagcttctcggcctgcgccgtttgctgctccccactggtcgttggagggctggcggttccgccctctggaaaaaaaaaaaaaatccaatcttggctcggctcggctcgtggcggccggctgcctgatcgggcctcgccccgtggctagttcgatctgagattcgaagaccacccccgggtgaaaacctctccgcctctgaggagtggatcctggattcgagtcttcccgctgcagggagatcgcggcttgaggaggtacggtggtggtggtggcggcgcggcgacagatccccctatgcgccgcctgccgtgccgtgtgctgagcgcggagcaggagctatgagacaatgacggaagaaagcgccaagaagagcaagctttcgtggtccaagtccctcgtcaggaagtggctcaacatccggcccagggcgcaggacttccatgccgatttcgacgccggccaccaggcaagggacggcggcggcggcggcggtggatcatggaggcccagctgttcctcgagcgaagcgagcgcaagcactgccaagaaaagcagagctgaccggccgtcgtcgaagcggagcgccgaacgcgctcgccgagggaggaataatttcgacctagcacgcctgacagaagtgcaagattacaggatcttcgctgcgacgtggaacgtgggtggcaagtcaccacccagggggctaaatctagatgaatggctccatacttctccttctgccgatatctatgtcttagggtttcaagagattgtccctttgaacgcgggaaacgttcttggcactgaagataaccttccagccaagaagtgggtgtcccttatcaggcggacgctgaacaagaatcctggatctagtggctgtggtggtggctaccatacaccctcaccagtcctggatccggttgtcgagttagacgccgacttcgaggggtctgcgagaaggcaggacaacttctcattcttccaccgtcggtcgttccacaatctcagccgtagcttaagaatggacggggacttgatgttcccgcagccaaggctagatcgcaggttcagcgtctgcgatccagtcaacctaggaggcagaccaagcgattttgatggaagtctgcgttgccccggatcacctgatgaggatacaatcgatatggaaatgggtgacagcgtacaagtttcaccattccctcatagctacagtgcatctgcaccttccgaacagaacgatgaccaatcaaacagctccaggtattgcttagttgccagcaaacaaatggtcggcatatttctcacggtctgggtgcgcaatgaaataagagacgacgtcaggaacttgaaagtctcttgcgtgggtagaggattgatgggttatctcggaaacaagggttcgatttcagtgagcatgtgcctgcaccagacgagcttctgcttcgtatgttgccacctgacctcgggggagaaggaaggcgacgagctgcgcaggaactccgacgtcctggagatcctaaggaagaccaggttcccgcgggtccgcggcgccggtgacgtcaggtcacctgagacgatcctcgagcacgatcgggttatatggcttggggatttgaactaccggatcgccctgtcttactgctcggcgaaggctctcgtggaaatgcatagctggaagcagttattggagaaagaccagctgcggatgcaacagagatacggacgagttttccagggctggaaagaagggaggatctacttccctcccacgtacaaatactctttcaactcagaccggtacgccggcgagggcaggcaccctaaggagaagcggaggacgccagcatggtgcgaccgcatcctctggcacggcaacggcctgagccagctgtgctacgtccgcggcgagtcccgcttctccgaccaccggccggtgtatggcatcttcctggcggaggtcggcgtcgtgcgccagcggaggaggaacaacgccgggtacttcggatctagggtcgaggtggaggagctgttgccgcgctctcggagctatagactgagagatgatgaagttttgctgagctgacttatagcatgatataatagaaggtaagctaacttgtgtgtgtgtgttttttttttttgtgtgtgtcactgataagtagtccccaaatgataccacagcttgcactctctgatctggctgccaaatctcgaggccctgcagagataatatgccctctgcgctttgttgactttgcgttcattttttttcttctgtttccctgttggcaagcgttggctttttact

SEQ ID NO: 142720 - DNA, 977 bp, Zea Mays
aaccggaacacaaatcgaaatgtaatcggacgcgcatacacgaagccgaaagcgtgtacacgcccatgtgtatatattcagcacatacgcaaacaacagcccagcccaaggataaaagcaaacaaaccacacgagcgcggcgcggcgcggctgccacctagaaaacgcccgcgggcgcacgatgaagaaggcggcggcggcggcggcagtcctggctacccttctcctctcctcggcggtgtcgcccaccgccgtgtccgggcagcagccgtggacgaaccagcagacggcggccaacaacccgcggctgcacaaggcgtacgtggcgctgcaggcgctgaagcgcgcgatcacggaggaccccaggaacctgacgcggggctggtgcgggcccgacgtgtgcgcctacttcggcgtctactgcgcggcggcgcccgacggcgacgcggacacggacacgcagaccgtggccgggctcgacctcaaccacggcgacctggcagggacgctcccggaggagctgggcctgctggccgacctcgcgctgctccacctcaactccaaccgcttcgcgggcacactcccggactcgctgcccgcgctgcggctgctccacgagctggacgtcagcaacaaccgcctctccggcggcttcccgcgccacgtcctctgcctgccaaacctccggtacgtcgacctccgcttcaaccgcctgcgcgggcccgtgccgcccgcgctcttcgacaagccgctcgacgccgtcttcctcaacgacaacctcttcgacttcgagctcccggagagcctcggcaactcgccggcctccgtgctcgtgctcgccaacctgcgcctgcgcggctgcatcccgcggagcgtggcccgcatggcggacacgctcaacgagctcgtctgttagcaacacagatcaagaagccgggccaactgcagcaaccaaggccgacgctggagcacgcacg

SEQ ID NO: 142721 - DNA, 2030 bp, Zea Mays
aaccagaccttattccctcccctcccctcccctccctttctcccctgactcctgctctactggatcctccgcctccatcgcctctcgcgcctccatcgacctcggcgcctcgtccgtcctgctccacctcttcttacgccgggttaacatttgaggcatggcgaaacaccacccggacctgatcatgtgccggaagcagcccggcatcgccatcgggcggctgtgcgagaagtgcgacggcaagtgcgtcgtctgcgactcgtacgtgcggccgtgcacgctggtccgcgtctgcgacgagtgcaactacgggtcgttccaggggcggtgcgtcatctgcggcggcgtgggcatctcggacgcctactactgcaaggagtgcacgcagcaggagaaggaccgggacgggtgccccaagatcgtcaacctcggtagcgccaagaccgacctcttctacgagcgcaagaagtacgggttcaagaagaggtgacggatcagtcagttgagcatccgtgatgtgcttctcgtggttctgtgtctgagcagcgtagcgtgactgatcatatgggcacacaatgcagttgtgtaccatgtgcatgtatgtgttcagaaaattttctgttgacagattgaagctggagagtacgctcaagtttgacactgttacgtattctcttttttttaccgtatcactcatctactctcctgatacaagacatttgggcaagtttgtttggatactaaggataacttattgcacaaatcaaacagccacaagttcatttgatttcgtggtgctgcaaaattgtatttttgaaaaaaataataatatacttactttataggaagaaaaagcctggccttccaagtcaccaccaacccaacctctgacgatcaccatcgccgctagcctccaccaccaacttcccatcgcctccccctcatctccccacactcctgacctcacctctccgaactgcagcacctcccctcccgccacccacacgtgctcccatggccgccaccgcgatctcagtccgcctccacccaaccgccgcgcgccatgtggcctccgcccgccgcgcccgcctcggggccgtccgcgcgcagtccgcgccggcggcggcggcggcggcgctgacgcaggacgacctcaagcggctggcggcggtgcgcgccgtcgagcaggtgaagagcgggatggtgctcgggctcgggacgggctccacggccgccttcgccgtcgccgagatcggcgcgctcctggccgcgggcaagctcgagaagatcgtcggcgtgcccacatccaagcgcaccttcgagcaggcgcagtcgctcggcatcccgctctccacgctcgacgacaacccgctcatcgacctcgccatcgacggtgccgacgaggttgaccctgacctcaaccttgtgaaagggcggggtggtgctcttcttcgtgagaagatggttgaggcagcatcggacaagtttattgttattgttgacgagacaaaactagttgatgggttaggaggtagtggtctagccatgccagtggaagttgtgcagttctgctggaagtacaaccttgtaagattgcaggaactgtttaaggaggaaggagtcgaggcaaagctaaggtttgaaggcgacaagccctatgttactgacaactcaaactacatcgtcgatttatacttcaagacgccaatcaaggatgcgttggcagcaggacaggaaattgcagctctggaaggagttgttgaccatgggttgttcttgaacatggcgagttcagtgatcattgctggaacggacggtgtcagtgtcaaaacgaagtgagtttttgagttgctttgttgtttgtgttgagttttacaatttaatgtacaagctattggtgtaaaagcagctgataagatgcttcaataaaggtgttcccccaatgtggggattgactatcacttattgtgggataaaaaagccattttaataggttgaaacttctgttgattcataaaaaatattcgagc

SEQ ID NO: 142722 - DNA, 124 bp, Zea Mays
agccctactacacctggacttgctgatcatttcagcagagctgcagaggaagccatggcatctgctgctcatgacagtacaggtgatgctgaaggcaacagccgtactacacctggacttgctg

SEQ ID NO: 142723 - DNA, 2741 bp, Zea Mays
ggtcctggtgcatagggggttgcaagaagatatgatcacaaagttctataacatattggtcgtggttccagaaaccaagggacaatacaatttgtgttcgggaggggaggctagcgcggactcactccgaatggtgaatctgaggattcggacatagagtttatattggttcaggctttcgccctagtagtactgatagcattgtttaaaaggtgtcgcctaggtgtccaggcgacaggttttgctaggcgtccgcgccgcccaggtaaacttgagcatggcgtccgcctaggcgcagtaggcgtctgggcgacgcctaacctagggtttgttgggcttagttccccggtccaaattggcgctggattttggcgctcgatccccctgtgcgctagctttggccagctatgctagaggtccaagcattgatgaaatgtgcaaaggaaaagatcaatcaaagctttgttgtccaaagcaagaagagtttactcaagaaaatcataactataattgaacggcgttgggagaaacaaatggatcacccattgtatggggctgcaatgtatttgaacccaggaaagttgcatcctctcataagaaatgatgatgatgctattgtcggtcagctaagaggttgctttcttgatgtgcttgcaagaacggtagatgatgaggaaactagagacaagatcaattatcaatcaatggattacgagtttcttagaggaccagctttttcaaataatatggccaaagataacctacaaactatgaccccacttgagtggtggcgtttgtatggtggccgtgctattgagttacagagatttgctagacgtttgatgaaagctaggttccaaaaactacgccaggagaaggggaaaaactttgatccattggttcatgaggacttcaactgggacaatgagtgggctgattctttgcatatagtccctgaaggtgggcgtgggtgtgagtgtgaccttacatgggaccttgtggataacgccattggagcatcacaaacacttcgtggccgaaacttaccaagaagagcccataatgtgtattcaagaagaaattctgttgctgcacaaaatatgtcagagactgaagaggaagatgaagatgaagaagatgttccacatgatgatgcagaaatcacagattgtgaagatgaatctaatgctggcaatgatggtgaagaaggggaggcgcccaatatcccaggagagtttgatgatgatttttgagcgacgggagagtagctattgctagattgcattagcatatttgctgcattactaactgcaactagttactattaattatgccattacaaactatttatgtggctatttcagatttggtattgtgttgttttaatttttgtgacttgctattgttcctttagaaactactttgtggctatttcagatccagtattgtgctattgtgaatttgtgatgatttctagtttatgagttgtaacaactatttggttgcttggtatttggctagtaaggcgtcgcctaggcgttcaggcggtggctgggcgcctagttccgcctagccgcctttaaaaccatggctgatagtagtattactttggggactatgttacaactggtacctatgtgtggtgaaggagggagtcctacccttttatagctcaagggtaggaccttaagctcaagggtaggaccttacagtgagaacttgtttcctaatggtaagggtatgatatgttgtagtgttgtgtttagtagtcccgccgatgtagccttcctgacgtcgtctccgagattgtgcgtagttgttcgccaggcatggtgtaccgtcttatacgttcggtatacgggtccctatagcgagtccgacgctaaggtccccatagtgacgcccgactggccccacagggcagagtcagggcatgtctcgaggtcgtgcttggcgtggccctgccttctgtcagaaaccctgcgtcaccctcctagcatgcgtacactcgatatggtgtattgctccgtcctgcccgacatgtgggttactgtggcgacttcgatacttaggttctccacgactggggttgatcggtcccacaaggcagagactgtatgcggtggcataccgtcacgttgatagagactgctcggcatcccttcgatatgtcgcgccactggtcctgatgtagtttggtgacgacacgtcctgtcgtggccgacatgggtcaatagaaccagattggggcctctgcctcgctgagttgctcggctaggacttggtcggaacctccgcctcaccgagttgctaggcagggacttggtcgagacctccgcctcgctgagttgctcgacagggacttggtcgggaactctgcctcgctgagttgctcggcagggacttggtcaggacctccgcctcgctgagttgctcggcagggacttggtcgggacctccgccttgctgagttgctcggcagggatttcatcgggaccttctgcctcgctgagttggcagggacttggtcgggaagtgggccgttgagagtcttgagcctactttgggcacctagttcctgggtacccgacaatatcgacccaaaagattaaaataaaaaacaccccctaaacatttaacagaagagaacataaattgcagagagcaatatactactctaacagctagaaagtttatgattagacagaactcatgaatgcattcttttttccagtacggat

SEQ ID NO: 142724 - DNA, 278 bp, Zea Mays
gacaataaaagatcagcactacgagattactgagggcattcactatagtagagcaatgcagaaagtggagctgcttacctttgccaatggaagagaggaagaaagtttgtcaagaagcaaagggatgacaaaaggctcaaaatattgggttgaacaaaaagcgtgctgcaagtattcaaacatactgttagccaagaagatgcactaacagcaagccttcctcaccaacaaacatggcaagtatctagtaacagaaaattacaactcctccattacag

SEQ ID NO: 142725 - DNA, 1092 bp, Zea Mays
ctattcatcttgctctcctctgtccaaaaaggaggcgccgcgctcctcttcttctacgccgttcactctctctagtctctcccttcccttctccacgcctccgcccccactcgtgagaccctacctagccctagcgccagcaccacccgcccaacctcccggagagagagaggaggaggccttcgccgccgccgttaccgtcggccgaggcgccagaatgttcgggtaccagaagggcctcgacgtcgaggcggggacatcgggcgccgccgccacgggcggcgcgcgccagctctacccggggatgcaggagagccccgagctgcgctgggcgctcatccgcaagatctacgtcattctctccctccagctgctcctcaccgccgtcgtcgccgcagtcgtcgtcaaggtccgcgccatcccgcacttcttcaccaccaccagcgccggcctcggcctctacatcttcctcatcatcctcccctttatcggcaaggtcattctggagtctgcaattctgacaacagtggtcgtgctcagccttaccgcatacactttctgggccgtgaataggggcaaagacttcagcttcctgggtcctttcctgttcgccgccatcatagtgctgcttgtgttcgcactcatccagatcctgttcccactgggcaagctctcccagatgatctacggcgggctggcgtcgctcatcttcagcgggtacatcgtctacgacacaaacaacatcatcaagcgctacacgtacgaccagtacgtctgggccgcagtctcactgtacctggacgttatcaacctcttcctgtccctgatgaccctcttcagggcagccgactaggcgctctgctctcatcctgtctatctacgagtcggtgcctgaatgctcccgtggttaagctccggtacccagaattccagttccaagaatagagttgtatatagctacccgcgttgcctttctactagtatggtcttattcggcttgactcggttcggtcagagtcttgatacgtagttggatcgcgaacaaatgaaccttgcatgggagtatggagagccgtctgctttatgatcctc

SEQ ID NO: 142726 - DNA, 1206 bp, Zea Mays
ctattcatcttgctctcctctgtccaaaaaggaggcgccgcgctcctcttcttctacgccgttcactctctctagtctctcccttcccttctccacgcctccgcccccactcgtgagaccctacctagccctagcgccagcaccacccgcccaacctcccggagagagagaggaggaggccttcgccgccgccgttaccgtcggccgaggcgccagaatgttcgggtaccagaagggcctcgacgtcgaggcggggacatcgggcgccgccgccacgggcggcgcgcgccagctctacccggggatgcaggagagccccgagctgcgctgggcgctcatccgcaagatctacgtcattctctccctccagctgctcctcaccgccgtcgtcgccgcagtcgtcgtcaaggtccgcgccatcccgcacttcttcaccaccaccagcgccggcctcggcctctacatcttcctcatcatcctcccctttatcgtgctgtgcccgctgtacttctaccacgagaagcacccagtcaacctgatcctgctcggcctcttcaccgttgccatcagctttgctgtgggcatgacatgtgccttcaccagtggcaaggtcattctggagtctgcaattctgacaacagtggtcgtgctcagccttaccgcatacactttctgggccgtgaataggggcaaagacttcagcttcctgggtcctttcctgttcgccgccatcatagtgctgcttgtgttcgcactcatccagatcctgttcccactgggcaagctctcccagatgatctacggcgggctggcgtcgctcatcttcagcgggtacatcgtctacgacacaaacaacatcatcaagcgctacacgtacgaccagtacgtctgggccgcagtctcactgtacctggacgttatcaacctcttcctgtccctgatgaccctcttcagggcagccgactaggcgctctgctctcatcctgtctatctacgagtcggtgcctgaatgctcccgtggttaagctccggtacccagaattccagttccaagaatagagttgtatatagctacccgcgttgcctttctactagtatggtcttattcggcttgactcggttcggtcagagtcttgatacgtagttggatcgcgaacaaatgaaccttgcatgggagtatggagagccgtctgctttatgatcctc

SEQ ID NO: 142727 - DNA, 1325 bp, Zea Mays
ctattcatcttgctctcctctgtccaaaaaggaggcgccgcgctcctcttcttctacgccgttcactctctctagtctctcccttcccttctccacgcctccgcccccactcgtgagaccctacctagccctagcgccagcaccacccgcccaacctcccggagagagagaggaggaggccttcgccgccgccgttaccgtcggccgaggcgccagaatgttcgggtaccagaagggcctcgacgtcgaggcggggacatcgggcgccgccgccacgggcggcgcgcgccagctctacccggggatgcaggagagccccgagctgcgctgggcgctcatccgcaagatctacgtcattctctccctccagctgctcctcaccgccgtcgtcgccgcagtcgtcgtcaaggtccgcgccatcccgcacttcttcaccaccaccagcgccggcctcggcctctacatcttcctcatcatcctcccctttatcgtgctgtgcccgctgtacttctaccacgagaagcacccagtcaacctgatcctgctcggcctcttcaccgttgccatcagctttgctgtgggcatgacatgtgccttcaccagtggcaaggtcattctggagtctgcaattctgacaacagtggtcgtgctcagccttaccgcatacactttctgggccgtgaataggggcaaagacttcagcttcctgggtcctttcctgttcgccgccatcatagtgctgcttgtgttcgcactcatccaggcgagagatctatctctgaagcatcactgtgttctatatgtgatgtgatagtatttacatatatataatttttttcaatcgatgctgatgggggggtgacccttgttgctgccaaatgcagatcctgttcccactgggcaagctctcccagatgatctacggcgggctggcgtcgctcatcttcagcgggtacatcgtctacgacacaaacaacatcatcaagcgctacacgtacgaccagtacgtctgggccgcagtctcactgtacctggacgttatcaacctcttcctgtccctgatgaccctcttcagggcagccgactaggcgctctgctctcatcctgtctatctacgagtcggtgcctgaatgctcccgtggttaagctccggtacccagaattccagttccaagaatagagttgtatatagctacccgcgttgcctttctactagtatggtcttattcggcttgactcggttcggtcagagtcttgatacgtagttggatcgcgaacaaatgaaccttgcatgggagtatggagagccgtctgctttatgatcc

SEQ ID NO: 142728 - DNA, 78 bp, Zea Mays
cactaatcatggccaagctgatcgaaacaaaacaggctcgcatatacttagccactttgaactttttttaaaatttcg

SEQ ID NO: 142729 - DNA, 83 bp, Zea Mays
catggtcatacacgtttggttggttgttgtacttgtacttgatattctcatatgttgtcttgtttgtcacaataagttaagag

SEQ ID NO: 142730 - DNA, 2514 bp, Zea Mays
gccagcgaggcagcgaccgcgatcgcgaccctttcctcctccgtctctctcccgccgcgccagttccggtccccgccccccgacgctttatccccatcccccgtcccctcgccttccagaaccttcctttcccgaaatagccaaatccataccctatccccctacccaccattccagagccactgcatctagtaggctgctgagctacccaccctccccgcgctcgtgacggctcacccacccccgccgtggttccgggcaacagggaagaagatcccgccctggtgccaccacgaggcacccggcggctttgatttcctctccgcccctggcgtctggcgtggtgctctggcccccagtttgtcggctgctttctacctgtacttgcagagctgtaggtgggggtaaacatggtgaggtggtcttgccaggatgacaccttatcatgttccctatccccgtgctagatgcgcgccggccgccgtgtgtgtgtatgccttaacgtcgatgcgtgccttgtactcctgtgtggccgtgtgctaggggcagctgctcgttgctgctcttttacaacggagttttactgacattgtccaacagactattccattccggtgtcagagcagagattttagcatcgttactcggattaggagggtaggatccggctatggactcaacgctgaaccaggtgaaggaggagagccatggggagggaggagatttgatggcaggcacggtggaggccgcggatgggccgtccgcggccgtcgccgcggcaccaaagccgatggagggtctgcatgaccctgggccgccgccgttcctcaccaagacatatgacatggtcgacgactcggacaccgacctgattgtgtcttggagcgccaccaacaacagcttcgtggtgtgggatccgcacgccttcgccacggtgctgctgcccaggcacttcaagcacaacaacttctccagcttcgtccggcagctcaacacctatggtttcaggaaggtggatcctgatcggtgggaattcgcgaatgagggctttttacggggacagagacacctcctgaagaacatcaggcgtcgaaaacctcctgctcagaatgccacaaaccagcagtccattgggccttaccttgaggtgggacattttggatatgatgcagagattgacatgttgaagagagacaagcagttactgatggcagaagtggtgaagctaaggcaggagcagcagaacacaaaggcaaatctcaaagcgatggaggataggctacaagggactgaacagaagcagcagcagatgatggcgttcttggcacgtgtcatgcggaatcctgaattcttgaagcacctggtttcccagaatgagatgaggaaggagcttcaagatgctatttcaaagaaaagaagacggcgcatcgaccaagggcctgaagctgatgacttgggggctagtagcagcttggagcaaggttcaccggtcctgtttaatgcccaggacccagttgaattccttgtcgacggaatcccagctgacctcgagagcccagctttcgatggccacggcctgattgggccacatgatattgatattgatattgatattggcagtacctctgagcagcagcaagacatgccccaggaggatctgaatgacaacttctgggagcagttgctgaacgaaggacttggcgaggagaacgatagccctgtaatcgaggatgatatgaatgtgctgtctgagaagatgggttatctcaactcagatggcccaacatctagcaattagtcttggcttcgttgctgttttgttatttccatcttaccagaacccgcagctcctgaattgtgttcactgtgtcagcaagactaggcaattctgcttccgttgctcggtttccatgcccttctgaattcctcgccaatggtagggcttgcttccatgagaattggctggcattcgccatggtgtcaagggagaactgctaggtgcatctgatgtgatctgactagtgattgctgcttgccactggagtggctgttttaggcgacgccagcgatctgttggttgttttacgaccctgcccgtcaggaattcagtctgtagttatgtacagtgacagcgactcagcaagtagtactgatggttatacatgtttctgtcagtggttgtgtgcaaactgtttgtctaatttcatgcggtggaagctttgtagtgttgcggttctgaagtactactggatttcagttcgaattaagtactatactggatttctgttcgaagatctgggatttttttattcacctcaataaagacgacggaaaattcaagaaatggctctcgcattgctgctttatttggtctgcgaaattcggaagataaattcgtgattatagaaatgagattaaatggtttgttttgggaaaaacattgttgtagacacaaacacacaacatacccggattataatatgtctatattgtataatgtaagttatttaaact

SEQ ID NO: 142731 - DNA, 1148 bp, Zea Mays
ctctaattttttatccttcattgttttcttattttcttttgaatgaggcagtacatgacaggtccttgaaacagtagaaaaggatgagtattgatttattaaagaagaaagataacaaattgaatgaagaagtaactgaaaacaatgcaaactgaaactgtgcaaaagttaactggaacgtatcctaaagaggtaatgcaggtcacctttttgtttgatttcactttagctcttactgctgatctgatgaaaaattaaccattttttactgcaatataccagtcatatcttcttgccttgaggtcttttgaagctaaccattgcctgatgctgtttgctcgtctatccagggtttcaggaaggtggatcctgatcggtgggaattcgcgaatgagggctttttacggggacagagacacctcctgaagaacatcaggcgtcgaaaacctcctgctcagaatgccacaaaccagcagtccattgggccttaccttgaggtgggacattttggatatgatgcagagattgacatgttgaagagagacaagcagttactgatggcagaagtggtgaagctaaggcaggagcagcagaacacaaaggcaaatctcaaagcgatggaggataggctacaagggactgaacagaagcagcagcagatgatggcgttcttggcacgtgtcatgcggaatcctgaattcttgaagcacctggtttcccagaatgagatgaggaaggagcttcaagatgctatttcaaagaaaagaagacggcgcatcgaccaagggcctgaagctgatgacttgggggctagtagcagcttggagcaaggttcaccggtcctgtttaatgcccaggacccagttgaattccttgtcgacggaatcccagctgacctcgagagcccagctttcgatggccacggcctgattgggccacatgatattgatattgatattgatattggcagtacctctgagcagcagcaagacatgccccaggaggatctgaatgacaacttctgggagcagttgctgaacgaaggacttggcgaggagaacgatagccctgtaatcgaggatgatatgaatgtgctgtctgagaagatgggttatctcaactcagatggcccaacatctagcaattag

SEQ ID NO: 142732 - DNA, 1221 bp, Zea Mays
gccagcgaggcagcgaccgcgatcgcgaccctttcctcctccgtctctctcccgccgcgccagttccggtccccgccccccgacgctttatccccatcccccgtcccctcgccttccagaaccttcctttcccgaaatagccaaatccataccctatccccctacccaccattccagagccactgcatctagtaggctgctgagctacccaccctccccgcgctcgtgacggctcacccacccccgccgtggttccgggcaacagggaagaagatcccgccctggtgccaccacgaggtcccagaagctcccgccttcccgctcaaatctctcctatttctggttcccgccgcggaagatcaacttcttgctgtgttcgtcgtttcaggcacccggcggctttgatttcctctccgcccctggcgtctggcgtggtgctctggcccccagtttgtcggctgctttctacctgtacttgcagagctgtaggtgggggtaaacatggtgaggtggtcttgccaggatgacaccttatcatgttccctatccccgtgctagatgcgcgccggccgccgtgtgtgtgtatgccttaacgtcgatgcgtgccttgtactcctgtgtggccgtgtgctaggggcagctgctcgttgctgctcttttacaacggagttttactgacattgtccaacagactattccattccggtgtcagagcagagattttagcatcgttactcggattaggagggtaggatccggctatggactcaacgctgaaccaggtgaaggaggagagccatggggagggaggagatttgatggcaggcacggtggaggccgcggatgggccgtccgcggccgtcgccgcggcaccaaagccgatggagggtctgcatgaccctgggccgccgccgttcctcaccaagacatatgacatggtcgacgactcggacaccgacctgattgtgtcttggagcgccaccaacaacagcttcgtggtgtgggatccgcacgccttcgccacggtgctgctgcccaggcacttcaagcacaacaacttctccagcttcgtccggcagctcaacacctatgtaagtgtttgtttgcccattacagttcagcatggaatggttcatgatgctgaggtgttaacagggttgaatgttcagctcccaaacacaacactgttgactattttgcaagtagttggtgcaatcctcg

SEQ ID NO: 142733 - DNA, 2220 bp, Zea Mays
tcaatcaattctggttctccatttcaattttgattcaaggtcaaaaaacttcaatccagatatcaccaagtctgcagtggccttctttaagtgctcgttcagcatgtcctcgtaaacaataaaattggcttctgataagatattttgatctctcatgatagtgaatacctgtctcgcctcagttgaacttgcatacttgcagaagccatatatgatagcagaatagacaatttcttccattgaacaacctacttcaatcatctcatacaccacattgatgactttctctggtctttttgatctgcaagcttccagaatagtcaaggtgtatttaaattcagctggcccattttctatatttccaagacaatctttaacaagtgatatggctgtgttgatctcccccatcttgcaaagccctttcacaagaacacagtaggctgacatacttggtatccaattttccttcatcatggtgttgtagcatgagcaggcctctttgacatttccttcatccacgaaacatgggatcatatgactatatgtacatgaatctggtttaaaatcaactgagctttgcatttcttcaaacaacaaaagtgatttcttcctatccttgatcttcagcagattttcaataagaatattataaatgccaacactacaatactgtttttgtctcaatgcatcaaacacttccacagccttcaataccctaccatcctttcctgcaaggagcttcataaaatctactaacatttcaacaacagacaagcccatctctgccagtttgttaaccaacccaaaaaatgtaaccatttcacccttttcggcataacaagctagcaacggtgaaacagtatcagaacttggcataaggtcctcctgaagaacaatctgaaataacttatgagccttatcctccctacctatgccacacagcccaataataagtgtgttatatatccccaggtcagcacggtagccagcatcaaccaactcgttcaacaacctacacccatccccaaccctgccaacagcaacatacccatcaatgagcgatgcatacaccatcctgtccaccagtaaccccttgctcctcatctccttgaacaattctgctgcttcctccaccatcccagccttgcagagtcccccgaccatagtagcatatgccattgtgtctggctccaccccatccttttccatttcgtcccaaaccctcatgcagccatccatataccccctccgcaccattgtcttcaccagtgcagtgtacacaaagacatcaggccgacacacctcgttccgcatcctcccaatcatctccagaagcctatcaaccattccggcgtgtgctagtgcacgaaccatgatggcaaacgtcactgggatgggctgcacaccaccctccgacatttcatcgaacagcttgagcgcgtcctcaacgtggcccgcagcagccagcgcgccaaggacgcggttgcacgcgtggacctggggttggacgtcgaactcgtggcggaagcggcgaagcgcgtgcagagcgcggagggggcggcgcgcggcggtgtggaggcggacgaggagggtgagctgcgggtgggagatcggtctgccgtgcgcgcgcatgaggtcggggagctggtcagccgcggctgggaggcccgccgcggacagtagcgaggcgagggcatggaaagctgggaagcagtgacggaagcccttctggcggcccgcccagaggaagaacgggagcgcgagcggaggcggcgggggagggcgcgcggtgaggacctcagcgacgagggatggagggacgcggcggagcttggagagatcggcgacaacgggcggtccccagcgctggtggcggcggagcgcgtcgaggaggaagcgcgcgagcggggagaggcggcgagcggaggcggatgtggaggaggaggaggaggcggaaggaggtgacggagagcgagcagacgacgaggaagagggcgagtgtggatcccagtcacggaggcggaaggcggtggcggtggagggggaggaggaagggcggtgtatagtggaggggaagcggagatcagtgaagaggccgccgcggactgtgggccggtgcggcgaggcgcggcggtggccgtggtagatggtgtgcctgcggcggcggtcagtgggagaggacggggacggagaggccatggcgccggccgacgatgtgaa

SEQ ID NO: 142734 - DNA, 2633 bp, Zea Mays
gaacactaccacacaagcgcagatgaatctattggcactatcctcaacatttgtgacaagtaagatcccgaccccggctgtcatggacctttggtccatggggatagctgtcttctccggcgaggttatacccctctgccgcaggcttggttctagggtagcagccctaggcgcttgagagggtcattgcaagagagagagattggtttgataatgatcttgcttgatgtattccctgctgccatgcggcttataaatagccctatgaggctatgactaaccaactaactagccgagccttggctccgccactgcttacgctcttaataagtagtagagatatgtatccaacagttaaaatctgaaatcagaatgaagagaagtttgtaccaagtaactatatagatatttcttcaatcaattctggttctccatttcaattttgattcaaggtcaaaaaacttcaatccagatatcaccaagtctgcagtggccttctttaagtgctcgttcagcatgtcctcgtaaacaataaaattggcttctgataagatattttgatctctcatgatagtgaatacctgtctcgcctcagttgaacttgcatacttgcagaagccatatatgatagcagaatagacaatttcttccattgaacaacctacttcaatcatctcatacaccacattgatgactttctctggtctttttgatctgcaagcttccagaatagtcaaggtgtatttaaattcagctggcccattttctatatttccaagacaatctttaacaagtgatatggctgtgttgatctcccccatcttgcaaagccctttcacaagaacacagtaggctgacatacttggtatccaattttccttcatcatggtgttgtagcatgagcaggcctctttgacatttccttcatccacgaaacatgggatcatatgactatatgtacatgaatctggtttaaaatcaactgagctttgcatttcttcaaacaacaaaagtgatttcttcctatccttgatcttcagcagattttcaataagaatattataaatgccaacactacaatactgtttttgtctcaatgcatcaaacacttccacagccttcaataccctaccatcctttcctgcaaggagcttcataaaatctactaacatttcaacaacagacaagcccatctctgccagtttgttaaccaacccaaaaaatgtaaccatttcacccttttcggcataacaagctagcaacggtgaaacagtatcagaacttggcataaggtcctcctgaagaacaatctgaaataacttatgagccttatcctccctacctatgccacacagcccaataataagtgtgttatatatccccaggtcagcacggtagccagcatcaaccaactcgttcaacaacctacacccatccccaaccctgccaacagcaacatacccatcaatgagcgatgcatacaccatcctgtccaccagtaaccccttgctcctcatctccttgaacaattctgctgcttcctccaccatcccagccttgcagagtcccccgaccatagtagcatatgccattgtgtctggctccaccccatccttttccatttcgtcccaaaccctcatgcagccatccatataccccctccgcaccattgtcttcaccagtgcagtgtacacaaagacatcaggccgacacacctcgttccgcatcctcccaatcatctccagaagcctatcaaccattccggcgtgtgctagtgcacgaaccatgatggcaaacgtcactgggatgggctgcacaccaccctccgacatttcatcgaacagcttgagcgcgtcctcaacgtggcccgcagcagccagcgcgccaaggacgcggttgcacgcgtggacctggggttggacgtcgaactcgtggcggaagcggcgaagcgcgtgcagagcgcggagggggcggcgcgcggcggtgtggaggcggacgaggagggtgagctgcgggtgggagatcggtctgccgtgcgcgcgcatgaggtcggggagctggtcagccgcggctgggaggcccgccgcggacagtagcgaggcgagggcatggaaagctgggaagcagtgacggaagcccttctggcggcccgcccagaggaagaacgggagcgcgagcggaggcggcgggggagggcgcgcggtgaggacctcagcgacgagggatggagggacgcggcggagcttggagagatcggcgacaacgggcggtccccagcgctggtggcggcggagcgcgtcgaggaggaagcgcgcgagcggggagaggcggcgagcggaggcggatgtggaggaggaggaggaggcggaaggaggtgacggagagcgagcagacgacgaggaagagggcgagtgtggatcccagtcacggaggcggaaggcggtggcggtggagggggaggaggaagggcggtgtatagtggaggggaagcggagatcagtgaagaggccgccgcggactgtgggccggtgcggcgaggcgcggcggtggccgtggtagatggtgtgcctgcggcggcggtcagtgggagaggacggggacggagaggccatggcgccggccgacgatgtgaa

SEQ ID NO: 142735 - DNA, 101 bp, Zea Mays
gataggatgaggcgatactgtccgctcgattttttggaaccatatcgtcaccaaaaactgctctcgtgttcacctcgtcttcgcgtgactctcatccaaac

SEQ ID NO: 142736 - DNA, 1305 bp, Zea Mays
gggaaccatgtacaacaaaaaaaaatctgtgtgcatcgagtcattgtactgatctacagctacgacgagtaaaacaagaagccgtacctgtacggtcttctctatagagggagcaattggagagagagagaaagaacagcgaaaaatggtcgatgccggcgacataacggccggagggccgccgcgcgctcacgaggaggagcaagcgggaactccggcatacggttcggtggtcctcggcggcacttttgaccgcctccacgacggccaccgccgccttctcaaggcctccgcggatttggggagagaccggatcgtggtgggcgtctgcacgggacctatgctcgccaagaaggagtatgcggagcttattgagcccgttgacaagcgcatcaagggtgtggaggattacatcaagtctataaagccagaactgatagtacaagtggagcctattgaggacccttatggcccatccataactgatgagaagttggatgccattattgtcagtaaggagacattaaatggtggactggctgtaaataggaaaagagaagagaaagggttcccactgttgaaggttgaggttgttgatctcctttccggcggtgtggagggggaaaaattgagttcttctgctttaaggaaacttgaggcagaacaagctcaacaaagtgaaacaaaatctggtagccttgaagcttcttagggaggaaattgaatactttgatctggttagctgaatgcacaaatacgggggtgatctgctccaagctcagtgtgaacaaaaaatatgatcagagctgacagtttggttacctttctagaggaataatcttcgaacactggcccatggccctgtaacagtattgctctaaccttctaaaatcaacctggcaacatagactctcccctactaaccaaatttacaaattttgtattggcaatgccatctgaatgttaaaaggaaatcttcttgggtttgtataaatatctacaattgtgacaaagctacaaacgaatatggttccccttcgcaagaacccatgcaatgtagcttgtcattataatctttgttctcttgaaacatattgtataattatgtgtatatacgcattggttgatcagagactttgggttctccattaatgtagaatcaggaaactgaagataacctgtaagggtacagcttttttttgttaggtggtcaagaaccctgttgtttcgaataattagtaaatttaacctagtgtgttaatctcttactaaatctaaaaagatacccactgtggagataattct

SEQ ID NO: 142737 - DNA, 1409 bp, Zea Mays
gggaaccatgtacaacaaaaaaaaatctgtgtgcatcgagtcattgtactgatctacagctacgacgagtaaaacaagaagccgtacctgtacggtcttctctatagagggagcaattggagagagagagaaagaacagcgaaaaatggtcgatgccggcgacataacggccggagggccgccgcgcgctcacgaggaggagcaagcgggaactccggcatacggttcggtggtcctcggcggcacttttgaccgcctccacgacggccaccgccgccttctcaaggtgctttcttagggggggaaataggcacgtagatttttgttcctcctgtcaattgcgattgaatcttgctttcttcggggtaccggggaattggtgggcggcaggcctccgcggatttggggagagaccggatcgtggtgggcgtctgcacgggacctatgctcgccaagaaggagtatgcggagcttattgagcccgttgacaagcgcatcaagggtgtggaggattacatcaagtctataaagccagaactgatagtacaagtggagcctattgaggacccttatggcccatccataactgatgagaagttggatgccattattgtcagtaaggagacattaaatggtggactggctgtaaataggaaaagagaagagaaagggttcccactgttgaaggttgaggttgttgatctcctttccggcggtgtggagggggaaaaattgagttcttctgctttaaggaaacttgaggcagaacaagctcaacaaagtgaaacaaaatctggtagccttgaagcttcttagggaggaaattgaatactttgatctggttagctgaatgcacaaatacgggggtgatctgctccaagctcagtgtgaacaaaaaatatgatcagagctgacagtttggttacctttctagaggaataatcttcgaacactggcccatggccctgtaacagtattgctctaaccttctaaaatcaacctggcaacatagactctcccctactaaccaaatttacaaattttgtattggcaatgccatctgaatgttaaaaggaaatcttcttgggtttgtataaatatctacaattgtgacaaagctacaaacgaatatggttccccttcgcaagaacccatgcaatgtagcttgtcattataatctttgttctcttgaaacatattgtataattatgtgtatatacgcattggttgatcagagactttgggttctccattaatgtagaatcaggaaactgaagataacctgtaagggtacagcttttttttgttaggtggtcaagaaccctgttgtttcgaataattagtaaatttaacctagtgtgttaatctcttactaaatctaaaaagatacccactgtggagataattct

SEQ ID NO: 142738 - DNA, 1476 bp, Zea Mays
aatatacagaacgagccagcactccattttctcatacggttggcccggaattaggcgcctcgattgcttgctagccgccagattagtctttcgctaccctaagatcggtcggaagaagaacagttcaatctcggttcatcagaagtgaaactgcttagatcagatttcgtggattccttcacttcaaagtttgcatgaccatcaagcctatgaagaggctgatcactacgctaagaggaaagcagccaatatttgtgcttccactggtgctagaactgtcaagagaaaactagaagcaagtaggattccacccaatgatttggttagaagaacaggcaaagaacagaaagtacccgcttatgaagttcgtcagttaaccaagaatgagttgcctctgaaggtgtctgctaggaatgccatcaatagcgatcacttccataggcctttaagtagcagatgcaatgatcttaccaagaacatttctgagataaggccagtttgcagagctcttcctttgcctgagaaacctttgtgcatcagagaagaggacgagtgctcagtggctagttgcagcgcaaattactcagagtacagtaccagtgataacaaacaatcagtcggaaccggcagttgtttcgctgacgatgttatgtattcatgccaacgcagacaggagaccaagaatgcctatggatctggtttgtttctgaatgtccatgagctggagctgcaagcataccaatcaaccgtcagagctttccatgctgcaggacccctgacatgggagcaagagtcactcctgacaaacctgcgcctctcgctcaacatctcgaatgaggagcacttgcttcaatttctgtgcagtggatgaataccactttatgagaaagaggtcgctgaaacagacagtgcactgaagtctgaaaaccaggtgcttgggtgcctttcttctctcccgtcaggccatcatattgaaggcatgtctgggttttatgattcattgatcatggtgacggataagaccgggtacgccatcaaataacctagggaccttaaaatgtgttcatgccctcttgaagttcaaattctgtttatatatattagatgtccccaagggaccctattcttcattttaactgaaaagttatgtaaattttttcttttaatcaaactgcaattgtgtttgtcaattgttcagccaacatctgttcttgtaacttggaacctgtatctctgcagtaagacaccggtacaggaattcaaatgagacactgaaacttcaaagatgctggaaatttgtccgtatttgacttttgttccggaacttttgatgaggctgtattttgtactccatatagttactggtttactgtcgaacggcttaagaaagctaaacagatggaaagggaaactattgttttacggcgactagccaacttattgttttttctcgaacacgcaggagaactgcgcatc

SEQ ID NO: 142739 - DNA, 1195 bp, Zea Mays
aatatacagaacgagccagcactccattttctcatacggttggcccggaattaggcgcctcgattgcttgctagccgccagattagtctttcgctaccctaagatcggtcggaagaagaacagttcaatctcggttcatcagaagtcattgaactgaatgatccaatctgatttgctgactgctcctctcatcactcaaaatttgtgatggaacaggaccatcaagcctatgaagaggctgatcactacgctaagaggaaagcagccaatatttgtgcttccactggtgctagaactgtcaagagaaaactagaagcaagtaggattccacccaatgatttggttagaagaacaggcaaagaacagaaagtacccgcttatgaagttcgtcagttaaccaagaatgagttgcctctgaaggtgtctgctaggaatgccatcaatagcgatcacttccataggcctttaagtagcagatgcaatgatcttaccaagaacatttctgagataaggccagtttgcagagctcttcctttgcctgagaaacctttgtgcatcagagaagaggacgagtgctcagtggctagttgcagcgcaaattactcagagtacagtaccagtgataacaaacaatcagtcggaaccggcagttgtttcgctgacgatgttatgtattcatgccaacgcagacaggagaccaagaatgcctatggatctggtttgtttctgaatgtccatgagctggagctgcaagcataccaatcaaccgtcagagctttccatgctgcaggacccctgacatgggagcaagagtcactcctgacaaacctgcgcctctcgctcaacatctcgaatgaggagcacttgcttcagttgaggcatctcctatctctttgataattttcaaaaactaatgtgccttttttatatctgtggattacctccaacccgtagagatctttgcatgcttgtagcgtatgtttcccaccttgactgttgtatataaagaagagttcagagaaatccacttatagctgttgtacttcaccagaactttgttgctaggagtaaatgtcttgcatttttttagtgtttttacaattcaaggaaatgtgaagctatcttcgaaatatatttgtcatgctgataatcaaggttgaaatatcagttcctttaaatgaagctgaagcatcaa

SEQ ID NO: 142740 - DNA, 701 bp, Zea Mays
caaatctccctctttacaccatccagcaatcaaagctccatataatgcggctagctctatccattgcttcattttgtcaacaagctcttctgcttcgggcatcctctcaatccacagaacgttgacgaatatacagatcagctgaccaagaatgaattatcatcaccaccaaaaaagatgaagcacacccaggttagcaaaagcatgccagattctacatattcaaagaatgacaacatttagtccatcatgaaatatatcaaggtatcatgctccatcacttttggtcctgagacttttatgtacatattaaccttatgtttagaccttcctaaaacggtgtctatgcaagaaaagctaggtcacttttgatcagtaaactgttatttgcaccttgcacacatagaaaaggctccatcacttttggtcacaagacttttatgtacatattaacctgatgttgaagcctttctagaactatgtgtgtatgcaagaaaaactatgtcacttctggtcagtagacttttatgtatatatgactccaccgttggagcctttttacaactatgtttgcatatgtaaactctgcatatacactattactggacactcaattatgctagtttaatgtaacttgccacttattgtaatctaaatttgtattactactgccattgcgctattggtataaaaaaagacaa

SEQ ID NO: 142741 - DNA, 663 bp, Zea Mays
gtattgattgagtgtgagggttacaaatatataggcatatgcctagggtactaccccaaccctaataggaaacataggctaggtactaggcccatacagtgatagccacacacaaacacacacatagtgataggaggctaaaaccctacccttagtcaaaactctagccatgacagatgttgagactggaccgaaactccaagaacatagagaatggaagtcccttgatgaagatatcgacatactgtgatgtcatcaagacatggaggacatggatgtctatgttggctacacgctcgcagacgaagtggagatcaatctaaaaatgtttcaagcgctggtgttgtactgggttgacagagaggtagacgacactaatgttatcatagtaaacgagtgtgctcttggttagagagttatggagctcctagaggaacttccatagccaacacaccttagccatgacattggccatgatgtggtactcggcttcgttgcttgaggcagaagccatgggctgacacttggaggaccatgagatgaggttgtcctcaaggaataaacataactgaaagtagagatgtgtgcctggacactacgcccaatgagcatatcaaaactattgaagttgttaatgagaagatccaagattaaactattaaa

SEQ ID NO: 142742 - DNA, 326 bp, Zea Mays
aacataaatatagtagttcaatgtctcaaatatatggcatcaaatcctccaaggtacagcgatttaacaatgacttaccagttgcttacaaagtttttggaagccacacaacttgaccagaccctcttaacagctgagcatcatattgagaacaccatggtaaacggctcgctcaaccttcagaagtaatttgtgttgaatgatacatccaaacccacctaacagtccaaagcatccagttgagctctatactctctcatcattttgtctttgtcagcctccagctcgccccttttcagttcctcttcctgacagtgaacatgaat

SEQ ID NO: 142743 - DNA, 372 bp, Zea Mays
ctcatttggaaggttctcagagttgctgatcccaccattggcagttcaagtatcaagaggccattggtgacagaagcttcaacatccatggctttctgtgactttgattcggtgatctctgttagtacttcagcactggacgtcaaggcatctaatatccttctaactgaagactaccaacctcagatatcagattttgggcttgcaaagtggctccctgacaaattgacccatcatgttgtgtatcccattgaaggcacattcggcgagcgtctatgcgttcgggttactaggacatgggacttctatgatcctggagatgataaaaaacttctgcattctgatcttgtaccgctcgatgaggaggtataa

SEQ ID NO: 142744 - DNA, 584 bp, Zea Mays
gggcgcgcggacctgtcgagggcacggctcggcacgcgtcccaacagcgttggtgcgatcccggtgcgtgggcgtgcgacatcaacgcgagcatcccagcgcgcgggcgctccagccaggcgcgagcacaggcgtcttgtaaacgcatcgatcaggacatcgtgggcagtgcgacgaagaaaatgaacaaacgacggatgcagagataaagataaaatggagaactgatgctacaagcgcctcctacataggcatcttcgtacctatggcttcaggacgctcaagcctctcctacttttctctggatgatcatccgccggtgcatgcgccattatccgtacaggaagcgctgtactgtcacctgacgacgacgacagttcttcatttttccatcctgtttcttgtttatcttatctcaccagcagtagtcgcatggtggccttttttcgctcggtagagagcaagtgactgataacgtgttaagtatactcggtgttcagtggtaaagagagtagagaaagacaaatgcaagagacagaatgacagttgtaagtctttattgcaatggaacattgattatatac

SEQ ID NO: 142745 - DNA, 1997 bp, Zea Mays
cttatctcactgccgcccaaccattttcctccctcaagcaagcacgcagcctcaactcctctcccacctcacgcacgtcttctcccagccaccgcacaacagcttccttgctccactcggcacctctgctcctcccatccatggcgtcggccctgctcccttctcctcaagcagcgcccgagctccattccttggtcttcctgctcggcgctaggtcctaagacaagctcctgttctccatccatggcgcccaggcgagcagctccccttctccagatccatggacgccatcccctcctgcaatttggagaaggcggagtctctgtgcgttgctcaccaagtgctcgatggacaacctgaacctgagaccatcgtcgtttttgtggtcttcgaatcagattcagttttgccctccgtcgatgtctcgtctctccttcgctgcaccatcctcgtccttatctattggtacgttaagtgatcatgtgatgcggaggattggaactgagtcgaccacaagatggtgttaagcgtgggtttctttgcaaggtgatgctgatgaacgaacttaaggatggacagactgaacccgtgccaacacacaaggctggttgccaagcggacatcatctaacaacactgacttagtgttatcccaggcaagccccgatgcatttgccacctccttgttgttataaaacttttatcacttatatgctgcattaggtgataggagttgagtgatgaaacaattgatgcattgccattccttggaatttgattatcttccttgattcctgttttataaagagaactaatgaggcttagccctgcttagaaaaactaaaagttgtttcttttaaaaagaatgttgtgcaacactggatatgggttttatgaaaaaggaacttgcaataatgaaggcatcactcgcgatgatgaattcattattcgagtattgtacctctgtcaggtacatgggttgggtgttaaataataagatgagaccagacgttgagcaggaaaggtcgcccgtctgtgtcgattaaggaccgttccgattgttggcctgctgatctaggaccctttaactggccacatgcctcatcatgggtaagcttagcctcggtcggaccaataccagaacagctcgcacgcactaggagtggagagatggcgagagtagcttgtaccctccgtggcaagagactggaaggtggggtgctgtactctcgaaaacatggcaggcaccatggcgagagtaacgtgtaccaaccaggccaacggctggacggtggagtgctatgctctcgggtcgcgtgaacccgttctggtcttgagaaacccgatggcgagttgacatatgcaagggttaagtgctacatatgtcgtgtggatggagatcctcagctgggtattaatcgattcggatcaccgaacttctcggatatgaagactggatcttcgaccttcagcgtagataacaagtgaaactaaagctgctaaaataaagctagtgtaggacaagtgaatgctctagattaggcaaatctagattaaggaaaagtacttaacttgtaaagtaaaattttggcataaggatccactactagtaagcttttctgcaaaaacaagtctttgaaatttgatgagctttaccttgattcccaacaaaccagcatacccttgagagtcttttctttagtcgggtaagtcttgctgagtaattgcgtactcagggttttattccttgttgtttttcaagttataattttgttctgtgttggatggtgctaagtgccggtgggctcggccttcttgtataagtatatcccttctatagtttccttattgaggattgtcacttaagctagcttgtattttaaaacctataaatattttatacattttaaattgtaattcttttgaatcactttcttttgtaatcactccgataattgtataatgtaaacttattgtaacatgtaatcattttgcaat

SEQ ID NO: 142746 - DNA, 420 bp, Zea Mays
gattcacgattttcgagaaaacaatggcagtgaactatcaagtaagtagttgaatatacctatgaagcatggaccagagtctccctggggtggttggcactagtcgtgaacttgcgatgctgctgtctgtggtcagcgtttccacggcacttaagggtcaacatttaaggaacactccgtcgtgctgaacccaagcactttgattgatggaatgctgaaaaaaaaagcatgcgtgtggcccatgaaagcatggcaaggcctcccagaggttgagaacgtgtctccagaaactctgtatcatcttggtacactgatcgatcttggttgaatctaatcttctgttaccgaaaaattctgcggctgtcgggctcgaatctgtagacggctctggcaaggaggagtcccgttgctggtttggat

SEQ ID NO: 142747 - DNA, 2576 bp, Zea Mays
ctatgcatccactcgcctgaactgaacgtggtccctctcctctgtcctccgcgatggtggtccccagctcggcaaatgttgtccccggggcggcagcgccggcggcctgaagcgcgacgactaggacggcagcggcaatctttagcgctgtcggcggcgggatactcgctgcgcgccacgcgctgacatggacgagcccccgtgcccgcccccgcggcccgcgctcaactccgccgccgcgacgtcatggccggagctgctcgcgccgttcgacctctcccgcctccgcgccacgctgtcctcgcacccgctcaccccgcgccgcctggcccgcctcctcgcgctcccgctcgcgccggccacctccctgctcctcctcgactggtacgcgtcgtcccacccggcgctctcgctctcgtccctcccgctccgccccatcctcgcggcagccgaccccgaccgcgcgctcgcgctcctcgactccctgccggcctcccgcctgcccccgctccgcgagtccctcctgctcccgctgctccgctccctgccacccggccgcgcgctccacctgctcgaccagatgccccgccgcttcgccgtctccccctccttccgctcctacaacgtcgtcctctccacgctcgccagggccgactgccacgccgacgccctgctcctgtaccgccggatgctcagggaccgcgtgccgcccaccaccttcaccttcggtgtcgccgcgcgcgcgctctgccgcctcggccgcgccggcgacgcgctcgcgctgctccgcgggatggcgcgccacggatgcgtgcctgatgcggttctctaccagactgtcatccacgccctggtcgcgcagggcggggtcgccgaggccgcgatgctcctcgacgagatgttactcatggggtgtgcggcggacgtgaacaccttcaacgacctggtgctcgggctgtgcgggctcgggcgcgtgcgagaggcagccaggctggtggacaggatgatgacgcagggatgcatgccaagtgtggtgacatatgggttcctcctgcaagggctgtgccgaacaaggcaggcggacgaggcgtgcgccatgctcgggaggttgccggaggtgaacgtggtgatgcttaacacggtgatccgtggatgtctgacggaggggaagctggccagggcaacagagttgtatgagatgatgggttcaaaaggatgcccgcctgatgtgcacacatacagtattttgatgcatggcctttgcaagcttgggagatttggttcagcagtgcggatgcttgatgagatggaggagaagggttgtgcaccaaatatcgtgacctactctaccttgctgcattcattttgcaggaatggcatgtgggatgacgcaagagcaatgctggatcagatgttagccaagggctttagtatgaactcccaaggatacaatggtatcatatatgccttatgcaaggatggcaagcttgatcaagcgacaaggcttgtccaagagatgaagagtcaggggtgcaagcctgatatttgcacgtacaatacaatgatttatcatctgtgcaacaatgacctgatggaggaggcagaacatattttcagaaacttaattgaagagggtgttgttgccaatggaataacttataatactctcattcatgcacttctgcgcaacggaaggtggcaggagggcctaaggcttgcaagtgaaatgctacttcatggttgccagctagatgttattagctacaatggcctgattaaagccctctgcaaagaggggaatgttgatcggagtatggcgttgcttgaggaaatggtgacaaagggaattaagccaaataatttctcgtataacatgctgatcaatgaactctgcaaggcgggaaaggtacgtgatgcactggagctctcaaaggagatgctgaatcaaggactgacacctgacattgtgacttacaatacactcataaatgggttatgcaaagtgggatggacacatgctgctttaaatcttttagagaagctacccaacgaaaatgtgcatcctgacattgtgacatacaacattctcattagttggcactgcaaagtcagattgcttgatgatgccgctatgcttctagacaaagcaataagtggaggaatagttcctaatgagcgaacgtggggaatgatggtgcaaaattttgtcagacagacagtcaatctcgagggttactaaaaggatttattgtatatgttgtatgtcatatcagttttgggactccgcagctcgatatgcttttagatcaatatgggcacatcttaacttccagcatactgcctgccgtgcatgtcgtcatgtcgatctggactgttggagccctttttctcttaggttactgattaaccaccaaagcaaatagccattgacagaattcaaccagagtcttggctgaaaattcttgaatgggaatggaagatctctggtagcacagtggtcatgttgtgagtgatatataatggacctttctactgttccagctgcacatcctacctgcagtagtgaaccaccctaa

SEQ ID NO: 142748 - DNA, 87 bp, Zea Mays
cgactgccaagtggacatcgggcttcagcttcattgagcctagcagcagcatcctgctgcacttccgcgtcatcaccggcaagggcg

SEQ ID NO: 142749 - DNA, 1125 bp, Zea Mays
tcgccgccatgctatgtaccacgtccacgtccttctagctcggtgagctgtcctcctctttcccgattcgatccaaaacaagacaagtctaagacgaacaccaaatgaaaggcatataatgggtgatgggtgactgctgctacacgcacacgcaagagtagtgacgagtagtggtagcagcaattaaccaacgagacaccaatggcggtcgcaagtaatagaccagcaaccactctactgcccctggcggcccttgtggccgtcgctggctccctcttcctcgccggcccggccgcggccgcggggaagaccgggcaggtgactgtcttctggggccggaacaaggccgagggcacgctccgagaggcctgcgacacgggcacgtacaccatcgtcgtcatctccttcctcaacgtctcggccggccccggcaacagcccgccgagcctggacctctcgggccaccccgtcgccggcatcggcgccgacatcaagcactgccagtcgaagagcatcatggtgttcctctccctcggcggccggcagcactccctgccgagcgccgaggccgccgcggacctcgccgactacctctggtacgcctacttcccggcgccggcgccgcgcgccggcgtgcgccgcccgttcggcgacgcgtacgtcgacggcctcgacttcttcctcgaccgcggcggccgcccgccgccggaccacctcgacgcgctggccgcgcgcctgtggagctacaaccggcagttccgcgcccgcacgcccgtgcagctgtcggcgacgccgcggtgcgcgttcccgccggacgggccggcgctgcggctgctcgccacggggctcgttacccgcgtcaacgtcaggctctacggcgacgcgcgctgcgccgcgtactggcagcaggagtgggacaagtgggccgcggcgtacccgggctccgggctctacgtcggcctgccggcgtcggagcggacggtcgggtacgtgcaccccaagaacctgtactacggcgtcctcccggtggtgcagaaggcgcccagctacgccgggatcatgatctgggaccgctacgccgacaagcagaccaactacagcagctacgccattcaatgggcttga

SEQ ID NO: 142750 - DNA, 1872 bp, Zea Mays
tcaccgggccgtcccactgccccagcccagacagacgttacggcagccgaacgcggtccgcgaggcccagttccgtactgtttgtatctcaggagtgtatggcccacataactcacggcccatagctcttcgcctctttccccttcccctgcctctactaaagaaacgcccgacggcagcctccgcttcctcctacagcttcacacttccccagcagagcaggcaaaccgctcccagtcccagtctctcacctgaggtgactggcgtctcttgtcgcaagccgccagaagcttcggcccctgacgcgtgggggccccgtccgcccccgcccccgtccccacgttgccggccatggcggggcagccaccgccgtccggggcctccgaggacgacttcctcgagcacttcttcgccttcccctccgcggcctccgccggcgctgccgggggccacgcgggcgccggtgttggcggggaccaccccttccccctcgccctcagcctcgacgccgccgccgaggccaagccggaccgtgatcccgtgcagctcgccggcctcttcccgccggtgttcgctggcgccggcggcgtgcaccagccgcacctccgcggcccaccgcctccgcagatgttccaggcgcagccgaagccgggcgagggaggcatggcgccgcagccgccagccccgcggcccaaggtgcgcgcgcggcgggggcaggccaccgatccccacagtattgcggagaggctaaggagagagagaattgcagaaaggatgagggcattgcaggaattagtccccaacacaaacaagacagatagggcagccatgctagatgagatccttgattatgtgaagtttcttaggcttcaagtaaaggttctgagtatgagcagactgggcggtgctggcgcggttgcgcagctggttgctgatattccactctcagttaagggcgaggcaggcgacggcgggggggcgccgcagcagcagcagcagcagcacgtgtgggagaagtggtcgacggacggcacggagaagcaggtggcgaagctgatggaggaggacatcggggcggcaatgcagttcctccagtccaaggcgctgtgcatgatgccggtctcgctcgcgatggcgatctacgacacccagcaccccctggacggccacggccactcgctgaagcccgagcccaacgcgtcatcctagtacagtaacgtcgtccttagcgtgccttccaattccaacacccaccccccttctccctaaaaagtactgttaggcgccgatattatccggaagaaaaaaagaagtgtatgatataccgagcgtgcgtttccagtgtgctgacccgtgggataggaaaggaccgaaaattgttggtatatgatgattatgtagcctcctgtttgcctgttctgtttcaaatcaaagcaatgctcatgcatccaggtttcaatgtgcctatgagtgcaagtgatgggcagcagagagtctggcactgctctcatgctgcctgtttccctttgggcggtgtagtgcactggccatagacttgggtgggtggtggtagggccgcccgccggtcgccccttttggtagtgggtgtttggaccaatggaaagaggctgctgatgtatgtgctggtaattctgagcgagcaaacggttgacgaaatctgaaagaatgtggtggtggtggtggtgggtggtgatagcttgtctttttattttattttaaaaaaaatagagtgggagcggaggtctgggtcaatggaggcccgagcgtgcgatgatcggctgggcgctagtggggagcgtgctcctccgggtcttggcttttctgcctacaagtcgccgtcttgataagaac

SEQ ID NO: 142751 - DNA, 1287 bp, Zea Mays
cagcaaaccccctctgtaccctccgggcaatcgggcatgaatccacccatccgcgatgctacatggagctcagcaagcctcggcgtcgtcgaccgcaggcccgcgccccaagagcactgctatcctgcagtctgatcagccacctcgcgccgccgccgcgcgggaggggggccgcggcggcacgggtccggagtcgcttgtgcgcggctcggtcgtcgcgccgtgcgtcagctgcggcatctgcggcggactcctccgtgacgccaccgccttcaccgagtgcctacacgccttttgcaggaaatgcatatatgacaaggttgcgaaagacaacataaagtgttgcccgaagtgtggcatttttatgggaaatccgttggagaagctcagacctgatcatagcctggaacacatcaggccactgatatttcctgctaagaggcgcaaggttgtcaccatgaagaagaggaaggaaagggtgtcctctgaatcaacccttccttcagtggtgggtaccactgcagaagaaagcactgcactgatacctgctgcttcagaaagtaaggcacaaaaggatcttactcctgtcggaagagatgctttgtcacgaattaggggtcgagactttgactcagcatgtggtcttactgaggatactggagccttgattgtatggcaagcaccacctattctagaggagacggctgcccacaatcagttagactccaagcaggacccagatagtttcaggcctccggcgacctctgatattgagtaccagcgacaaggaccaactgcacaaatgaccaatatttcgtttatggttgggaactcatcccatgcaaggccgactgaccaggatgatgaaaacatgagaggagatattctcacattgatcaatgaggtcttagtaaaaaggagcttcaagatctcgtgcaggagggcgcaaagttgttgatgaaagctgcttgtgctaagctgggaaatggagatgaagaccgcgatgaagatgatgacgaggaaagggatcgtcagcatgaataaggaaaacatgtcttgcctgggtgtccctctgtcctgtatctcaagtggatttgcattttgtcaaaactagtgtgttagctcgtttgtgatttgtgattttaggtcattgctgatcttggttcttgtttgttcctgggtcctgaatcaggcctgcatgcctagctggaaaactgttgttagtccagtaggtctcgttttgcggtgatcatgttcatctgcatgtttctctgattcctgggttgc

SEQ ID NO: 142752 - DNA, 1200 bp, Zea Mays
ctcagtctcaccggcacctcttcaatcccagtcccacacaaagtttctcctcgatcctcatctcctccctctctcgagtcaagagcagagcagctaccaaacaagctctcctttcgcttccgatccatggagctcgacgccgacaacctgagcgccaccgagctccgcctcggcctgcctgggaccagcagcagcagcagcgacgactggcagaagaagccgtcgccctccgtcggggccaagcgcgctctggacgacggcaccaagagcgaggcctcggggaccagcccggccgccagagacctcgacttcgaccacgaccacgacaccgccgcgcctcccaaggcgcaagtggtcgggtggccgccggtgagggcgtacaggaagaacaccttccaggcggcggcggcggccaagaaggtcgagcagaagcagaagcagcagcagcagggaggcctgtacgtgaaggtgagcatggacggcgcgccgtacctcaggaaggtggacctccggatgtacaaggggtacagggagctcagggaggctctggacgcgctcttcaccaactccttctccgcggcggcagagggcggcggcgaccaccaccagcacgccatcgcctacgaagacaaggacggcgacctcatgctcgccggagacgtgccctgggagtaagtacaccgtcgggttcggatcagcaagcatgctgctccgttctgtggatctgaggatacgtttggtgaacagaagcctgattaattgtgattcttaatttcaccccctttgcagtatgttcatctcttcgtgcaagaagctcaggataatgaagggctctgcctctgaggccaggtgatcgctgatccatacataaacagaggctacagacacgccacctgggaacgcggatccaagagcacacacggatcgtacttgacgaggaaggagggaggagcagtgtggcttgagctctccagtgttgtacaaagacatgtttctttctgaacccaaaagggagaaagatgtatgaagcgtgtatataagatcttagctagcagtttgttttcatttgtatgagcgatcgaaggctgtaaaaaatgaaaaagaaaaaagaaaagggaatgagaaattgactaaagctggtcatttttcctctccacaggctcaactctgtatgagaaaaaaaagacatttttccggtca

SEQ ID NO: 142753 - DNA, 1091 bp, Zea Mays
gcgcggggtctcagtctcaccggcacctcttcaatcccagtcccacacaaagtttctcctcgatcctcatctcctccctctctcgagtcaagagcagagcagctaccaaacaagctctcctttcgcttccgatccatggagctcgacgccgacaacctgagcgccaccgagctccgcctcggcctgcctgggaccagcagcagcagcagcgacgactggcagaagaagccgtcgccctccgtcggggccaagcgcgctctggacgacggcaccaagagcgaggcctcggggaccagcccggccgccagagacctcgacttcgaccacgaccacgacaccgccgcgcctcccaaggcgcaagtggtcgggtggccgccggtgagggcgtacaggaagaacaccttccaggcggcggcggcggccaagaaggtcgagcagaagcagaagcagcagcagcagggaggcctgtacgtgaaggtgagcatggacggcgcgccgtacctcaggaaggtggacctccggatgtacaaggggtacagggagctcagggaggctctggacgcgctcttcaccaactccttctccgcggcggcagagggcggcggcgaccaccaccagcacgccatcgcctacgaagacaaggacggcgacctcatgctcgccggagacgtgccctgggatatgttcatctcttcgtgcaagaagctcaggataatgaagggctctgcctctgaggccaggtgatcgctgatccatacataaacagaggctacagacacgccacctgggaacgcggatccaagagcacacacggatcgtacttgacgaggaaggagggaggagcagtgtggcttgagctctccagtgttgtacaaagacatgtttctttctgaacccaaaagggagaaagatgtatgaagcgtgtatataagatcttagctagcagtttgttttcatttgtatgagcgatcgaaggctgtaaaaaatgaaaaagaaaaaagaaaagggaatgagaaattgactaaagctggtcatttttcctctccacaggctcaactctgtatgagaaaaaaaagacatttttccggtca

SEQ ID NO: 142754 - DNA, 1339 bp, Zea Mays
ccaccctataaagcgcggggtctcagtctcaccggcacctcttcaatcccagtcccacacaaagtttctcctcgatcctcatctcctccctctctcgagtcaagagcagagcagctaccaaacaagctctcctttcgcttccgatccatggagctcgacgccgacaacctgagcgccaccgagctccgcctcggcctgcctgggaccagcagcagcagcagcgacgactggcagaagaagccgtcgccctccgtcggggccaagcgcgctctggacgacggcaccaagagcgaggcctcggggaccagcccggccgccagagacctcgacttcgaccacgaccacgacaccgccgcgcctcccaagtaagaactagaccccccatgtacacgctcccagctcccttcgtaggcaccgcctgcatcaagattcaattcaagagacaggggtgcatgggctaacctgcctttttcgcttcgtcagggcgcaagtggtcgggtggccgccggtgagggcgtacaggaagaacaccttccaggcggcggcggcggccaagaaggtcgagcagaagcagaagcagcagcagcagggaggcctgtacgtgaaggtgagcatggacggcgcgccgtacctcaggaaggtggacctccggatgtacaaggggtacagggagctcagggaggctctggacgcgctcttcaccaactccttctccgcggcggcagagggcggcggcgaccaccaccagcacgccatcgcctacgaagacaaggacggcgacctcatgctcgccggagacgtgccctgggagtaagtacaccgtcgggttcggatcagcaagcatgctgctccgttctgtggatctgaggatacgtttggtgaacagaagcctgattaattgtgattcttaatttcaccccctttgcagtatgttcatctcttcgtgcaagaagctcaggataatgaagggctctgcctctgaggccaggtgatcgctgatccatacataaacagaggctacagacacgccacctgggaacgcggatccaagagcacacacggatcgtacttgacgaggaaggagggaggagcagtgtggcttgagctctccagtgttgtacaaagacatgtttctttctgaacccaaaagggagaaagatgtatgaagcgtgtatataagatcttagctagcagtttgttttcatttgtatgagcgatcgaaggctgtaaaaaatgaaaaagaaaaaagaaaagggaatgagaaattgactaaagctggtcatttttcctctccacaggctcaactctgtatgagaaaaaaaagacatttttccggtca

SEQ ID NO: 142755 - DNA, 5028 bp, Zea Mays
cttttcagtactgttattttaacttttgttcccctatataggcatatatctgattgatatgctgaccaatgatttttcaggaacaagaagatgcagagcaaagccacaaaagaaggaagaggaatccacagaaaacaacaagctggagaatggatctctggatgcaacagaagaggtgcatcatggagtcgaaaaaggtgatggacatgttacccgcaagagaccaaggagatcagcggcctgttctgatttcaaagagaaatccatacgcttatccgaaaaaaaatctgttgtcatggtcaagaagaatcggatggaggaggaagaagtagatgctgtcaatctgacaaaacttggaccagaagatccaccaccttgccggaagttgatcgattttatcttgcatgatgcagaagggaacccacaaccctttgaaatgtcagaaattgatgacttctttataacagctcttatcatgcccatggatgatgatctagaaaaagagcgtgaaagaggagtacgctgtgaaggatttgggcgaattgaggactggaatatttctggttatgatgaaggtactcctgtaatctgggtgtcaactgatgttgctgactatgaatgtgtgaaaccatcaaccaattacaaatcttattttgaccacttctatgagaaggctcaggtgtgtgttgaagttttcaaaaagcttgcaaaatcagttggtgggaatcctaaccagggcctggatgaattgcttgctagtgttgttcggtcaaccaatgccatgaaaggatatagtggaaccatgagcaaagatttggtgatatccattggagaatttgtatacaatcaacttgttggtttggatgagacatcaaacaatgatgatgaaaagtttgctaccctgccagttcttctttctctaagagaccagtgcagatctagggtggaactgaccaagttgccctctaacttctcgaacacaagtctgaaaattaaggactcagagtgtgatgagacagcagaagacgatgatgatgcaaaattagctagattacttcaacaagaagaagaatggaaaatgatgaagaaacagaggggtaggcgtggaacaccatcccagaaaaatgtctacataaaaatcagtgaagctgagattgccaatgactatccccttcctgcatactataagccatttagccaggaaatggatgaatacatatttgatagtgatgacagcatattttctgatgatgtgccagttaggatactcaataactggacactgtacaatgcagattccaggcttatatctttggaattgatccctatgaaatcaggggcagaaaatgatgtggttatctttggatctggtttcatgagagatgatgatggcagttgctgttctacagctgagtctgtgaaatcttcgtcttcctccagcaaagctgaccaactggatgcaggaatccctatttatttgagcccaatcaaagaatggattatagagtttggtggctcaatgatttgtataaccattcggactgatgtggcctggtacaagctacgccaaccaacaaaacaatatgctccatggtgtgagcctgtactgaaaacagcaaggcttgctgttagcatcattaccctgttgaaagagcagagtcgtgcctcaaagctttcttttgctgatgtcataagaaaagtagctgaatttgacaaaggaaaccctgcatttatatcttcaaacatcacacttgttgagagatatattgtggtgcatggacagataatactccagcagtttgcagattttccagatgagactatccgtcggagtgcatttgtcagtggtcttttattgaagatggaacagaggaggcatacaaagttagttatgaagaaaaaaactcaagtgatgaggggagagaatctgaatccaagtgcagcaatgggtccagcatcgaggaaaaaagcaatgcgtgcaacaacaaccaggctcatcaacagaatctggagtgattactatgcacatcatttccctgaagattccaaggagggagatggaaatgaaacaaaagaaattgatgatgaacaagaagaaaatgaagatgaggatgctgaagatgaagggcagattgaagagaacatctcaaagactcctccatcaacacggtcccggaagttgctatcacaaacttgtaaggaaatcagatgggaaggtgaaacatctgggaaaacattgtctggagaaactctatataaatgtgcttatgttagggaactcagaatacctgttggtggaacagtggctctagaagatgattcaggagacacagtcatttgttttgttgagtacatgttccagaaagttgatggttcaaaaatggttcatgggaggattctgcaaaaaggttcacagacaattcttggcaatgcggcaaatgagagggaggttttcttaactaatgactgcttagaattcaaattagatgacatcaaggaattggtaatggttgatatccaatcaaggccttggggtcacaagtacagaaaagagaattctgaagctgataaagttgagcaggtcaaagcagaagagagaaagaaaaagggccagcccatggtatatttctgcaaaagcttgtactggcctgagaagggtgccttctttgccctctcccgagataaaatgggtcttggtagtggtttatgtagttcttgtgataatatagagccagattctgatgaattgaaaatattctcgaagaccagctttgtctacagaaaggttacatataatgtcaatgagtttttatacataagacctgatttttttgctgaagatgaggatcgtgcaaccttcaaggctggccgaaatgtgggtctaaagccctatgcagtttgtcaaatattgtccatccctgaaggggctggatctaaaaaactcaatccagcatcagcaaatatcagtgctagaagattttacagaccagatgacatttcatcagccaaagcctatgcatctgacatcagagaggtctactatagtgaggatgtaattgatgtgcctgtggatatgatagagggaaaatgtgaggttagaaagaagaacgatcttgcaagttcagaccttccagtgatgtttgaacatgtatttttctgtgaacttatatatgaccgtgccagtggagctctcaagcagttgcctccaaatgttaggtttatgtctatggtgcaaaggacaagtgcgttgaaaaagaacaaaggaaagcagatctgtgagcctgatcaaatagattcaggtaaatggttggatgtgcctaaagagaaccgtctagctactcttgacatttttgctggctgtggaggtttatcagaagggctgcagcaagctggtgtatcttttacaaaatgggcgattgaatacgaagagcctgctggtgaagcatttaataaaaatcatccagaggctgtggtctttgtagataactgcaatgtgattctaaaggcaattatggataaatgtggggatactgatgattgtgtttcaacttctgaagctgctgaacaagcagcaaaacttccagaagtgaacattaataatcttccagtccctggcgaagttgaattcataaatggtggtcctccgtgtcagggattctctgggatgaatagattcaaccaaagcccatggagtaaagttcagtgtgagatgattctagcattcctctcattcgctgagtatttccgtcccagattctttctgttagaaaatgttcggaactttgtttccttcaacaaagggcagaccttccgtttggcagttgcatctcttctggagatgggataccaggtccggtttggaattctagaagcaggggcttttggtgttgcccagtccaggaaaagggcgtttatttgggctgctgcacctggagagatgcttcctgattggccagagccgatgcatgtgtttgctagccctgagctgaagataacactgcctgatggccaatactatgcagctgcaagaagcactgctggtggagcgcctttccgagcgattactgttagagatacaattggggatctgcctaaagtgggaaatggtgccagcaaactcacgcttgagtatggaggtgagcccgtgtcttggttccagaagaagataagagggaatatgatggtactgaatgatcacatatctaaggagatgaatgagctgaacctaataaggtgccaacacattccgaaacggccgggttgtgattggcatgacctaccggacgagaaggttaagctgtcaaatgggcagatggctgacctgataccttggtgcctgcccaacacagccaagaggcacaatcagtggaaaggactgtacgggaggctggactgggaaggcaacttccccacatccgtcactgatccccagccaatgggcaaggtcggcatgtgcttccaccctgatcaagacaggatcatcacagtccgggaatgtgctcggtcacagggctttcctgacagctatgaatttgcgggcaacatccagaacaagcaccggcagattggcaatgccgtgcccccgcctcttgcctatgcacttgggaggaagctgaaggaagccgttgacaagcgtcaggaagccagcgcaggcgtgcctgcaccatgagaagttttccttccatcaaaccatgacccatgaagctaagcgctgaggtcgtccttgaggaccagttaattttggttttatcagtcttaatgcactcctgaatgtatatgttagagaagtgtcgattgctgattgttaccctgattcagggtagcggttatatctaaaaacttgagaaaatctagtgtactctagttgtcatgtgttccattttgttggctctaaactttcaactagttttggtgattaatgacaacatgagattaaattaaattttgtagaggcatttaaattaggccactaatagtgactatttagtcgctcaatttttttgcccctaattatggaatttgtttttt

SEQ ID NO: 142756 - DNA, 3442 bp, Zea Mays
cttttcagtactgttattttaacttttgttcccctatataggcatatatctgattgatatgctgaccaatgatttttcaggaacaagaagatgcagagcaaagccacaaaagaaggaagaggaatccacagaaaacaacaagctggagaatggatctctggatgcaacagaagaggtgcatcatggagtcgaaaaaggtgatggacatgttacccgcaagagaccaaggagatcagcggcctgttctgatttcaaagagaaatccatacgcttatccgaaaaaaaatctgttgtcatggtcaagaagaatcggatggaggaggaagaagtagatgctgtcaatctgacaaaacttggaccagaagatccaccaccttgccggaagttgatcgattttatcttgcatgatgcagaagggaacccacaaccctttgaaatgtcagaaattgatgacttctttataacagctcttatcatgcccatggatgatgatctagaaaaagagcgtgaaagaggagtacgctgtgaaggatttgggcgaattgaggactggaatatttctggttatgatgaaggtactcctgtaatctgggtgtcaactgatgttgctgactatgaatgtgtgaaaccatcaaccaattacaaatcttattttgaccacttctatgagaaggctcaggtgtgtgttgaagttttcaaaaagcttgcaaaatcagttggtgggaatcctaaccagggcctggatgaattgcttgctagtgttgttcggtcaaccaatgccatgaaaggatatagtggaaccatgagcaaagatttggtgatatccattggagaatttgtatacaatcaacttgttggtttggatgagacatcaaacaatgatgatgaaaagtttgctaccctgccagttcttctttctctaagagaccagtgcagatctagggtggaactgaccaagttgccctctaacttctcgaacacaagtctgaaaattaaggactcagagtgtgatgagacagcagaagacgatgatgatgcaaaattagctagattacttcaacaagaagaagaatggaaaatgatgaagaaacagaggggtaggcgtggaacaccatcccagaaaaatgtctacataaaaatcagtgaagctgagattgccaatgactatccccttcctgcatactataagccatttagccaggaaatggatgaatacatatttgatagtgatgacagcatattttctgatgatgtgccagttaggatactcaataactggacactgtacaatgcagattccaggcttatatctttggaattgatccctatgaaatcaggggcagaaaatgatgtggttatctttggatctggtttcatgagagatgatgatggcagttgctgttctacagctgagtctgtgaaatcttcgtcttcctccagcaaagctgaccaactggatgcaggaatccctatttatttgagcccaatcaaagaatggattatagagtttggtggctcaatgatttgtataaccattcggactgatgtggcctggtacaagctacgccaaccaacaaaacaatatgctccatggtgtgagcctgtactgaaaacagcaaggcttgctgttagcatcattaccctgttgaaagagcagagtcgtgcctcaaagctttcttttgctgatgtcataagaaaagtagctgaatttgacaaaggaaaccctgcatttatatcttcaaacatcacacttgttgagagatatattgtggtgcatggacagataatactccagcagtttgcagattttccagatgagactatccgtcggagtgcatttgtcagtggtcttttattgaagatggaacagaggaggcatacaaagttagttatgaagaaaaaaactcaagtgatgaggggagagaatctgaatccaagtgcagcaatgggtccagcatcgaggaaaaaagcaatgcgtgcaacaacaaccaggctcatcaacagaatctggagtgattactatgcacatcatttccctgaagattccaaggagggagatggaaatgaaacaaaagaaattgatgatgaacaagaagaaaatgaagatgaggatgctgaagatgaagggcagattgaagagaacatctcaaagactcctccatcaacacggtcccggaagttgctatcacaaacttgtaaggaaatcagatgggaaggtgaaacatctgggaaaacattgtctggagaaactctatataaatgtgcttatgttagggaactcagaatacctgttggtggaacagtggctctagaagatgattcaggagacacagtcatttgttttgttgagtacatgttccagaaagttgatggttcaaaaatggttcatgggaggattctgcaaaaaggttcacagacaattcttggcaatgcggcaaatgagagggaggttttcttaactaatgactgcttagaattcaaattagatgacatcaaggaattggtaatggttgatatccaatcaaggccttggggtcacaagtacagaaaagagaattctgaagctgataaagttgagcaggtcaaagcagaagagagaaagaaaaagggccagcccatggtatatttctgcaaaagcttgtactggcctgagaagggtgccttctttgccctctcccgagataaaatgggtcttggtagtggtttatgtagttcttgtgataatatagagccagattctgatgaattgaaaatattctcgaagaccagctttgtctacagaaaggttacatataatgtcaatgagtttttatacataagacctgatttttttgctgaagatgaggatcgtgcaaccttcaaggctggccgaaatgtgggtctaaagccctatgcagtttgtcaaatattgtccatccctgaaggggctggatctaaaaaactcaatccagcatcagcaaatatcagtgctagaagattttacagaccagatgacatttcatcagccaaagcctatgcatctgacatcagagaggtctactatagtgaggatgtaattgatgtgcctgtggatatgatagagggaaaatgtgaggttagaaagaagaacgatcttgcaagttcagaccttccagtgatgtttgaacatgtatttttctgtgaacttatatatgaccgtgccagtggagctctcaagcagttgcctccaaatgttaggtttatgtctatggtgcaaaggacaagtgcgttgaaaaagaacaaaggaaagcagatctgtgagcctgatcaaatagattcaggtaaatggttggatgtgcctaaagagaaccgtctagctactcttgacatttttgctggctgtggaggtttatcagaagggctgcagcaagctggtatgtattgttaacactgatgctgtataccatgaacatgaccaacaaat

SEQ ID NO: 142757 - DNA, 618 bp, Zea Mays
gttgttggtcggggctgtcggctgagttttgggggtctcgagtagtggatccgcgtggtcccggtggtgagccgtgcggcggcggccgccgccgcttccgtcgttcgagttctccgtccgggtgggggcttagccatttcggaggattagcttccggatccgctttgctgctgcttgtgcttatgtggcgatttgagcggggattcgagcggtctcaccttcgagatttccgtcggagtgttcttcagcttcatcttagagcagcagatttttgcgtgggggattcctgttcttccccatcaattgcttgctgcgccagtatcccagcactaattgccttcagctgggtgacatggtgaaaactccgagatctcctgttaccacagcacttatggccattctaggtgcagcaggaggcaatgacaaagcttcaaagtgtggttgtgatattgacaatggtgaggctgggccatcattggtggtggtggagcaacaagcactagccactttgtagcaaacatgtggtcactagcatggtcatttgacttaatcattaactagacaatacactgacgaatgaaccagtgtaacatttaaatggaagtttattatcacaca

SEQ ID NO: 142758 - DNA, 530 bp, Zea Mays
gttgttggtcggggctgtcggctgagttttgggggtctcgagtagtggatccgcgtggtcccggtggtgagccgtgcggcggcggccgccgccgcttccgtcgttcgagttctccgtccgggtgggggcttagccatttcggaggattagcttccggatccgctttgctgctgcttgtgcttatgtggcgatttgagcggggattcgagcggtctcaccttcgagatttccgtcggagtgttcttcagcttcatcttagagcagcagatttttgcgtgggggattcctgttcttccccatcaattgcttgctgcgccagtatcccagcactaattgccttcagctgggtgacatggtgaaaactccgagatctcctgttaccacaggtgcagcaggaggcaatgacaaagcttcaaagtgtggttgtgatattgacaatggtgaggctgggccatcattggtggtggtggagcaacaagcactagccactttgtagcaaacatgtggtcactagcatggtcatttgactt

SEQ ID NO: 142759 - DNA, 223 bp, Zea Mays
gcgagcgacgtcacggaaggcgcaagatgcgagcagcgatgatcgcgcgtgacatcttccgatccggcgcagtttgggcagcccgagtgacgacctacatttgtgcttgtgtcatcgacgatgtcctccggccactacctccttcgattcgtgttttatttttgattattgtgttttatgcctaccacatgtattatttaggctaaaaattgtacgattttat

SEQ ID NO: 142760 - DNA, 707 bp, Zea Mays
attagatattagcatgagaagtttgtatatctgtatagtaacttatgtcagatctaatgtactatgagtcattctttattagatattgagatattacctgcatgttagacatcagtgtgtgagacttttatgtggcttttcccctttccttgtacaaatcctatagtaggcttttatgtggcacaaacctgcagtaagatgcgccttattcccttttgctttgtaatctgcttgttattaatatgcctcgttgactacacagttcagcctaaatccccaaccattatagaagatgttctggacttctacgtctaaagttaactaacggtctaggatctgcttccatttacacttttttacttcaagagagtaagtagttgccagagcactttttccacatatttgtggataataagtagacatcaaactagatcacctggacaacagagaataaggtggcataactttagcaaaaaaatagctaaagttatgattctctttatgaattttcatagagattgtgatgtcaaatatctaagaagaaacgcatggaaaacttctatattgatagagtagtttcgttgcagaaaaaaaatactatattgaaacgtgtttgaggcgagaggcatatctttgctttctgaagtcctgttttctaccataggttgggttgtactaatgttcagaagatgcatcctactgcaggt

SEQ ID NO: 142761 - DNA, 918 bp, Zea Mays
agggcgccgcccctcccgcctgggtgcgtcgtcgcgctcacgccccacgccgggtagctttaacctccggcgccggctcggtatatcgccgcccatcccccaccctcaccccagacgccggctcggcagatcaccgcccctcccactgggcaagccgttgtgtgcacgccccacccgcgtagcttcacccccggcaccggctcagcagctcaccggccccacccgcatagcttcaccccctgcacgtggctcagcaggtcactgcagtgcccctgagacccggtgccgtcctgttggatcgaagcttctagatgacgccagatggacagcagaagcccaatcccctccatcgcttcatcccgttgagttgcatatgccaccagaagccccatcccctccctcgctcaagtggcatcgcgactctgcggtaagggcggcagctcatccacagcgatgacggtgacgtcggggacgcgggaggtggcatcagggacgtgctgtccgaaaaggtgcagggcgtcattgagcgtatgatcgaagtcatgcgtagggtagggacccaggcgtcaacctctccgcccgcagattgacgtcccgctccgggtatgtctgattcttcgattcgccttgggagttctgttactggcattcaatcatcgatgacacccaattaatcatggaattgcatattattgttctcgaggatacataggagtacatctatgcaccgccgcccattaagcatttggtcacgccctgtgcttttccttggagatagatcattatcaatcccaataacaattaaaagaactgtggtgttctttgatggatgtctcatgtacacagtagaacaattggtactttgtatatgaaaatacttttattctatgaatacaacagcggtaccaaattgtgtta

SEQ ID NO: 142762 - DNA, 1367 bp, Zea Mays
gtctcatcagtcatcacccaccgcctccgccgccgacaacagcgtagtgtagtgtagttccggagagggttggggagagtagtagtgatccgcaatgtcgacggaggaggctgttgtggctgaggtcccggtgaccgaggtgccagcggaggtcccggcggcccaggtggccgaggcgcccaaggcgaagaaggcgcccaaggagaagaaggcgcctaaggagaagaagctttccgcggcgaagaagccggcggcgcaccctccctacgctgagcggcaagctccccaccaacttccgcaagcagctcactgtgcagctgaagaagctcgctgccgccggcaagctgacgagggtgaagaactccttcaagctgccggccaccgacgccaagcccaaggccgccaagcccaaggcacccaaggccgcgcccaagcccaagccctcgccgaaggcgaaggccaagaccgctgcgaagcccaaggcggcgtcgcccaaacccaaggccaaggccaaggccaagcctgtcgctcctgccgccgcgtcgcccaagccccgcgggcgccctcccaaggtcgccaagacctccgccaaggcctcccccgccaaggcagccaagaaggcggctgctcctgccaagaagggaaaggcagcggcggctcctaagaaggtggcaaccccgaagaaggctgctgctgctgccgccccggccaggaagggcgtggccaggaaggccaagaagtagtctgcctgccttgtcgctggcgagatccccccctcaattccgcctatagattcccctctttcatggattttgatccaatcgtaatattgtcagtagctctagattcgtcggtagctccagcatgagtgtcggtggtagttctgtgcctgtaaaaacttgggatagttgatcgcgtgtgatcagccgtcatgctcctccagtctctatgaacaagctaagctataatagtattttgctatcctatgatccccgggttgttggcttattgttgtcaatatttttttggttgcatctggtttggatttctgttttttaaattgttggatcggttgattttgttggatttagaagaatcctggcattgcattaagttcggacttttggtttctgcttttcatgtgattctgtttgttcaattgttagattgattaccctggacaatgaatagcaggagactcatttcggtttcattgtcaactgcatcagagtttctaagtaaaaaattcagtagtgagattctttgctgcattcgaagtgctgagaatccatcaaccaatcatcctaaacctaaacctacgatataaagtctttcatgctctaaccattatttttcgaaatgaaaaa

SEQ ID NO: 142763 - DNA, 1332 bp, Zea Mays
gtctcatcagtcatcacccaccgcctccgccgccgacaacagcgtagtgtagtgtagttccggagagggttggggagagtagtagtgatccgcaatgtcgacggaggaggctgttgtggctgaggtcccggtgaccgaggtgccagcggaggtcccggcggcccaggtggccgaggcgcccaaggcgaagaaggcgcccaaggagaagaaggcgcctaaggagaagaagctttccgcggcgaagaagccggcggcgcaccctccctacgctgagatgattgtagaggcgatcgctgccctcaaggagaggaaggggtcgagctcggtggccatcagcaagtacgtcgaggggaagcatggcggcaagctccccaccaacttccgcaagcagctcactgtgcagctgaagaagctcgctgccgccggcaagctgacgagggtgaagaactccttcaagctgccggccaccgacgccaagcccaaggccgccaagcccaaggcacccaaggccgcgcccaagcccaagccctcgccgaaggcgaaggccaagaccgctgcgaagcccaaggcggcgtcgcccaaacccaaggccaaggccaaggccaagcctgtcgctcctgccgccgcgtcgcccaagccccgcgggcgccctcccaaggtcgccaagacctccgccaaggcctcccccgccaaggcagccaagaaggcggctgctcctgccaagaagggaaaggcagcggcggctcctaagaaggtggcaaccccgaagaaggctgctgctgctgccgccccggccaggaagggcgtggccaggaaggccaagaagtagtctgcctgccttgtcgctggcgagatccccccctcaattccgcctatagattcccctctttcatggattttgatccaatcgtaatattgtcagtagctctagattcgtcggtagctccagcatgagtgtcggtggtagttctgtgcctgtaaaaacttgggatagttgatcgcgtgtgatcagccgtcatgctcctccagtctctatgaacaagctaagctataatagtattttgctatcctatgatccccgggttgttggcttattgttgtcaatatttttttggttgcatctggtttggatttctgttttttaaattgttggatcggttgattttgttggatttagaagaatcctggcattgcattaagttcggacttttggtttctgcttttcatgtgattctgtttgttcaattgttagattgattaccctggacaatgaatagcaggagactcatttcggtttcattgtcaactgcatcagagtttctaagtaaaaaa

SEQ ID NO: 142764 - DNA, 1580 bp, Zea Mays
tctcagatccaggttctctctccctttcaactccggtggcggcgagagcaagtagcacaaacttatgtgaaagcgactccaaactacgatggatccccagatctggtgacggcgagggaaagtaacatagacttcagtggcagtggctctagactacaacgcaccccgagcggatcaaccacatagattgattgtgcactgacatattattcataggaccactaatgcgtatcctctcagatccaaactctctcacccttttcagatctagtgacattgagggcaagtagcaagagtttggcagcagtcgtggactacgacggatccaaacaagtcaacctctcagatctgatctggtgactacaaggtcaagcagcacaaactttggtggtagcagcttcagactacgaaaggagtaataagcaggattcaaagatgatggttacacgagagcatccaatgaggagcagggaatgccagctttgccatgaaaacccgctctcttcgccaagcatgaccaaaatgattgtagaggcgatcgctgccctcaaggagaggaaggggtcgagctcggtggccatcagcaagtacgtcgaggggaagcatggcggcaagctccccaccaacttccgcaagcagctcactgtgcagctgaagaagctcgctgccgccggcaagctgacgagggtgaagaactccttcaagctgccggccaccgacgccaagcccaaggccgccaagcccaaggcacccaaggccgcgcccaagcccaagccctcgccgaaggcgaaggccaagaccgctgcgaagcccaaggcggcgtcgcccaaacccaaggccaaggccaaggccaagcctgtcgctcctgccgccgcgtcgcccaagccccgcgggcgccctcccaaggtcgccaagacctccgccaaggcctcccccgccaaggcagccaagaaggcggctgctcctgccaagaagggaaaggcagcggcggctcctaagaaggtggcaaccccgaagaaggctgctgctgctgccgccccggccaggaagggcgtggccaggaaggccaagaagtagtctgcctgccttgtcgctggcgagatccccccctcaattccgcctatagattcccctctttcatggattttgatccaatcgtaatattgtcagtagctctagattcgtcggtagctccagcatgagtgtcggtggtagttctgtgcctgtaaaaacttgggatagttgatcgcgtgtgatcagccgtcatgctcctccagtctctatgaacaagctaagctataatagtattttgctatcctatgatccccgggttgttggcttattgttgtcaatatttttttggttgcatctggtttggatttctgttttttaaattgttggatcggttgattttgttggatttagaagaatcctggcattgcattaagttcggacttttggtttctgcttttcatgtgattctgtttgttcaattgttagattgattaccctggacaatgaatagcaggagactcatttcggtttcattgtcaactgcatcagagtttctaagtaaaaaa

SEQ ID NO: 142765 - DNA, 1230 bp, Zea Mays
gtctcatcagtcatcacccaccgcctccgccgccgacaacagcgtagtgtagtgtagttccggagagggttggggagagtagtagtgatccgcaatgtcgacggaggaggctgttgtggctgaggtcccggtgaccgaggtgccagcggaggtcccggcggcccaggtggccgaggcgcccaaggcgaagaaggcgcccaaggagaagaaggcgcctaaggagaagaagctttccgcggcgaagaagccggcggcgcaccctccctacgctgaggtgaggtttagtccgttgcgatctagccgattcgttgcttcgttaggatcgtctcctcttatggaatctgttggattgattctgtcgctctgttctgttcatgtccgcgaattcgatattgaatctgagacgcaacctgttgggtctgtctggctgcagatgattgtagaggcgatcgctgccctcaaggagaggaaggggtcgagctcggtggccatcagcaagtacgtcgaggggaagcatggcggcaagctccccaccaacttccgcaagcagctcactgtgcagctgaagaagctcgctgccgccggcaagctgacgagggtgaagaactccttcaagctgccggccaccgacgccaagcccaaggccgccaagcccaaggcacccaaggccgcgcccaagcccaagccctcgccgaaggcgaaggccaagaccgctgcgaagcccaaggcggcgtcgcccaaacccaaggccaaggccaaggccaagcctgtcgctcctgccgccgcgtcgcccaagccccgcgggcgccctcccaaggtcgccaagacctccgccaaggcctcccccgccaaggcagccaagaaggcggctgctcctgccaagaagggaaaggcagcggcggctcctaagaaggtggcaaccccgaagaaggctgctgctgctgccgccccggccaggaagggcgtggccaggaaggccaagaagtagtctgcctgccttgtcgctggcgagatccccccctcaattccgcctatagattcccctctttcatggattttgatccaatcgtaatattgtcagtagctctagattcgtcggtagctccagcatgagtgtcggtggtagttctgtgcctgtaaaaacttgggatagttgatcgcgtgtgatcagccgtcatgctcctccagtctctatgaacaagctaagctataatagtattttgctatcct

SEQ ID NO: 142766 - DNA, 1220 bp, Zea Mays
ctagaagcggggcccacccgaaacgctagacctatcctcttcttcccgtggcacggccaattttgcttccggctgccgctcttctccgccgccgccccgatccccttcctccccaagcccttcaactatccactcccgcgtccccggagaagcggcgagatgtacggcatcctgacctccccctgccctcgagccccgcttctccgcgctctcccgagcccatccgcccgcgcattccccagaacactagccttccccgcgaggcccctcccccgcggtctccgcctgacccctccgcacgccgccgcggaggcatcggcggcagccacggcgttgggcgggcttctggcgtcgccgctctcgactctggaggccgccctgcggggcctcaacctcgcgccccttcgcgcccccgtggcggcggcgatgtcggcggccgtgcggtggctgggagtgtaccgggaggtgctgctcgtcggcgtgctgctctcctggttccccaacatcccctgggaccgccagcccttctcggccctgcgcgacctctgcgaccccttcctcgccctgtgccgtgaggtcatgccccccgtgttcgggcgcaagctcgacctcagcccgcttgttgcattcatggctattgacatcatcatcatgatcctgcgcccgcagccacgcatgtgatgactccctgcagcagtggtacgggttcacttgctctgatgatttcacttgagtacgagtgcacaagttatgctgtcatgctgtgaaagcttattagagcaattgaccatgttatgatgactctgttattgtcattatcttcacattttgcattaagagtgagttagattggtcgtgctatgtatggacattaacttgctggttgcttgtgcaatgatataacatgaattcatcttgtcatgccaggttgcatttcttaatgctacaacagggaacatgtcatttagacatttagttcatgataaagtgatagccataccaattgatatttcttgttcggtaaattcacatgcttgtgcaatgtgtaaactagatttcgtgtacaatgctaagtatttgagaatagcaatgtaaactgcattgatatatgagtgtttatgtgttaacttgtgcgtatgcaatgaatttggtcaggtcttgtggtaaaatttgtttcttgatcctgcatgtggataacctcactttcatgctgtacacaa

SEQ ID NO: 142767 - DNA, 732 bp, Zea Mays
ctagaagcggggcccacccgaaacgctagacctatcctcttcttcccgtggcacggccaattttgcttccggctgccgctcttctccgccgccgccccgatccccttcctccccaagcccttcaactatccactcccgcgtccccggagaagcggcgagatgtacggcatcctgacctccccctgccctcgagccccgcttctccgcgctctcccgagcccatccgcccgcgcattccccagaacactagccttccccgcgaggcccctcccccgcggtctccgcctgacccctccgcacgccgccgcggaggcatcggcggcagccacggcgttgggcgggcttctggcgtcgccgctctcgactctggaggccgccctgcggggcctcaacctcgcgccccttcgcgcccccgtggcggcggcgatgtcggcggccgtgcggtggctgggagtgtaccgggaggtgctgctcgtcggcgtgctgctctcctggttccccaacatcccctgggaccgccagcccttctcggccctgcgcgacctctgcgaccccttcctcgccctgtgccgtgaggtcatgccccccgtgttcgggcgcaagctcgacctcagcccgcttgttgcattcatggctattgacatcatcatcatgatcctgcgcccgcagccacgcatgtgatgactccctgcagcagtgagcaattgaccatgttatgatgactctgttatt

SEQ ID NO: 142768 - DNA, 2256 bp, Zea Mays
cagcaccatacacgcatgacgcatgcacctcgattcccaatttcgcatacccccgatctcccgctcggcaaacatggcgagtgcacctcgctcgccatcccagcttcctgccgtttcaaatcgtgcacgccgctgattcacgggaccacggctggtgcggaggtgcatcacgcaaccattgtgccgcccagttgctcgctggctgcgctgtgccgcgccgttcggcccatccactccaccgccgctcccaccacacaggagtacaagcctacaaggcatgtggcgagggggcagctctggccgccgcacgtgctaggagctggagcggatcatcctagagcggcaccgctccagaagcctcagccgagaggacgcgctcaacctgttcgatgaattgcttcctcaggccagacaggcctcggtgcacgccttcactactgtcctataggccagagcgccgcgttcgcggtgtcccttttcaataccatggcccggtcccgcgtcaatatgatggccaccaacgcttgcgcctttgatatccgcatccgctgcttttgcaatgttgggcgtttggacctcgctgatatcctcatccgctgcttctgcaatgttgggcgtttggacctcgccttcgctgcctttggcctgttcctcaggacaggatggagggtgcagaacgtggtcctcaaccagctaatcaagggtctctgtgatggcaagaggactggtgacgcgatggatatggtgttccgacggatgccggagcttggctatacgcctgatgttttctcttacaatgctcttatcaaggggctctgcgccgagaagaagagtcaagaggctcttgagctgctgcttcacatgacggccaatggcggatacaactgttctcccgacgtggtgtcatataacatagtcattgatggcctctttaaagaaggtgaggtcgacaaagcttacttcctgtttcatgaaatgccgggccaggggtttccacctgatcttgtgacatacagctcagtcattgatggcctgtgcaaggctcaagcaatggacaaggctgaagcatccctacaacagatgctttataaaggtgttatgccaaatactaggccatataacagcttgatccatggatattgctctttaggacagttggtagaggcagtgagactactcaaaaagatgtctggaggtggtcttcaactgaatgttgtcacttacaatatgctgattgactattactgcaagattggaagatgcgcagaagctaggagtatctttgattcaatggttcggaggggtcaaaaacccaatgctaccacctactgcagcttgcttcatgggtacgccaccaaaggagctcttgttgatatgcatgatcttcttgatttgatgattcgagacggtattccaattgaacatcgtgtcttcaacatcttgatttatgcatacgctaaacatgaaacagtagataaggcaatggctgtgtttgcagagatgcgacagaatggtttgaggccaaatttagtcagctaaagcacggtaattgacattctttgcaagacaggcagggtggaggatgatgtgtaccatttcaatcagatgcatggtcagtgaagggttgtctcctgacatcgtatgttttacctcactaatacatggtctctgtaccattggtgaatggaagaaggttggggactgacttttgaaatgatcaataggggcatccatccaatgctgattgcatattcttgaacacaataacggacaaccaatgcaaggaagtgttgtggaagcacaggatttctttgatctggctatacgccctggtgtgaaaccagatgttatttcatataatatactgataaatggatattgcttccatgtgaaggtggatgagtccattaagcaacttgatcatatggtctccattggcttgatggctactttaagaatggaagggttgaagatgcattagctctttacaaatcaagtggagagctatctcaccttgaaggactcttaagatagctggccagccttgatggaaattcttaaattcaaatcgccatcatatcttgtacttgttttttttttgtgtgtgtgtgtgtcttcacaaaaatccttagacactttgggctgaaggctggtagaaaaggtagtgtaatcttggaacgattttgtagagattgggcccgattatcagtggcgctgaagaatcttcgctccagcaaccttcacaggctttaaatt

SEQ ID NO: 142769 - DNA, 514 bp, Zea Mays
tgtaggtgacttttaataatattcccattgccggtcacaaaactcaagtattgtcacagatctttttattagggacataaagaatctattttgtgtggctacaaaggttacccatgctggcagaagcaatctactttcgtgacctgtgttgctggctggtgaaggtagccagcccactgaagactgggtccactgaagaccatcttggtggccacgctcggcgctcggcaggtcgctggaggagaacggaggcatgtaccgcgtcgtctccaaggagtgggaccatgaagatcgagaagatgaccatggcaaggctcagggacgacgacgccgtgcgtcgcgaccttcgcgacatcttcatcttttggttttgaagcacaagagaattggaaatcaacaactggtgtcactggttattcttaagaaccatttgctaccgaatgtagtccaaaggctccttaactcacaaacacatgagacacaaaaatatagaaagaccaaatattctcattca

SEQ ID NO: 142770 - DNA, 840 bp, Zea Mays
atggcctccgccgcggccgccgtggtgccggtcggtcgggaccgtcagctccgcgcgccgcgcacctcctgctcccgccgactgagacagcggaggcggccgccgaccccaacccgcctcgcttccctcgccccagcaccggccaccgcgcctcgcttcgcgcagaggagagcagtcctctgcctgcaggctgcgtgcgctgcgctcgtgtgtgtgtgtctgggcgcggggcggtcggctgtttgtgggggcgaggcagcgagggggcgcggtgggcccggcggtgatgtgtctcgtaggtccatctgtgctcctgatgtcaaggttggagccactgttaaggatttcgtgggtagtcggcctaacatgaggctaaggcccactatatggagtcatgaccagaccaggctcgcctcctggcctgggtcactgtctccatcaagcaccataaagggaggaatcaacaacctcatctgtaggtctgtgatcctgctaataggacctggacctccttgtgacccatcggatccccgaacaaaggagccgggagggaacataaagccccggaggagaaggcgctctccggttacaacaccaagtcttcataacggctccgggcatgaaagatacaatccagacctcaggccaggtgaggttcagaagtcactacgtgtccaggcaagggttgtagtagcccggatcccctcaggtatgaaggggcggacgaagaagactagacgacaccatccattacactctacgcacgacatcgtaccaggctacgccgcaacctacaccaaggcatgtgctccgaatagacgggacaaggtggcaggataa

SEQ ID NO: 142771 - DNA, 297 bp, Zea Mays
ttttatcaactgatacacttccttttatcaactgaacacgccgggccgggtaaaccacagacgatgtcttatcttagtcaaaaaaaaaactgtgccgcgtgcttttgaatatatatatgcaaaaaactgcacttccagtcgtccagacacgagaaaaagaaacgaataggcaatgagacacgatgcccgtttgaaaatcggagggccaagggttcctccacccatcttggcaaatgaaatggacggtactactcagggagagctctaaagcgggagagcagctcttccactcgattc

SEQ ID NO: 142772 - DNA, 195 bp, Zea Mays
atgcttcagagaggtgtaaaaagtacatgcttcatgatacatttacaatgtcaacacacgttatttcagttccagggtgcaccgtacttcatattcttaagttcctccagctgtctgcatgtttccttgtgggtctctaaaagcttatcatacttcaattgcaagtccagcttctctgccttgagcttttcatag

SEQ ID NO: 142773 - DNA, 102 bp, Zea Mays
agtgagattctcaccgactgttgtcacgtttgtgtttctatgttatccattttgaaggatcagaaaaggagtgtgctaatagttcctacgacacacatgata

SEQ ID NO: 142774 - DNA, 112 bp, Zea Mays
cgacaagttactgtaaaatttataagaatcgttttcccttagctaaagagctcattatgcaccctgtaaaatgttatgtacactacatctctgtcgtttttccatagaatcc

SEQ ID NO: 142775 - DNA, 1784 bp, Zea Mays
cggcacatccataaaagacaccattaaatctttggctattagcacgcttctctcctcctaaaccccccatctcagcgagggccccgtcggctagcgccgcatccgcagccgtcgacgcagacccacttcggcagccgcttgcagcgcgtcccttccccgctcccggcgccatggactgcgcaaaggggagggcggtggcggacctctacgacgagctgatggtggagattctctcgcgcgtgcccgtcaaagacctccgccgttgcacgtgcgtgtgcaaatcttggcgcaacctcatcaccgaccccctcaaccgcaagaagcttccccaaaccctggaaggcttcttccacggcgtcgtcgaagggcctctcagctacggccaattcaccagcctgtcggggagcggagaacgcgtgcctccggtcgacccttccttctccttcatcacggcaatgctgcctggcgtggagcacatggtcctcttggattcttgcaacgggctcctgctctttgggtgcatccgggaggacaagttcgggtacatcgtgacaaaccctgcgaccgaggaattgatgactgtgcccaccagctccggctcttgtcctcctccacctttggttcgtggggaaagatatgcgcacacgtttctgatgtttaaccctgctgtctcctcgcacttccacttggtccagatctgggaggataatgcggtgaaggaggtggaaacggtacactcttactcgtctgaaaccaaggcatggagtgacaggtcaagcaagtgggggcgaggtgaagagggcggtgaatggaagctgtggggtgaatccgtgattggattcatgtgtggctgggctttggtcgatggtctgctgcattttcttgtcttcgatcttcagaaacaagagaatgtgataattgcagtggatggggaagggaaaacttgtagtatcatcggctggcatggtaaggatgtggaagcaattgtttttattggtcaatcacaagaccatctacactgcatcggtgtgaatgtgcaattagatctgcgcttcacgcggatgtcgatctgggttcttgaggactatgatacacaagcatggatcctaaagcacaatgtgagctctttacagttctttgaattactgagtcacccaatcagagacttcgatattatggccattcatccagatcacaattcgttcatccttgttcagcactggaaccagaaacttgtatcatataacatggatactcaggaactgcgtggtctctgcaatcttgaaaagggctatgtggttattaccccttacataccctgtttcttggagtcatctgttcttgccaccaaacactgaggttgttgtttctgggggacttctctgcatgttcaacaagagcttgatcatccaagtgttgggcaaactagcagtgtgggtaaatctactagaattaggttgtgcaaagttggattacatgtctttaggtgatctagtctgatgatgctttaatgtcctttcgtaatgctttgagaaagctgtttacaggacaacatggttagttccatgatatataagtgaaaaagctgtttacaggacagcatggttagttctatgatatatcaaattagatcacacttaattgctggccaatatagttattagcttcggtttatattgtgattattcaatattgaatgcacacctatggtattaccctgtgtgttcagcttgttggcttttcccctctgtttttttcttcttaatataatacttcctctgctc

SEQ ID NO: 142776 - DNA, 148 bp, Zea Mays
gtattttttttccttttattattattttagttctgcaatatcacatatgcttcagtccggggttcctaactaattttatggttacttgtattatagcgtgtatgacactcaaaaggccaccttagcttctactacaattgacaagttt

SEQ ID NO: 142777 - DNA, 262 bp, Zea Mays
atccttgccacatgaagtgacgttcttggcgaccccatcaatctcctcgatttggatgtccacgagctcattgagttgttgctcctgcgtcctgagatattctggctgctgctcaacaacgcttcctgttagttccagaggcactgccaaggatctcccccttcatgaggtcatatatgcaggccctgaagttgtccatgctcttatgatcctgagagtcgaggcttaggaagatcagaatttcccagcaccggaggaactg

SEQ ID NO: 142778 - DNA, 314 bp, Zea Mays
aataccaaaactaaaattcccatatattattaatagcattacctaccattacaatgtatataataacagcgatcttaatttttgtttagaagcaggcatgactacactcagccatcgtagagtagcgagcatgagttcgtcccccaatgcagtagtagcacttgttatctttgcatggaggaaaccctacaacgcatcgtgctccgtttccttgcataattccttctttagttggagtagaaacaccgacatcatctgtgacatgacctagtagaaggtataggataagagttcttttagacaaaattgtaagt

SEQ ID NO: 142779 - DNA, 633 bp, Zea Mays
acttacaattttgtctaaaagaaactaaatcactgctaagtttggagtagcatatctttggtgaatacttgctagtgaattggtttccgctatagtatatatatataagtatacactcttataggattatagtatatatatataagtatacactcttctaggatcaatcgtgaggagttcattaaattgtcttgcgacatggagtacagaaagagggtggatgcgctagtgtttttctcgttacttctcctcggatactttgctgctcatgcacatgggaagggtcatgtcacagatgatgtcagtgtttctactccagctaaagaaggaattatgcaaggaaacggagcatggtgcgttgtagggtttcctccatgcaaagataacaagtgctactgctgcattggggggcgaactcatgctcgctactctacgatggctgagtgtagacatgcctgcttctaaacaaaaattaagatcgctgttattatatacattgtaatggtaggtaatgctattaataatatatgggaattttagttttggtattatacttttttccaattcacaaaatttagtcaaaatctaaccaattttttagaggacttaaatataaatatgtttccctataaa

SEQ ID NO: 142780 - DNA, 621 bp, Zea Mays
acttacaattttgtctaaaagaaactaaatcactgctaagtttggagtagcatatctttggtgaatacttgctagtgaattggtttccgctatagtatatatatataagtatacactcttataggattatagtatatatatataagtatacactcttctaggatcaatcgtgaggagttcattaaattgtcttgcgacatggagtacagaaagagggtggatgcgctagtgtttttctcgttacttctcctcggatactttgctgctcatgcacatgggaaggatgatgtcagtgtttctactccagctaaagaaggaattatgcaaggaaacggagcatggtgcgttgtagggtttcctccatgcaaagataacaagtgctactgctgcattggggggcgaactcatgctcgctactctacgatggctgagtgtagacatgcctgcttctaaacaaaaattaagatcgctgttattatatacattgtaatggtaggtaatgctattaataatatatgggaattttagttttggtattatacttttttccaattcacaaaatttagtcaaaatctaaccaattttttagaggacttaaatataaatatgtttccctataaa

SEQ ID NO: 142781 - DNA, 648 bp, Zea Mays
gaggccaccaaaggtaccttgcaatcacaacgaacagaagctctcgatctcaccgacaccgaggaagaagagatcaatggcgtccgagcagggagtcgtgatcgcgtgccacagcaaggctgagttcgacgcccacatgaccaaggcccaggaagccggcaagctggaagtcaccgcggcctacgaggtcgaggcgatgccgaccttccacttcgtcaagaacggcaagacggtcgcgaccatcgtgggtgccaggaaggacgagctcctggcccagatcgagaagcatgccgcgcctgcgcctgcgtctgcgtctgcctaaaggagatcagtcgtcgccgtcaataagggccagcacgtatggctgtaaatgttgtcgttatcagttctggctttgtcgtttgtgggcgattgtgaactagtagtatgtttgtttctatccgagccggaggcgatacttaaccatggatacttgttgtgagttcgtttctgttcgcgtgtgactcttgaattgaatcaaccagctcaccactgcaccaggccgtggtgagtggtgacagtgatttcctgttatcatgaatgatcctatggatggatatagaataatagataaatcacgttgcgctgcaatgggcaagcatatctatc

SEQ ID NO: 142782 - DNA, 771 bp, Zea Mays
gaggccaccaaaggtaccttgcaatcacaacgaacagaagctctcgatctcaccgacaccgaggaagaagagatcaatggcgtccgagcagggagtcgtgatcgcgtgccacagcaaggctgagttcgacgcccacatgaccaaggcccaggaagccggcaagctggtggtcatcgacttcactgccgcctggtgcggtccatgccgcgccatcgccccactgttcgtcgaacacgccaagaagttcactcaggtcgtcttcctgaaggtggacgtggacgaagtgaaggaagtcaccgcggcctacgaggtcgaggcgatgccgaccttccacttcgtcaagaacggcaagacggtcgcgaccatcgtgggtgccaggaaggacgagctcctggcccagatcgagaagcatgccgcgcctgcgcctgcgtctgcgtctgcctaaaggagatcagtcgtcgccgtcaataagggccagcacgtatggctgtaaatgttgtcgttatcagttctggctttgtcgtttgtgggcgattgtgaactagtagtatgtttgtttctatccgagccggaggcgatacttaaccatggatacttgttgtgagttcgtttctgttcgcgtgtgactcttgaattgaatcaaccagctcaccactgcaccaggccgtggtgagtggtgacagtgatttcctgttatcatgaatgatcctatggatggatatagaataatagataaatcacgttgcgctgcaatgggcaagcatatctatc

SEQ ID NO: 142783 - DNA, 2767 bp, Zea Mays
gactgcccccgctccttgcccaacgaaacccccgctcccgcacgccccgccgacctctgctgccgcaacgccgcagccgccgcgaaatccgcacccacccgcgcgacctctactgccgcaaggccgcagccgccgcgaaatttgcacccacccgcgcgccgcagccctttgtccgcgccggagcctagcaccgaaccgccgcggattcgccactacatcaccggccatggcttcgggcatgccacccgcgccctcgaggtccgccgccgctctctccgcccgcttgcagcttgcctgcctggtgccggcgcgtactgtttcctgaccccatcgtctccaggtggtgaggcacctggtcaccgcagggcacgacgtgcacgtggtcatcgccgcgcccgagttcgtcttcaccaccgagatcgcctcccccagcctctccgacaagctcgcgtccccgtccacatccgagatgctcgcgcccgcgccttggatggaagcccagaatcgccttccatcgaggattctacaccacgcgtcgcgccccctccccgcacgcaagcccccgcctgcacattctccgccaccccatcccctgtccggcgcgtgtgccacggcctccctcgaccagcggcacgcgtacgccatcaccccctccctactgctcccatccgcggtgctcaccttcgccatcgcgcaatccatcaaggtcctcaccacctggtataaggagaaccggtgggacgcgaagcagctggtgggctccggtgggatgccgtcctcgcactcagccaccgtcacagcgctcgctgtcgccgtcggcctgtaagaggggctcgccagctcgttgttcgccaccgccgtcgtctttgtcttcgtggcacaataagccacttcaggcttcagtctgttctgtgatcagcagaacattatgggctctaaagcaggaggacttttgagatttacagagcttcaactaagtcaacttgttgagtcgcttgttacatatcttttgcatatgggaaaaaataatagataagaggtagtgtgagacacatattggcaactgaccaaatgacttcagatatttggggtctcatcgatgttcaaacagagaatgcacaaagtagtcagaaatggtaattatattgtcattgttgttgctggtagtgatgttactgttctactatcacgaaggagaaatttgatccaattggtgggcctttgcctaaactttcacaagctgattccaagcaatgtgtctaaaatctttttcttgtgttggtaaccaccagatgcttgtcaattgtcaaacttattttggttggcttattttcaagattaaatgatctctggtaactgaggagaatgctgtagatgttgattttccttttaggaaggtgaagctctccgatgtggtagggggaatggaaaatgtgcatatatgcttctgattgcagtgagattagcctcgtccaagttatgggatctgccatgaactagacaagattataagtttacagaggccttacatcaagagagtacaagattgccataaggaagtaaagtctttgaggaaagtgaccttatgagaagcttgagaaaatcaacttgtgtgtgagaagttttgtctacttgtgctaattagtcatatgatatttttagtcatgaactagacaagatcagaagtttaaagaggttttaaatcgagtacaagatcgccataaggaagtacaagtctttgaggaaagtgaccttatgaaaagtttgagcaaatcaacttgtgtgcgagaagttttgtctacttgtgctgatcagtcataccttggaatattgctgaactgttgcctttgttgctcattggcttcaatacttcatacaccatcaaatgagtcatgtgcaaaattcttcgaagcatcagttcttgctctagaagaacttcatcagaggcggggtcgaatcagcaactacggctgacatgacgctacccatccagttgctcactgctcaggttatagcgaagaacattgttttagctggatacaaggagatgcagaagctctgagttttgaggatggatctatggatggttacactatcacatttgggatcagaaatgtgacgcacattgagaaagctctatcagaagcttacagttgatggttctaaagcaagggtggaggttcctatgcttggagttgagtcatgtggatgtccctatttttaaatagatttatgatgcttactcgttttctatgattccggctattgaagagctggttgatggtgatcggcagatagaagacgggcaacatgctaaccaggcatgtgaaccttgaaccttggcaggaaaagtttgctcagatgattcaggaagccggattccagagggtggaatatgaaaacctcctgagcggtgtagttgccattcattctggactgaaactgtagagctgaatacggatggatgttttttcatgggtgcaccgcttctacaattagtagtatttgttgttttttaatgaattctataataggttcggtggcttgtaaaagcagctggtgctggctgtcagcattagcacaatatgtagaataagtagtatttgcgagaagtatgtgctggagcagtagcgtcagtggctattttggcttttaagccagctgacctcttccatttgtaaagcttttttcttggaaacgtgaaaccatccagaacatcaaattagtcttatcacatacctcctgcaatacattttttgttctaaaa

SEQ ID NO: 142784 - DNA, 2723 bp, Zea Mays
gactgcccccgctccttgcccaacgaaacccccgctcccgcacgccccgccgacctctgctgccgcaacgccgcagccgccgcgaaatccgcacccacccgcgcgacctctactgccgcaaggccgcagccgccgcgaaatttgcacccacccgcgcgccgcagccctttgtccgcgccggagcctagcaccgaaccgccgcggattcgccactacatcaccggccatggcttcgggcatgccacccgcgccctcgaggtccgccgccgctctctccgcccgcttgcagcttgcctgcctggtgccggcgcgtactgtttcctgaccccatcgtctccaggtggtgaggcacctggtcaccgcagggcacgacgtgcacgtggtcatcgccgcgcccgagttcgtcttcaccaccgagatcgcctcccccagcctctccgacaagctcgcgtccccgtccacatccgagatgctcgcgcccgcgccttggatggaagcccagaatcgccttccatcgaggattctacaccacgcgtcgcgccccctccccgcacgcaagcccccgcctgcacattctccgccaccccatcccctgtccggcgcgtgtgccacggcctccctcgaccagcggcacgcgtacgccatcaccccctccctactgctcccatccgcggtgctcaccttcgccatcgcgcaatccatcaaggtcctcaccacctggtataaggagaaccggtgggacgcgaagcagctggtgggctccggtgggatgccgtcctcgcactcagccaccgtcacagcgctcgctgtcgccgtcggcctgtaagaggggctcgccagctcgttgttcgccaccgccgtcgtctttgtcttcgtggcacaataagccacttcaggcttcagtctgttctgtgatcagcagaacattatgggctctaaagcaggaggacttttgagatttacagagcttcaactaagtcaacttgttgagtcgcttgttacatatcttttgcatatgggaaaaaataatagataagaggtagtgtgagacacatattggcaactgaccaaatgacttcagatatttggggtctcatcgatgttcaaacagagaatgcacaaagtagtcagaaatggtaattatattgtcattgttgttgctggtagtgatgttactgttctactatcacgaaggagaaatttgatccaattggtgggcctttgcctaaactttcacaagctgattccaagcaatgtgtctaaaatctttttcttgtgttggtaaccaccagatgcttgtcaattgtcaaacttattttggttggcttattttcaagattaaatgatctctggtaactgaggagaatgctgtagatgttgattttccttttaggaaggtgaagctctccgatgtggtagggggttagtacccctttcctctcctctagcatgcttaaggaggtattgttgggcttttttatactcatactcagttgtatatatgtttctcaggaatggaaaatgtgcatatatgcttctgattgcagtgagattagcctcgtccaagttatgggatctgccatgaactagacaagattataagtttacagaggccttacatcaagagagtacaagattgccataaggaagtaaagtctttgaggaaagtgaccttatgagaagcttgagaaaatcaacttgtgtgtgagaagttttgtctacttgtgctaattagtcatatgatatttttagtcatgaactagacaagatcagaagtttaaagaggttttaaatcgagtacaagatcgccataaggaagtacaagtctttgaggaaagtgaccttatgaaaagtttgagcaaatcaacttgtgtgcgagaagttttgtctacttgtgctgatcagtcataccttggaatattgctgaactgttgcctttgttgctcattggcttcaatacttcatacaccatcaaatgagtcatgtgcaaaattcttcgaagcatcagttcttgctctagaagaacttcatcaggttatagcgaagaacattgttttagctggatacaaggagatgcagaagctctgagttttgaggatggatctatggatggttacactatcacatttgggatcagaaatgtgacgcacattgagaaagctctatcagaagcttacagttgatggttctaaagcaagggtggaggttcctatgcttggagttgagtcatgtggatgtccctatttttaaatagatagctggttgatggtgatcggcagatagaagacgggcaacatgctaaccaggcatgtgaaccttgaaccttggcaggaaaagtttgctcagatgattcaggaagccggattccagagggtggaatatgaaaacctcctgagcggtgtagttgccattcattctggactgaaactgtagagctgaatacggatggatgttttttcatgggtgcaccgcttctacaattagtagtatttgttgttttttaatgaattctataataggttcggtggcttgtaaaagcagctggtgctggctgtcagcattagcacaatatgtagaataagtagtatttgcgagaagtatgtgctggagcagtagcgtcagtggctattttggcttttaagccagctgacctcttccatttgtaaagcttttttcttggaaacgtgaaaccatccagaacatcaaattagtcttatcacata

SEQ ID NO: 142785 - DNA, 906 bp, Zea Mays
gcatgaacttttctaatagattttgttgcctctgtctcaagtgtgggttatgttgttcaacagttggtttttatttccaggttatagcgaagaacattgttttagctggatacaaggagatgcagaagctctgagttttgaggatggatctatggatggttacactatcacatttgggatcagaaatgtgacgcacattgagaaagctctatcagaagcttacaggtcggctaatttagaaccctaacaattattattgctcatgtttaaattattactgtttgaacttcagtatatgtgtctattcttcgtgattaagtttttttgtcttcgtgtgcagtatcatggattaagcttttttatattttaccatgtttgtttagttgatggttctgaaatgtcattactgtcatatcaattggcatatttcaaaatcttttttgcttagttgatggttctaaagcaagggtggaggttcctatgcttggagttgagtcatgtggatgtccctatttttaaatagatagctggttgatggtgatcggcagatagaagacgggcaacatgctaaccaggcatgtgaaccttgaaccttggcaggaaaagtttgctcagatgattcaggaagccggattccagagggtggaatatgaaaacctcctgagcggtgtagttgccattcattctggactgaaactgtagagctgaatacggatggatgttttttcatgggtgcaccgcttctacaattagtagtatttgttgttttttaatgaattctataataggttcggtggcttgtaaaagcagctggtgctggctgtcagcattagcacaatatgtagaataagtagtatttgcgagaagtatgtgctggagcagtagcgtcagtggctattttggctt

SEQ ID NO: 142786 - DNA, 863 bp, Zea Mays
caacgccgcagccgccgcgaaatccgcacccacccgcgcgacctctactgccgcaaggccgcagccgccgcgaaatttgcacccacccgcgcgccgcagccctttgtccgcgccggagcctagcaccgaaccgccgcggattcgccactacatcaccggccatggcttcgggcatgccacccgcgccctcgaggtggtgaggcacctggtcaccgcagggcacgacgtgcacgtggtcatcgccgcgcccgagttcgtcttcaccaccgagatcgcctcccccagcctctccgacaagctcgcgtccccgtccacatccgagatgctcgcgcccgcgccttggatggaagcccagaatcgccttccatcgaggattctacaccacgcgtcgcgccccctccccgcacgcaagcccccgcctgcacattctccgccaccccatcccctgtccggcgcgtgtgccacggcctccctcgaccagcggcacgcgtacgccatcaccccctccctactgctcccatccgcggtgctcaccttcgccatcgcgcaatccatcaaggtcctcaccacctggtataaggagaaccggtgggacgcgaagcagctggtgggctccggtgggatgccgtcctcgcactcagccaccgtcacagcgctcgctgtcgccgtcggcctgtaagaggggctcgccagctcgttgttcgccaccgccgtcgtctttgtcttcgtggttggttccccttcccactccccctctccctttcgacaccaaaaaaaacgcgctgaccatctttggcaagctgtcgcccaccccaccccaaaaccctagctctattccatcgctcccgtactccctattgcgg

SEQ ID NO: 142787 - DNA, 357 bp, Zea Mays
atcgtctgctggcatcgttccattctcctctaaaccctagccgcctagcgcctcgatctgagcagcctgtctcgcggaggtagttctggttgatttggtcctagatggcggaggaaaaagtggggcggatcttcgtcggcgggctgtcgtggaacaccacggagcgcacgctcgagcgcaccttcggtcagtacggcaaggtcatcgaggctcaggttgtagtggaaagggagacaggccgctctaggggatttggatttgtcacattttcagaacctcgggctgtggatgctgccattcggggaatgcataacggagaactggatggccgcaatatttctgtgaacaaagctgaac

SEQ ID NO: 142788 - DNA, 603 bp, Zea Mays
atggagcagacagctccctgcatgtcccttgtgcaatatatttctttgtatgctggtagcggtgtgaggcgctgttgccaggtttaccactctagtttcgctgatgatgatgggatcacaaaagcttgcagctgtcctttgcttccactgaaaactcatatcaagggcccggcaccagcctctgaccctgataaagcggacattgttgatgaagccataactttctttcgagccaatgttttcttcaaaaatttccatgtgaaaagctcagcagacaagttattgatctatctgacgttttatatcaatattgccttaaaaagactagaaggttgtcggacactagctgttgggactaaagcaatcattaatctaggattggagaaagttcctgtacctggggaaccagggtttcctttccctggacttttcactcttccccagtcccaggaggaagcagaattgttgaggaattatttgaagcagataagggaggaaacaagtggaagattgctcaactgtgcatacagagctaatggctttccaaacaagtggtggttggcttttgctaagaggaagttcatgaacattgtcatcctttag

SEQ ID NO: 142789 - DNA, 519 bp, Zea Mays
atggcttccgacgctcaacgcctactcgacgaaatgtcgaaacgcttcgacaacatcgactccaagctttcccaacggctcgacgactacgacgccaagttagatcagcgtctcctcgcccgcgacgtgctgattgacaaccgcctcgcagatctggacgccaagttggatttccgcctcgccttgctctcttccgccaacgaggcgcggatgtcgcggctggaaacagctacgatgtcgctagatggatggcgcccagatatggagggtactgtggacgatctccgtctccaagtatccaagctctcgaagatctgtgaacgctctgtcgtatcccaaccgacggacatgactgggcctctgctaacacaccgccccttcgagcagatccgtcggttcgacatggagaagttcgtcgtcggggtggccaccgagggtgacacgaggcggaaactccggttcgccagccgcgtccacgtgcgcgcctgcctcgagggcgctggtgccggaggcggctga

SEQ ID NO: 142790 - DNA, 1753 bp, Zea Mays
cgcactcgcctgtcctgctatgtgctatcacccgccggctctctcgatgctttgttttgtcctttcccctctgcttgcttctcgttctcgctacagccgactcaaatcactgaccagcgccgagccgccggcgatccacaccctctccggacaccggcgggcggcgagtagttaagctgatcccctgccccctccaatccgtgtctcgtcaggcgggcggagggcatggctggcccgggccccaagctgcgcgcggcggcggcggcgcccgccccctgcatccccgacgacgcgctcgtcgagatgttcggcctcctccccgccaactccctccaccgcttcaagtgcgtctccaaggcctggtgcggcctcgtcacggacccgctccaccgccagcggttcgcgcagaccctggcggggttcctctgccgcgtggacggcgacggcggcaccgagagctcgcggctcacgcgccccaacgccacggtcccggagcggaaggagaccacccggcggttcgtcaacgtctccgggatggcggagccgcaccccgacgcctccctgtccttcctgccgcctcccgacgccgaggggctgcgcgacgtgatcctggacgcccgcgacggcctcgtgctcctggcccgcgcccgggggcacgagccccccgacctccacccgccggcgtgctacctcgtgtgcaacccggccacggcgcggtgggcgtgggtgccgggctccggctgggtccccagcgcctcgcagcggacggcgctcacgtacctgctcttcgacgccgccgcggaggaggaggaggaggcgtcgccgccgcaccggttccacttccacctgctccagttccggctcgacgacatggactcggtgcgcgcggtgcacacgtacgcgtcggccgacggggcgtgggccgacagggcgggcgcctgggtccacggcgggtggcgggactgggcccgcggcatggcgctcatccagccgggcaccggcgccgccgtcgcccgcggcgctctgcacctggtggtcgacaccgacggcacgtccggccccaacaacctggtcgccgtggacgcggagggcgccacgcgccgcgccatcccgctgccgcgccgggacgtggcggagaaggactggcactcggtgttcgtgggccgctcgcggggccgcctgcactacgtcatgtgcgtgcgcccgccgcacggccgcctgtcggaggaggagccgctgaggctcctggtctgggtgctccaggactacgacgccggggagtgggtgctcaagcacaccgtcggcttcccggagctgttcgggaggatcgcctgccagttccgcgtcgagtacagcgtggtcgccgtccacccggacggcaactgggttttctttgtccggcactgggaccggaagctggtggcctacgacatggatcgcagggaggtgcgtgttgtcgccgatctcggtcccggaggcgatgtcggcgacgagcttcctactccgtatgttcctctgtactctgcgtcggcggggctgacgaatgctagtgtcggattcagagtagagtagtgcagtcgctagacatcttctggccttctgcacccaccgacattggagtgttctcgcttcttcagacctgctcgaagctcgatgttgcagaatttccaaacttttcgagcggtactgagaagttttttttttgttcaattaccacgttctgaagatagaaccatcgtactatttgatgact

SEQ ID NO: 142791 - DNA, 838 bp, Zea Mays
atcccacgcgaaacccctagcaataatcaaacgcacatgatttggtcgtcgttttcggctcgccctcgccgtctgatccccacctccacccttccctctcctcaaacaacagcggcacagcgctcgattcggcttcgcctcgactcgcgggctcccctcgcaaagctctaaacccctctgagagaacctatccgggccaccacaaccgccacccatggacggcggcgacgctccggcggcgggaggcgggaaggtggcgtgcgcggcgtggatccggcgccgggaggacaagtcggcggcggcgccggcgcgggtgttcgcggcgtacggccgggcgggggcggccggctccccggccgctctcgaggtgcttggcttcgacgccaaggagtgctccctctccccctctcccctggcgagggccgtgatcggggacggcggcgcgggtgacgcgccgcgcggcatcgcggtgcaccccgccggtgacgagctcgtctgcgccacggcgaagggctgcagaggaggtttcagtaagctctatgggctcgggagcggtaagaggggttcgagccccgcctgccccaccgctagctccgtccctggtcagaagctatacacagtatgtaaatttgtatcatataattgcattgtcacatggtttttaaggcgtcacctaggcgtcgaggcgctcaaaaactctgggcatccaccgtcgccttgcaggagggagcttgaaggagagggcggcggcgatggctttggtgggacctcgaagggtaggggagcggtgctggagggagatcgaaggggtgggcggcgcagctggagctggaagtag

SEQ ID NO: 142792 - DNA, 289 bp, Zea Mays
taaagtacttgaaataaccagcatctacaatgaactttaggctctgtactaggaaagtgttgttaccaatccagtagtacaatgagaaaattcggtttggaaactagatatatcttgagattaacatctgagctgcaatttgtacaggacattgaatgccaagataggaagtaacaaagctacaggactagctaatgcatcatatagagcaacaaaggaacgggatgttcaggaatagccaaagctccaaggcagcaaaggcgatccgctagcaaataggcgaaaacaa

SEQ ID NO: 142793 - DNA, 921 bp, Zea Mays
cctgattggcctagtaacacctcccacggatcgtcttcccagctccccatcggccgtccgtgccactatcgatccggccgtccatcgcgtttgcacacggatcgaggggcccaccaccccacccttttcgcggggttttaaaagcaccccacctcgcatcccctctggcatcacacactcgactctcctctctcgcatccgcagcctttcgagctctactccaccccctcgatctcgaagcgcagcagcagcagtcaggcggccatggacgcgagcgcagccggagccggcgggaaggcgaagaagggcgcggccgggcgcaaggccggcgggccgaggaagaagtcggtgacgaggtccgtcaaggccgggctgcagtttcccgtcggccgcatcgggcggtacctgaagaagggccggtacgcgcagcgcgtcggcacgggcgcccccgtctacctggccgccgtcctcgagtacctggccgccgaggtgctggagctggccggcaacgctgccaaggacaacaagaagacccgcatcatcccgcgccacgtgctccttgccatccgcaacgacgaggagctcggcaagctgctgtccggcgtcaccatcgcccacggcggcgtcctccccaacatcaacccggtgctcctgcccaagaagaccgctgagaaggcggcggccaaggaggccaagtcgcccaagaaggccgccaagtcccccaagaaggcatagaggggcgggcgcctttaccgctgtgatgttgaatgctcgtgttcagtagatctttacgtctgtagtgtcgtcgttgttattggaactggttagtagatctgtgcattgtggttgaaacgtgattccctgatttcagaaatctaatttgcaatttgggtgcacaaatatactcgcaatggtttatat

SEQ ID NO: 142794 - DNA, 1627 bp, Zea Mays
ctctccatctccagttctccacatcctgatcgtagcagactgcagtggaatgaacaccggcagggacggagaaatggaaacggtggccggcgggatccccctccccatccccgaaggccccttccttgacgttctctcgcgtctctccatcaaggacctccaccgatccacaagcttgtctagagagtggcgactggcgagacgtcttcatcaactttccagagagccgtaagaatctctcccaaaccctacaagggtttttctacgtcggctgtgactgcaggagccacgacgataaggtcggcggcgataatagagacggtgacgacgacggagacggcgcccgcggcgatgacgacggtggaaacggcagcgactgggacgaggacgaggacgaggacagcagccgcgaagtggggcatggtcgtgacagggcatgttccggtaactacggtctgcgtttctttgacctgttggccaaatcaatgcctgtcccagaagacacggacacagaattttccttcatagagttgccggaccacgtcggcaccatcgatctcttgagttcatgcaacgggcttctcctgttcgggtgcacagaggagggttcagagagctaccactcgctgggctacgtcgtttgcaacccggccaccaagcagtgggcggcggtgcccagctccggctgggttgttaagcagggagaagagcgcgaggaggagttcgagagcacgttcctgttcttcgacccgtccgtgccctcgcgcttcctcctgatccagttctggcacgacgaggacgccgctctcgacctcgtcggagacaaaggcgtgcacgtctactcctccgagaccggggaatggagcaaccggtcgagtgagtggaagcagttcgcaaggggaggtgagtggggcgataggtacggagtcatgataacatcctggttgggcagttccttcctgaacggcatgctgcatttcttcgtccaacggatgtgtgaaggcgacgtgctcgtggtcgccattgacggggaagggagcgtacgcaggaccatccgctggccactgcacatgtttagccagcctgtttttatcggccagtcgcaagggcgcctgcgttgcgtcagtgagcgtcgtggactacgacgacgacaggatgaagcccagagtcacagagtaacaccgtcgtacattgacattgacgtccttccggaggaccacgacgagcctgaggagtcgcagataacgatgttcgccatcagggccgatgactacgaagtggtcgccgttcatccgcatggggatttggtctacttcgtccaccgcgggaacggggatctcatagagtacgacatgggtggcagctacccagaggatgaacaggttttgcgcctctgcaatctcgggcacaatttcagagctgtaactccctacgtcccctgtttctccatgtcgtctgcactccacacaaacgaggaattatttgatgtctagttctgctgtaacttattatattatgtggtgcgtgcattctatagttctgctgttgcttggatttggatgtatcatgtccctttccttcaattctggatctgatggctctgttcaatcagacagttgacgcctgt

SEQ ID NO: 142795 - DNA, 2016 bp, Zea Mays
acacacacccaacagacaccaaccagcgcccatcagtcacccgcgccggacatccctcgcgctagctgccagtcgtcgtcgccacgccaccatggtgttcgccgcgagcggcggcagctcgccggcgacggcggcgccggggagcgctctgggcgtgatcctgacgcgcgggttcgcccggcaggtgctggtggggcggtggttcacggtgttggcgagcctgctgatcatggcgtcgtccggcgcgacgtacgtcttcgggagctactcgggcgcgctcaagtcgtcgctcgggtacgaccagcgcacgctcaacacggtgtccttcttcaaggacctcggcgcgaacctgggcgtcctcccggggctgctcaacgaggtgacgccgccgtgggtggtgctggccacgggcgccggcatgaacctgttcggctacctcatggtgtacctggccgtgtcggggcgcaccgcgcgcccgccgccgtgggccgtgtgcgcctacttcttcgtgggcgccaactcgcaggcgttcgccaacacgggcgcgctcgtcacgtgcgtcaacaacttccccgagacccgcggcgtggtgctcggcatcctcaagggattcgtcggcctcagcggcgccgtgtacgcgcagctgtaccaggcgctgtacggcggcgaggacgccgagtcgctcatcctgctcgtcgcctggctccccgcggccgtgtccgtcgcgttcgtccacaccatccgctacatgccgtacccgcggcggcggcgcagcggcggcggcggtgggcaggagacgagctccgaccccttcttctgcttcctctacctgtccatcgcgctggcgtgcttcctcctcgtcatgatcgtggtgcaggggcaggtgcccttctcccgcgccgcgtacggggtcgccgccgcgccgctgctcatcctcctcctcatgcccctcggcgtcgtcgtcaagcaggagtacaagatctaccgcgagcgccagctggacgccgccgccgacccgccccctaccatcgccgtcgtggacgccggcgctccaccagtaccgtccagcgtccagatgtcatcagcagccgccaccgccgccgttgaggagacagagcagcagcagcaggcggcgacgtcgagcgcgtcgtcgtcgtgttgcctggggtcgttgggtggttggggcgtgaggaccatgttccggccgccggcccggggcgaggactacacgatcctgcaggcgctggtgagcgtggacatgctggtgctgttcgtggcgaccacctgcgggatgggcggcacgctgacggcgatcgacaacatggggcagatcggcaagtcgctggggtacccggcgaagagcgtcaacacgttcgtctccctgatcagcatctggaactacgcggggcgcgtggccgccgggtacgtgtcggaggcggcgctggcgcggcaccgcgtgccacggccgctgctgctgaccggggtgctgctgctggcgtgcgcggggcacgcgctgatcgcgctgggcgcgccgcggtcgctgtacgcggcgtcggtggtcgtcgggttctgcttcggcgcgcagtggccgctggtgttcgccatcgtctccgagctgttcgggctcaggcgcttctccacgctgcacaacttgggcggcctggccagccccgtggggtcgtacatcctgaacgtgcgcgtggcggggcggctctacgacgcggcggccgcgcggcagcgcggcgggagcgggagggtgtgcctcggggtcgagtgctacaggcggtcgttcctcatcatcacggcggccacggcggcgggcgcgctggtgtcgctggtgctggtgtggcggacgtggcggttctacaggggcgacatctacgcccggttccgggatggcgacgggcgcctgccggtggaccggcagcaggaggagagggagaaggcgacagcggccaacggtaggtaggaagggatgatgaggcagagcggagagcgggagaggaggaggccagc

SEQ ID NO: 142796 - DNA, 1733 bp, Zea Mays
ggtacaagttagcatgagcgtttagaaatgcaaccaaaaacgcaagtctatttgtgcccctcatgttccatgacagcaggatagttaagttcagtggatcagtaccaggaaatgtacagtgactgtcggtgttaccacaaatcagccagggttatacaaagcacaatgtgatcaacagagcgtagcagaatcaccaggacgcgtggatcaccgttggcagagactctctcatcagccaaacatcaggaaaacaaaaatctcactggtcaaatgatgcagctactgctgcagccggagccacggcgaacctgatcatgctgtccatcacatcaacactaccggcttcctcgccatgaactccatccgcagccgcgttggcggtgtcggcattgccgccactgaagcagcgagggggcgcctgccacttggagtcttccagcactcctcccacctcaaagctcatcacatgctgctgcatccctgaggtacaagaacacacaggtcatcagtaatcaccctgctgcatcaaccgagcgcttctaccctgcagacactgagactggaataagatttttcgcgtttcagaaaaaggagactgcagcaggacagatatttccccagctaagaacttagcaattggagaattccggactgcatctgtgcacaagaaaatcgcgtaattgtatactggagaaatgcagaaatgttaagactgcaaaaaaaacaagcagagttccaagtgtcaggataaaaaaagagtgaggtttgctcctgaattttagttttctttttcaaacgactattattgcaagaaaaattaggagaagtgagctaaactattcagagtaattcaaacagcactcccgtcccgcacaccgaaattgtagaatcgccattaaccattatagtgctgcatcgaaagcacaaaactggaaagcgttcctagaaatttagactgcatccctacaaactgcagaacaaaatcgcacgcattggttagatcaaaacacccgagacgggtgcgaatcgccaaaaatccacgatgctccatcatgagtctaaagaaagtatagattgaatgtgcggacgatatagctagtactaatactaccattgaagaaattccagcggacggggcggccggtggcgacttcctcgtagtaccagacgaagtcgaccttggtccacaggtggcagtcgaagccgtcgacgtgctcgcggccgagatagacggcgccggcggcgagccagtcaggcggcaggatccccacggggaaacgcatggtgcggcaggacccggagtcgaagaagtaggaggtgccgttggtccactcgacgtcgtagagcgggtcgctggagagctggtcccggatgaggttgaggttgcggcccctgggccagtcgtagtacaggtcgatcagctgcagccggccgccgctctcggtgagattggtgaagaccaccgcgtggaactgctccggccacggcgtcggcactgggggaggggcgccggcaccggccgcattagccgtagcgtgggatacagcggcgaggaggagggggaggaggagcgggagcaccacgagggacgacggcggcggcgacatcaacgactgttacggcttaaccgaccttatcgcttcgcgtgtgcctacctgccagttgccactgcgagccagtcgaagctggaccgagggagctagacagggttggaagcagacatccaaattatc

SEQ ID NO: 142797 - DNA, 1055 bp, Zea Mays
atgtggatcagcacgggccccggcgccggcatcgacttcaccttctcgaagatggtcaccaggtcctccacgcagtgcccgtccacggggccgatgtagtagagcccgagctcctcgaacagcgacgacccggaggcgctgatcatgccgcgcgcgtactcgtccaccttggcggccacctcgtgcgtcggcccgccgatctgcttcgtcacggacttggccgcctcgcggaggcgccggaacttggtgctggactggagcttagtcagcgcccggctcagcgcgcccacgggcttggacggcccgtccagcgtggccgtcgggagcgacacctgcttgttgtcgttcagcaccacgatcatgttggcgtccaggtagcccgagttgttcatggcctcgtaggcctggccggccgtcatggcgccgtcgccgatgacggagatcacgtggttcttgcgccccaggaggtcccgcgccacggccatgcccagcgccgccgagatgctggtggagctgtggccgaccccgaacgcgtcgtgcgcgctctcgtcgcgcttggggaaccccgccagcccggaggtctggcggatggtgtgcatccgcgaccgccgccccgtcaggatcttgtgcgggtacgcctggtggcccacgtcccagatgatcttgtcctccggggtgtcgaacacgtggtgcagcgccaccgacagctccacaacgcccaggctggagctcaggtgcccgccggtcttggacacggtgtgcacgacctccgcgcggagctccgccgccagctgctccagctccaagatcgacaggttcttcatgtggagcgggtagttcacggtgtccagcagcggcgtcggcggcttctcgccggagaagtcgatcttccacggtcccgacgacgtggccgccgccgccggctccttggaaaccatcatcttcccaccatcggctccgatgctgctactgctgctgccgccggctacctgagcgcgcacctggaactgcagacacacgagtccaaaaccatgccccgtacatgcatgagcacc

SEQ ID NO: 142798 - DNA, 2801 bp, Zea Mays
ttctatactgctgtcttcctcatccatttctgcttcctctgctgtaactactactagttcttagttgaatcaatacctattgtgagtaggtcgctgactggtagccgcctcgggcgtggcgggatggaccgtggaggacgacgtcctcctcgccatcgagcgccaggctaccaatgatgctggtaggattgaagggcttgtggttatgaggattatcaatgagcccactgctgcggccttgtcatatggaatgaacagcaaggagggccttgtcggtgaagtgtgttcgtgccggagagcgtggagtgcgaggcctcatgacgcgaagcaagttcggtctgctcgtgcatgtcacccgtcgcgtgcgcgtgtgccggagagcgaggaggagtgcaaggcctcacgacgcgctgccaggtccgtgctgctcgtgcgcgtcacccattgctgatgatataccacaaatgttttcgacctaacaaagagggcatagaaagtagaagttggttgctcctttaaagcatcagtttcaagtagccatcagctgaaatctaccattgctgaaacaaggtgaaaaaaatgcagaatggactacttagagatagctacactatcgatgcatctacatcattttggactatatgggacaccatcagtaatggttgatcttgtctactgtgctttggagttcctttcaactttgcttggagcctttcatgccactgatggagtcatatgcctctgcccagaaattcagtttctgactgaactaaacggtggtggtttgaatcatcgtggttcactggttttcacaatattgggattcttggcaaccatgaggacattatgagattcttggctaccatgaggacaaattgttcaattacattttctacgtctatttcgaagcgtcgatggcggatgtccgcacacaaaatgccttgaagggtctggaggaagttgcaagtttcctgcgtgtccttggctactatccgtgcaacacaataacgatatgagctgttgcgtcacactgtctatcttggttgctccgccttggaagaccagagtgggagatggttgctatttctgctcaagttagcgagaataaatactttgtttcgatggcatatcgttgaataaaaggttcctcttcccttgtttggaagagattatggtcattatacactcccgactgaatatgaacactcttgaaatacattgcgaagctgcagaggatcgtcattagaattgcatgaaggttgtatgcgaaaccactggattgaacaattcgagaaatctacagaggaagtcgtgaacagctatgcacaagattgagtctaaggtataggcatctgatggaggacatgttgtctctactcccgcatatgaaggacaaccaggacaaggtcgagtccaagcagagcaaggggaacacgccgagcaagctgcttgagctcaggagttgctccagctgcctttcttcgagattctggctgttgaccatgcgtcggatgagggcgcgattgtaccaattggttcgcagcatgatgcacatttgaccaaactgatgaatatggaaaatgaccaacctttgttgccggcaccaccagttaatctggaatcagccatccttgagcaaaatgcaaatatggtggctctcaaggaaggctgttctgtgggaagtgagctgccacctggtctgcagggtaattttggtggtaacaaagcaaacacgtgtacttcagcactgcattctattgatgaaggtgaagaaataacttgtggtttcattaaacatgagaggagttatgatttacagaatttgactatggataagtcaattcaagtgtctaatgaaacaaagtacaagtttcttgctcataagcccagagtaggctgtgaaactgctattcaaaactgtgagttggcttctgcattgccagatacagaatttcatggccctgttgcaaccatttcaactacgggtcaatcagaaggatctgacactgagattaatgttccaaactattctgacctagaagcactggtacatatagttattttcttcattgagtgtacatagctttacattccttggtgattctgactttctcaaaaaaaaaaaaaaatccagatacttgatctggacctgattccatgggatcaagaatctgacttcatccaaccagaagtttcaaggtttcagtatcctgaaagcaggaaggatttgataagattagagaaaggtgtctgctcttatatgaaccgatctatcatgtctaagggtgctttcgcaattctttatggccaacgcacgaaatactacataagagagcccgaggtaagtcttgggagagaaacagaagaagtacatgttgatatcgatttgagtaaagaaggaaaggcaaacaaaatatcccgtcgacaggcagttattaagatggacgatggtggatctttctacataaacaatactgggaagttttcaattttcgtgaatagcaaagaagtaccctgcagtaaacgtataaacttaatgtcagactcattaattgagataaggaacctgaaattcatttttcacgtgaaccacgaggctgcaaggcaatacatagttcgaaaaaggagaggaagctcccaaggcgggatcacggcgtttgattggagtcagaacccatgagtagttaacgttatgatcaaggttgtttataatctgcgatagctacctctctcttcaagaaagtattggataagcgtaaagttatttataatttccgatagctaatatttctctcttccag

SEQ ID NO: 142799 - DNA, 1220 bp, Zea Mays
ttctatactgctgtcttcctcatccatttctgcttcctctgctgtaactactactagttcttagttgaatcaatacctattgtgagtaggtcgctgactggtagccgcctcgggcgtggcgggatggaccgtggaggacgacgtcctcctcgccatcgagcgccaggctaccaatgatgctggtaggattgaagggcttgtggttatgaggattatcaatgagcccactgctgcggccttgtcatatggaatgaacagcaaggagggccttgtcggtgaagtgtgttcgtgccggagagcgtggagtgcgaggcctcatgacgcgaagcaagttcggtctgctcgtgcatgtcacccgtcgcgtgcgcgtgtgccggagagcgaggaggagtgcaaggcctcacgacgcgctgccaggtccgtgctgctcgtgcgcgtcacccattgctgatgatataccacaaatgttttcgacctaacaaagagggcatagaaagtagaagttggttgctcctttaaagcatcagtttcaagtagccatcagctgaaatctaccattgctgaaacaaggtgaaaaaaatgcagaatggactacttagagatagctacactatcgatgcatctacatcattttggactatatgggacaccatcagtaatggttgatcttgtctactgtgctttggagttcctttcaactttgcttggagcctttcatgccactgatggagtcatatgcctctgcccagaaattcagtttctgactgaactaaacggtggtggtttgaatcatcgtggttcactggttttcacaatattgggattcttggcaaccatgaggacattatgagattcttggctaccatgaggacaaattgttcaattacattttctacgtctatttcgaagcgtcgatggcggatgtccgcacacaaaatgccttgaagggtctggaggaagttgcaagtttcctgcgtgtccttggctactatccgtgcaacacaataacgatatgagctgttgcgtcacactgtctatcttggttgctccgccttggaagaccagagtgggagatggttgctatttctgctcaagttagcgagaataaatactttgtttcgatggcatatcggttgtggttctattatgacatatataacatactgatgttattattactcacattatctatgctatgttgaataatcatgtttttagtt

SEQ ID NO: 142800 - DNA, 3579 bp, Zea Mays
ggctgccactcggctggcgctcacaccggatccgggccccactacccacctcctgtccagcccggtctccacagcagtgcccaccaccgcctgcagtctgcagagatcccccactgattcgctcgccgtccctccgctgcgctgctatataggaccgtgccgccgcgtgcgctcgtggactgtggtgtgccttgtgcgacagtcgccagcctgccccgcctgccggcccggccgcccgcctgcccgcggcactgagaagacgaagctccgggctccgggacgccgagcagaggggaaaggatggaggacaaggcgtccaacctagacgccgtgctcaaggaggccgtcgatctcgagaacataccgatcgaggaggtgttcgagaacctccgatgcagcccgcagggtctcaccacggagcaggcggagcagcgcctcgccatcttcgggcccaacaagctggaggagaagcaggagagcaagttcctcaagttcttgggcttcatgtggaacccgctgtcctgggtcatggaggcggccgccatcatggccatcgcgctcgcgaatgggggaaacaagccgcccgactggcaggacttcgtggggatcatcactctgctcattatcaactccacaatcagcttcattgaggagaacaatgcgggcaatgccgctgctgctctcatggcacgcctcgcccccaaggccaaggttctcagaaatggccggtggaccgaggaggaatcggctatccttgtgccaggagacatcatcagtgtgaagcttggggacatcattccagctgatgctcgtctgcttgaaggggatccactgaaaatcgatcagtctgcactcaccggcgaatcccttccagtcaccaaaggccctggtgatggagtgtattctggctccacttgcaaacagggtgagattgaggccgttgtcattgccactggtgtgcacacattctttggcaaggccgcacatcttgtcgattcaacaaaccaagttggtcattttcagaaggttctcactgccatagggaacttttgcatctgttcaattgctgtgggaatgctcgtggagcttgtcgtcatgtacgctatccaacacagggcttaccgacccggaatcgacaatctattggtgcttctgattggaggaattccaatcgccatgcccactgtcctttctgtgaccatggcaataggggctcatcgcttggctcaacagggagcaatcactaagagaatgacagcaattgaagaaatggctggcatggatgttctttgtagtgacaagactgggacattaaccttaaacaagttgactgtggacaagagtcttgttgaggttttccaaagaggtgttgaccaagatacagtaattttgatggctgctagagcttctcgcacagaaaatcaggatgccatagatgccacaatagttggtatgctggctgatccaaaggaggctcgtgctggtgttcaagagatccattttcttccatttaacccaactgataaaagaactgctttaacctaccttgatggagaggggagaatgcatcgtgttagcaagggagcaccagagcagatccttcatcttgcccacaacaagtcggatattgaaagaagggtcagagctgtgatcgacaaatttgctgagcgtggtctgcgagcacttggtgtggcttaccaggaagtgccagatggtaggaaagagagtcctggaggaccatggcagttcattgggctcttgcctctttttgaccccccgcgccatgatagtgcagaaactatcagaagggcactcaatcttggtgtcaatgtcaagatgattacaggtgatcaacttgctattgggaaggaaactgcacgtcgtttgggaatgggtactaatatgtacccttcttctgctttactcggacagaataaggatgagtcaattgcttccttgccaattgatgatttgattgagaaggctgatggctttgctggtgtttttccagaacacaagtatgagatcgtgaaacgcttgcaagcaagaaaacatatatgtggcatgactggggatggtgtaaatgatgcaccagctttgaagaaggctgatattggtattgcagtagcagattctactgatgcagctcgtagtgcttctgacattgtcctaactgaacctggccttagtgtgattattagtgctgtgctgacgagtcgggcaattttccaaaggatgaagaattacacgatctatgctgtatcgattaccatccgtattgtgcttggttttatgcttcttgcgctgatatggaagtttgacttcccaccatttatggtcctgatcattgccatcctcaatgacggtaccattatgactatctcgaaggacagagtaaaaccatctccacaacccgacagttggaagttagctgagatttttgcaactggagtagttcttggtggttatttggccatgatgactgtcattttcttctgggctgcatacaagactgacttcttcccgcgactgttccacgtcgaaagcctcgagaagaccgcccaggatgactttcagaagctcgcctctgccgtgtaccttcaagtcagcacgatcagtcaggcccttatcttcgtgacgcggtcgcgcagctggtcgtttgtggagcgtcctgggttcttgctggtctttgctttcttggtggctcagctgattgccactctgatcgctgtatatgccaactgggcgttcgctgcgatcaagggcattggatggggttgggccggtgtcatctggctctacaacatcgtcttctacttcccgctggacatcatcaagttcctcatccgctatgcgctgagtgggagggcatggaacctcgtccttgagcagaggattgcgttcacgagcaagaagaattttggcacggaagaaagggagcgcaagtgggcgcatgcgcagaggactctccatgggctccagccgccagaggcatccatcttcgagaacaagacgacattcaatgagctgaaccagctcgcggaagaggcccgcaggagagccgagatggcgaggttgcgagaagtgagcaccctgaaggggaggatggagtcagtggtgaagcagaagggtctggacatcgagaccatccagcagtcctacaccgtgtgactggctgaccgacgacgacggggtttatagaggtttcttcttcttatactatacaatctgtactaggtagcaataaggatcaaggaaggaacccctatatattggctgtggttcgcgggaaatgaatgatggtcatatttatgatgtcggtgtggtgcttctgtcgccaactctcgaccatactaccctcaactcaccccttgtatgctgtggcattaaccacccccggcaccaccggcaggcattgatattgagagatgaggtatagtagtctgtagcctctagtagatgatgatgaattgatgatatagtacatttttgcttgcttgctttctttcttgtttgttgttttccttggttctgctctctgggtttttgatgcttgctggttttgtgctattcctgatt

SEQ ID NO: 142801 - DNA, 3361 bp, Zea Mays
ggctgccactcggctggcgctcacaccggatccgggccccactacccacctcctgtccagcccggtctccacagcagtgcccaccaccgcctgcagtctgcagagatcccccactgattcgctcgccgtccctccgctgcgctgctatataggaccgtgccgccgcgtgcgctcgtggactgtggtgtgccttgtgcgacagtcgccagcctgccccgcctgccggcccggccgcccgcctgcccgcggcactgagaagacgaagctccgggctccgggacgccgagcagaggggaaaggatggaggacaaggcgtccaacctagacgccgtgctcaaggaggccgtcgatctcgagaacataccgatcgaggaggtgttcgagaacctccgatgcagcccgcagggtctcaccacggagcaggcggagcagcgcctcgccatcttcgggcccaacaagctggaggagaagcaggagagcaagttcctcaagttcttgggcttcatgtggaacccgctgtcctgggtcatggaggcggccgccatcatggccatcgcgctcgcgaatgggggaaacaagccgcccgactggcaggacttcgtggggatcatcactctgctcattatcaactccacaatcagcttcattgaggagaacaatgcgggcaatgccgctgctgctctcatggcacgcctcgcccccaaggccaaggttctcagaaatggccggtggaccgaggaggaatcggctatccttgtgccaggagacatcatcagtgtgaagcttggggacatcattccagctgatgctcgtctgcttgaaggggatccactgaaaatcgatcagtctgcactcaccggcgaatcccttccagtcaccaaaggccctggtgatggagtgtattctggctccacttgcaaacagggtgagattgaggccgttgtcattgccactggtgtgcacacattctttggcaaggccgcacatcttgtcgattcaacaaaccaagttggtcattttcagaaggttctcactgccatagggaacttttgcatctgttcaattgctgtgggaatgctcgtggagcttgtcgtcatgtacgctatccaacacagggcttaccgacccggaatcgacaatctattggtgcttctgattggaggaattccaatcgccatgcccactgtcctttctgtgaccatggcaataggggctcatcgcttggctcaacagggagcaatcactaagagaatgacagcaattgaagaaatggctggcatggatgttctttgtagtgacaagactgggacattaaccttaaacaagttgactgtggacaagagtcttgttgaggttttccaaagaggtgttgaccaagatacagtaattttgatggctgctagagcttctcgcacagaaaatcaggatgccatagatgccacaatagttggtatgctggctgatccaaaggaggctcgtgctggtgttcaagagatccattttcttccatttaacccaactgataaaagaactgctttaacctaccttgatggagaggggagaatgcatcgtgttagcaagggagcaccagagcagatccttcatcttgcccacaacaagtcggatattgaaagaagggtcagagctgtgatcgacaaatttgctgagcgtggtctgcgagcacttggtgtggcttaccaggtgatcaacttgctattgggaaggaaactgcacgtcgtttgggaatgggtactaatatgtacccttcttctgctttactcggacagaataaggatgagtcaattgcttccttgccaattgatgatttgattgagaaggctgatggctttgctggtgtttttccagaacacaagtatgagatcgtgaaacgcttgcaagcaagaaaacatatatgtggcatgactggggatggtgtaaatgatgcaccagctttgaagaaggctgatattggtattgcagtagcagattctactgatgcagctcgtagtgcttctgacattgtcctaactgaacctggccttagtgtgattattagtgctgtgctgacgagtcgggcaattttccaaaggatgaagaattacacgatctatgctgtatcgattaccatccgtattgtgcttggttttatgcttcttgcgctgatatggaagtttgacttcccaccatttatggtcctgatcattgccatcctcaatgacggtaccattatgactatctcgaaggacagagtaaaaccatctccacaacccgacagttggaagttagctgagatttttgcaactggagtagttcttggtggttatttggccatgatgactgtcattttcttctgggctgcatacaagactgacttcttcccgcgactgttccacgtcgaaagcctcgagaagaccgcccaggatgactttcagaagctcgcctctgccgtgtaccttcaagtcagcacgatcagtcaggcccttatcttcgtgacgcggtcgcgcagctggtcgtttgtggagcgtcctgggttcttgctggtctttgctttcttggtggctcagctgattgccactctgatcgctgtatatgccaactgggcgttcgctgcgatcaagggcattggatggggttgggccggtgtcatctggctctacaacatcgtcttctacttcccgctggacatcatcaagttcctcatccgctatgcgctgagtgggagggcatggaacctcgtccttgagcagaggattgcgttcacgagcaagaagaattttggcacggaagaaagggagcgcaagtgggcgcatgcgcagaggactctccatgggctccagccgccagaggcatccatcttcgagaacaagacgacattcaatgagctgaaccagctcgcggaagaggcccgcaggagagccgagatggcgaggttgcgagaagtgagcaccctgaaggggaggatggagtcagtggtgaagcagaagggtctggacatcgagaccatccagcagtcctacaccgtgtgactggctgaccgacgacgacggggtttatagaggtttcttcttcttatactatacaatctgtactaggtagcaataaggatcaaggaaggaacccctatatattggctgtggttcgcgggaaatgaatgatggtcatatttatgatgtcggtgtggtgcttctgtcgccaactctcgaccatactaccctcaactcaccccttgtatgctgtggcattaaccacccccggcaccaccggcaggcattgatattgagagatgaggtatagtagtctgtagcctctagtagatgatgatgaattgatgatatagtacatttttgcttgcttgctttct

SEQ ID NO: 142802 - DNA, 1983 bp, Zea Mays
ggctgccactcggctggcgctcacaccggatccgggccccactacccacctcctgtccagcccggtctccacagcagtgcccaccaccgcctgcagtctgcagagatcccccactgattcgctcgccgtccctccgctgcgctgctatataggaccgtgccgccgcgtgcgctcgtggactgtggtgtgccttgtgcgacagtcgccagcctgccccgcctgccggcccggccgcccgcctgcccgcggcactgagaagacgaagctccgggctccgggacgccgagcagaggggaaaggatggaggacaaggcgtccaacctagacgccgtgctcaaggaggccgtcgatctcgagaacataccgatcgaggaggtgttcgagaacctccgatgcagcccgcagggtctcaccacggagcaggcggagcagcgcctcgccatcttcgggcccaacaagctggaggagaagcaggagagcaagttcctcaagttcttgggcttcatgtggaacccgctgtcctgggtcatggaggcggccgccatcatggccatcgcgctcgcgaatgggggaaacaagccgcccgactggcaggacttcgtggggatcatcactctgctcattatcaactccacaatcagcttcattgaggagaacaatgcgggcaatgccgctgctgctctcatggcacgcctcgcccccaaggccaaggttctcagaaatggccggtggaccgaggaggaatcggctatccttgtgccaggagacatcatcagtgtgaagcttggggacatcattccagctgatgctcgtctgcttgaaggggatccactgaaaatcgatcagtctgcactcaccggcgaatcccttccagtcaccaaaggccctggtgatggagtgtattctggctccacttgcaaacagggtgagattgaggccgttgtcattgccactggtgtgcacacattctttggcaaggccgcacatcttgtcgattcaacaaaccaagttggtcattttcagaaggttctcactgccatagggaacttttgcatctgttcaattgctgtgggaatgctcgtggagcttgtcgtcatgtacgctatccaacacagggcttaccgacccggaatcgacaatctattggtgcttctgattggaggaattccaatcgccatgcccactgtcctttctgtgaccatggcaataggggctcatcgcttggctcaacagggagcaatcactaagagaatgacagcaattgaagaaatggctggcatggatgttctttgtagtgacaagactgggacattaaccttaaacaagttgactgtggacaagagtcttgttgaggttttccaaagaggtgttgaccaagatacagtaattttgatggctgctagagcttctcgcacagaaaatcaggatgccatagatgccacaatagttggtatgctggctgatccaaaggaggctcgtgctggtgttcaagagatccattttcttccatttaacccaactgataaaagaactgctttaacctaccttgatggagaggggagaatgcatcgtgttagcaagggagcaccagagcagatccttcatcttgcccacaacaagtcggatattgaaagaagggtcagagctgtgatcgacaaatttgctgagcgtggtctgcgagcacttggtgtggcttaccaggtgatcaacttgctattgggaaggaaactgcacgtcgtttgggaatgggtactaatatgtacccttcttctgctttactcggacagaataaggatgagtcaattgcttccttgccaattgatgatttgattgagaaggctgatggctttgctggtgtttttccagaacacaagtatgagatcgtgaaacgcttgcaagcaagaaaacatatatgtggcattaaccacccccggcaccaccggcaggcattgatattgagagatgaggtatagtagtctgtag

SEQ ID NO: 142803 - DNA, 3161 bp, Zea Mays
ggctgccactcggctggcgctcacaccggatccgggccccactacccacctcctgtccagcccggtctccacagcagtgcccaccaccgcctgcagtctgcagagatcccccactgattcgctcgccgtccctccgctgcgctgctatataggaccgtgccgccgcgtgcgctcgtggactgtggtgtgccttgtgcgacagtcgccagcctgccccgcctgccggcccggccgcccgcctgcccgcggcactgagaagacgaagctccgggctccgggacgccgagcagaggggaaaggatggaggacaaggcgtccaacctagacgccgtgctcaaggaggccgtcgatctcgagaacataccgatcgaggaggtgttcgagaacctccgatgcagcccgcagggtctcaccacggagcaggcggagcagcgcctcgccatcttcgggcccaacaagctggaggagaagcaggagagcaagttcctcaagttcttgggcttcatgtggaacccgctgtcctgggtcatggaggcggccgccatcatggccatcgcgctcgcgaatgggggaaacaagccgcccgactggcaggacttcgtggggatcatcactctgctcattatcaactccacaatcagcttcattgaggagaacaatgcgggcaatgccgctgctgctctcatggcacgcctcgcccccaaggccaaggttctcagaaatggccggtggaccgaggaggaatcggctatccttgtgccaggagacatcatcagtgtgaagcttggggacatcattccagctgatgctcgtctgcttgaaggggatccactgaaaatcgatcagtctgcactcaccggcgaatcccttccagtcaccaaaggccctggtgatggagtgtattctggctccacttgcaaacagggtgagattgaggccgttgtcattgccactggtgtgcacacattctttggcaaggccgcacatcttgtcgattcaacaaaccaagttggtcattttcagaaggttctcactgccatagggaacttttgcatctgttcaattgctgtgggaatgctcgtggagcttgtcgtcatgtacgctatccaacacagggcttaccgacccggaatcgacaatctattggtgcttctgattggaggaattccaatcgccatgcccactgtcctttctgtgaccatggcaataggggctcatcgcttggctcaacagggagcaatcactaagagaatgacagcaattgaagaaatggctggcatggatgttctttgtagtgacaagactgggacattaaccttaaacaagttgactgtggacaagagtcttgttgaggttttccaaagaggtgttgaccaagatacagtaattttgatggctgctagagcttctcgcacagaaaatcaggatgccatagatgccacaatagttggtatgctggctgatccaaaggaggctcgtgctggtgttcaagagatccattttcttccatttaacccaactgataaaagaactgctttaacctaccttgatggagaggggagaatgcatcgtgttagcaagggagcaccagagcagatccttcatcttgcccacaacaagtcggatattgaaagaagggtcagagctgtgatcgacaaatttgctgagcgtggtctgcgagcacttggtgtggcttaccagatggtaggaaagagagtcctggaggaccatggcagttcattgggctcttgcctctttttgaccccccgcgccatgatagtgcagaaactatcagaagggcactcaatcttggtgtcaatgtcaagatgattacaggtgatcaacttgctattgggaaggaaactgcacgtcgtttgggaatgggtactaatatgtacccttcttctgctttactcggacagaataaggatgagtcaattgcttccttgccaattgatgatttgattgagaaggctgatggctttgctggtgtttttccagaacacaagtatgagatcgtgaaacgcttgcaagcaagaaaacatatatgtggcatgactggggatggtgtaaatgatgcaccagctttgaagaaggctgatattggtattgcagtagcagattctactgatgcagctcgtagtgcttctgacattgtcctaactgaacctggccttagtgtgattattagtgctgtgctgacgagtcgggcaattttccaaaggatgaagaattacacgatctatgctgtatcgattaccatccgtattgtgcttggttttatgcttcttgcgctgatatggaagtttgacttcccaccatttatggtcctgatcattgccatcctcaatgacggtaccattatgactatctcgaaggacagagtaaaaccatctccacaacccgacagttggaagttagctgagatttttgcaactggagtagttcttggtggttatttggccatgatgactgtcattttcttctgggctgcatacaagactgacttcttcccgcgactgttccacgtcgaaagcctcgagaagaccgcccaggatgactttcagaagctcgcctctgccgtgtaccttcaagtcagcacgatcagtcaggcccttatcttcgtgacgcggtcgcgcagctggtcgtttgtggagcgtcctgggttcttgctggtctttgctttcttggtggctcagctgattgccactctgatcgctgtatatgccaactgggcgttcgctgcgatcaagggcattggatggggttgggccggtgtcatctggctctacaacatcgtcttctacttcccgctggacatcatcaagttcctcatccgctatgcgctgagtgggagggcatggaacctcgtccttgagcagaggattgcgttcacgagcaagaagaattttggcacggaagaaagggagcgcaagtgggcgcatgcgcagaggactctccatgggctccagccgccagaggcatccatcttcgagaacaagacgacattcaatgagctgaaccagctcgcggaagaggcccgcaggagagccgagatggcgaggttgcgagaagtgagcaccctgaaggggaggatggagtcagtggtgaagcagaagggtctggacatcgagaccatccagcagtcctacaccgtgtga

SEQ ID NO: 142804 - DNA, 101 bp, Zea Mays
aacactaaactcgggtggttcttgtctgttgcttcaccactttgctgcggtgctgttttgcgcctgcgcaggagaacataccgatcgaggaggtgttcgag

SEQ ID NO: 142805 - DNA, 477 bp, Zea Mays
caagcgagaagatgtatgttatcggagcccttggacgagaacagaaggtattccttacagctgctatgtggtatgaccaattctaatcagtattaagaaggggccgcagggtaatatttacaccaaaagtcctcttcacacttcaaaactctatcggttgtcgatcacgttctccagctcctttaacacagagcaaccaaggacaatggaacaaagtgtcacgactgtcaaaagaatctactggggcagcattttttgaagagaacactttgtacagttcaaccagcaggcaatcacccctagaaaatcagaagttgctggctggcgaatgtcattttctcttctttgtaatgacctcaagaactcctctgagctcatgttaccatcacagttagcatcaaatacatggaaaattatgtccactactttgtcagtcaagtccactccacaaacctataaagcaaacagtatgaaatt

SEQ ID NO: 142806 - DNA, 102 bp, Zea Mays
ttgttgtcattacagaaggagttttggcttgatgccacatctctggtagctacaaacctacaagctttgacaagagatgctatgattaggccgatacaaagt

SEQ ID NO: 142807 - DNA, 113 bp, Zea Mays
aattgcgcaggccaaaagggaaggctttttccaccatacggaagcaagcgtacgatgcagattcaccgaaggcagaaccaggggaggcagcctaccccttacagccttaatag

SEQ ID NO: 142808 - DNA, 591 bp, Zea Mays
tatttttttcagaacattacaaagatcagctattttaattacattccttaattttaagttatgttgtttttacatgtgcagctcatgaggcttttcattggggaaccagtctggaccgcattaaaccgccctcaggaggaccacccggcgaggcaagagtatgtcaagaatgtgagtgcgggcactggatttgctcttgcagctcacttcctgtccaacacgaacctgccctccaagcccttctagagaatgtgcaacaaagctccactcctggctggataaacagttattagacctgttgtacctgcgttcttggaaggtgtaatgttgtgtatggaatgttgtgtgtggaatcagtattagtactagagaaatatatatagggctgcaaatgttgtgtgtggagtcgaactttcatgttttttttcagactcgctctctgtggtgtgtgcatgtctgtgcgaggtggagtcagatgtgcatgtgtttatacattacagtatgaatcagagcttgtgctgttgtctcgtgtgctgaactgcaaatataatttccacttatgttgttgccagcaaatagaaagaagaaata

SEQ ID NO: 142809 - DNA, 911 bp, Zea Mays
cacgtcacacagaaagtcagaaactgccgcgggtcagcggcgccactgacccaccattccgccgccgccgccgcgcgccaccgaaccctgcccgctcttatatgtcgcccgcctgctccctcctttcaccgcacaccccctggcgcattctcccgctactcctccccctccgcctctcctccgccgtttccgcgcccgcgctcgcggtcgcaatgcctcgacgcgacggcaccaagccgcctcagcgtaaatggaagccgaaggccgccgaggtctcctactcgtcctctacctccgacgccacggagctcgtcgagcccgtccggaagatgaccctcgcctcgcatgcgccaccggcgggagcgggccccgtgcccgggcccggaccggcgcagctgtgggtgcccaggggttacacgaccttcgcgggggacggtccgggcatcgctccagcgtccacctcgacctccgggacggtgacagcggagcgcgacggcgttgcgagtgaaaaactctcgagactatttaagtctgccccgggctttgaggtggacaacagcaccttcacggaggcacaaatcagggccacattctaccccaagttcgaaaatgagaagtctgatcaggagacaaggaccagaatgattgagatggtgtctcatgggcttgcaaacttggaggttacactcaagcattctggttccctcttcatgtatgccggtcaccatggtggtgcatatgcgaagaacagctttgggaatgtttatactgctgtgggcgtttttgttctggggcgtttgtttcgtgaagcttggggaaaggaggctcctaaaatgcaagcagaattcaacgattttcttgaggtatttcatgttctgcagaacatttctccatggttattaaagcggtaa

SEQ ID NO: 142810 - DNA, 430 bp, Zea Mays
atgtcggcgcgtcttggcggtgggacaattaagggccatggccacgtgcctctcggcgcatcagcggcagtggcgtcacggtggtgtgctagggcattatgggcggcggtagctggctctagggccaagcatgcaggcgacatgggcgccacagttccaggcttccttctcgtttgcactcgcgctcctatatgtgggctgtacgggggaatgagaatgagaatgggctttgcgggaactatcgacataaagagtgtgtttgatttaaattttgaaatcttcttccttgaaaaagcagaagctaaaccaaagaaacttaacttttctgcagctatttaaaaaacaactttttaagtacaaattttaaaacaacttaagaccttattttttgttgcttattcaaatttcttatattaataaacagagatgg

SEQ ID NO: 142811 - DNA, 1859 bp, Zea Mays
taaatagacgccaagcgctctcggcaccggagcaggccggcgggttcagtggcccctgcaagtgcaagctaaggctcacagcatccgttcggttccggctccgagggactcgctcccgtcggggacggatatatatccatcatggaggcggcggcggcatcttctctgtggggcggcctcaactccggcatcatgctgagcctcctggccgtggtgtgggccatgctgtggcaggcgctgcagggcctccagctgcagcagtacttcgggcgccactcccgccgcctgtcgcgccgcctcgcgtccatcctggacccggacctcaccgtcaccgtcgccgagtacgacggcgggcgcatgcgccgcagcgacgcgttcaaggaggccaaggcgtacctggagcgcgccacgcgggaggcccgcggcggggtgcgccacctcaaggccgagcccgacaaggaccccgaccgcctcctgctcagcatggacgacgacgaggagatcaccgacgagttcaggggcgccaccgtcacgtggcgggcctgcacggcgccgccgcgcgaggacagcgcgccggcctacttctggggccgcgccccgcgcgccgaccgcaggttctaccgcctcttcttcgccgagcgccaccgggacctcgtcctgggagactacctcacccacgtccgccgcgaggggcgcgccgtcatggtcaagaaccgccagcgcaagctcttcaccaacatctccggcgacggctcctgggactcggacggcttgtggtccgacagtgtttggagccacgtggtgttcgagcaccccaagacgttcgcgacgctggccatggacccggacaagaagaaggaggtgatggacgacctggacgcgttccgcaacggcaaggactactacgcgcgcgtcggcaaggcgtggaagcgcggctacctcctgtacgggccgccggggaccggcaagtccaccatgatcgccgccatggccaaccacctcgactacgacgtgtacgacatcgagctcacgtccgtgcgcaccaacaccgaccttcgcaagctcttcatcgagaccaccagcaagtccatcatcgtcgtcgaggacatcgactgctcgctcgacctcactggcaagcgcaagaagaagaacaagaaggaggaggacggcgagaacaagaaggacggtactacgacgaagcagcaggaggaggacaaggagaaggaggacgagaaggcgggcggcagcaaggtgacgctctccggcgtgctcaacttcatcgacgggctgtggtccgcgtgcggcggtgagcgcatcatcgtgttcaccaccaaccacgtggagaagctggacccggcgctcatccggcggggccgcatggacaagcacatcgagatgtcctactgctgcgtccaggccttcaagttcctggccaaggtctacctcgacgtggacgaccacccgcgcttcgacgccgtggcggcgctcctgcgggaggtggacatgacgcctgcggacgtcgccgagaacttgacgcccaaggcacccggcgaggacgccgactcgtgcctcgccgcgcttgtcgaggcactggagaaggctaaggaggacgcgctggcgaagaaggccaaggggaaggaggaggccggctccgccgatgagctcgacgacgaggagtagctggtggctgctgttgacttcttgttagttgctagtgctacatatgtagggagcccctgatctggttgctggtctcatctcatgagcgaagaataatgctaactagacgacgatttgattattactttatgttgtcagtcacaacatgctacacttattacttcgaagccacgcagttt

SEQ ID NO: 142812 - DNA, 1911 bp, Zea Mays
atttcttccctgaaacgtagccaaacctgccttgccctctgcttgctagtccatctcttctctcttctccatccatgtagataaatagacgccaagcgctctcggcaccggagcaggccggcgggttcagtggcccctgcaagtgcaagctaaggctcacagcatccgttcggttccggctccgagggactcgctcccgtcggggacggatatatatccatcatggaggcggcggcggcatcttctctgtggggcggcctcaactccggcatcatgctgagcctcctggccgtggtgtgggccatgctgtggcaggcgctgcagggcctccagctgcagcagtacttcgggcgccactcccgccgcctgtcgcgccgcctcgcgtccatcctggacccggacctcaccgtcaccgtcgccgagtacgacggcgggcgcatgcgccgcagcgacgcgttcaaggaggccaaggcgtacctggagcgcgccacgcgggaggcccgcggcggggtgcgccacctcaaggccgagcccgacaaggaccccgaccgcctcctgctcagcatggacgacgacgaggagatcaccgacgagttcaggggcgccaccgtcacgtggcgggcctgcacggcgccgccgcgcgaggacagcgcgccggcctacttctggggccgcgccccgcgcgccgaccgcaggttctaccgcctcttcttcgccgagcgccaccgggacctcgtcctgggagactacctcacccacgtccgccgcgaggggcgcgccgtcatggtcaagaaccgccagcgcaagctcttcaccaacatctccggcgacggctcctgggactcggacggtgtttggagccacgtggtgttcgagcaccccaagacgttcgcgacgctggccatggacccggacaagaagaaggaggtgatggacgacctggacgcgttccgcaacggcaaggactactacgcgcgcgtcggcaaggcgtggaagcgcggctacctcctgtacgggccgccggggaccggcaagtccaccatgatcgccgccatggccaaccacctcgactacgacgtgtacgacatcgagctcacgtccgtgcgcaccaacaccgaccttcgcaagctcttcatcgagaccaccagcaagtccatcatcgtcgtcgaggacatcgactgctcgctcgacctcactggcaagcgcaagaagaagaacaagaaggaggaggacggcgagaacaagaaggacggtactacgacgaagcagcaggaggaggacaaggagaaggaggacgagaaggcgggcggcagcaaggtgacgctctccggcgtgctcaacttcatcgacgggctgtggtccgcgtgcggcggtgagcgcatcatcgtgttcaccaccaaccacgtggagaagctggacccggcgctcatccggcggggccgcatggacaagcacatcgagatgtcctactgctgcgtccaggccttcaagttcctggccaaggtctacctcgacgtggacgaccacccgcgcttcgacgccgtggcggcgctcctgcgggaggtggacatgacgcctgcggacgtcgccgagaacttgacgcccaaggcacccggcgaggacgccgactcgtgcctcgccgcgcttgtcgaggcactggagaaggctaaggaggacgcgctggcgaagaaggccaaggggaaggaggaggccggctccgccgatgagctcgacgacgaggagtagctggtggctgctgttgacttcttgttagttgctagtgctacatatgtagggagcccctgatctggttgctggtctcatctcatgagcgaagaataatgctaactagacgacgatttgattattactttatgttgtcagtcacaacatgctacacttattacttcg

SEQ ID NO: 142813 - DNA, 1600 bp, Zea Mays
gatagacttcgtaggtgcggacaggttttcgctctaccccgacacaaacccgacccgttacgccgcaccactcttcttcctctgctccgcctcttcacccagcgtcttccgattgctgacggatccctcttcgccgcggccgccgccgcggaccgaccgtgggagagaaggcgaggcgggagcgatggaggccgccgactacggcaagcttttcgtcggcggcatctcatgggagacgagcgaggaccgcctccgcgagtacttcggccgctttggcgaggtcaccgaggccgtcatcatgcgggatcgcagcacggggcgtgcccgcgggtttgggttcgtggtcttcgccgacgccgcggtcgccgagcgcgtcactatggacaaacacactatcgacggacgaatggtggaagcaaagaaggctgttcccagggacgaccacagtattgtgagcaagagcaacggcagcagcacagggtcacctggaccaggacgcaccaggaagatctttgttggaggcctgccctcgagcgtcacagaggctgacttcagaaggtatttcgagcagtttggcatcatcaccgatgtggtcgtgatgtacgaccacaacacacagaggccgaggggctttgggttcatcacttacgattcagaagacgccgtggacaaagccttgcacaagagcttccatgagctcaatggtaaaatggttgaggtcaagagggcagttccaaaggagcagtctcctggacccgtcgtacgttcacctgtgggagtggggcagaactatgctacgaacagggttcatagcttcctcaatggcttcaaccagggttacaatccaaaccccataggaggttacggcatgagggtggatggaaggtatggcttgctttcaggtgcacggaatgggttctcttcttttggcccagggtatgggatgggcatgaatgttgaaggtgggatgagcggaacatttggtgcaagctctggtttcatcagcaactccaatggtaggcaaatgggttcgtacttcaatgcaagttcgaacagactgggtagccctattgggtaccttggtcttaatgatgttccgggatcaatgttgagttccatgtctaggaatgtttggggtaatggaagtctaaactacccgagtaatcctacaaacatgagtgcttttgcttcacctggaaatgggagccaagtcagtcttactggtgacaattggggaggtcttccttctgctcatgggatgggcaacatttcaagccttgggtcagggaaccttgctcgtggagctggagataataacttcggtttgccttctggcagctatggaaggagcaactcaactggtacaattggcgagcctttttctgcagcaggcaatacatatgatgtaaacaatccagatacatatgggggcagctctatttatggtggcacagcctggaggttcacatcatctgaggttgacatgccttttggtcatgatattggaaattttgatccgacaatcaaatgagacatgtcggcaagtcacatgtgcaactatcctgttaacaacaatcagccaagcagaggtcagtttcca

SEQ ID NO: 142814 - DNA, 578 bp, Zea Mays
ctgccctaccatgaagccgaaatagcagagttggcacagacggtgatgggagaacgcatagagcttctcggatcctcctacatggattccaagatttacgccaagatgaaggatttagaagggaccggggaggacgacgaccctcggaagatcttccagaaaggcatcaagttcggtaagaagctggagaggaagcccgatggggatcgctgggagttgctgcaagaattctgggccaaggcaaccatccatgccgctaagtcgcactacaccacggagcaacacatgcagcaccttgaaaacggcggggagttcctcacgcacatctgggctctgcttagtcatgcaggccttctgaatagcaatacgggcaatctgggctctgcaccctcagctgctgtatgatactctctctgttcaagccaatggcggaacatccttcagtgcttctctttttttttcccacaagtttattattattagtttgtggagtccaactcgatcagtatatattttttttcttttcaagatggcattgtttgtgcgttggcttttcttatgtttgttgtatgaataat

SEQ ID NO: 142815 - DNA, 824 bp, Zea Mays
ttttaatttctttttggaccatggtgcaaactcctaatgattaattttttatgttgcccaagccccaaggtgcaacacatttggataaaatcgtttaactctcgtctatacagtatcaacattcatatatacatacatgatgttaagaaaatctgatggtatatccctcttttccacaatcttttaatctgttttacattaatacactacctaacaattcaggtacagcactacacatttccaacagtgtactgaacactcaactacaggacaatgctgcaaaactgattgtagcaaaattccactctcggtaggaaccagttggccacgagaaattcctgtccagtgtgcttcctaatgtccttgatttacccagcacaatgttgaatgactttggcaggccttgtgcagttatgagaactgtctcactgagtcactaggtcgcagattcgaagcagcctctctacatttgtagggagaaggattgcctcggtttatcccttccccaaacttcactcatgtgagagtctccaacaatgggactgccttttttaattttgaacaaatttggcatgagaagttgagaactatatcaatacaaatattgaggcagatggaagagcgtcaagagacaatgccggtgtccatactagaattgttcatcatcattcaaagctgcaggggctccttaggttgcagggactggcagcagtggcagagggtgatccaaaatcaagagggggctaatcacacagacacaagccgatgtgcagtgagaaaccacccgctgtagaaggcaagctcggtggttccagcaactgttg

SEQ ID NO: 142816 - DNA, 2281 bp, Zea Mays
caagcagtgtgccctcccattcagatttcatcctcggcgtcgtctcctgtcctctccacgccaagcaacctccccaccccgccccaccctccatgctcgcctcgagatcttagcgggcagctccggagagcgccgacgagccccctgatccctcctcgccgccgccgccaaccgaccgggggaggagaggaggggaggggagcgatggagaccgccgactactccgggaagctcttcgtcggcggcatctcatgggagacggacgaggaccgcctccgcgagtacttcggccgcttcggtgaggtcactgaggccgtcatcatgcgggaccgcagcacgggccgcgctcgagggttcggtttcgtggtcttcgctgacgccacggtcgccgagcgcgtcaccatcgaaaaacacatgatcgacggccgaatggtggaggccaagaaggctgttcccagggatgaccacagtattgtgagcaagagcaacacaagcagcatagggtcacctgggccgggccgtaccagaaagatctttgttggaggtctgccctcaaatgttacagaggctgacttcagggggtattttgagcagttcggtgtcataactgatgtggttgtgatgtatgatcacaacacacagagaccgaggggctttggattcatcacctatgattcagaagatgctgtggacaaagccctgcacaagagctttcatgagctaaatggtaaaatggttgaggtcaagaaggctgttccaaaggagcagtctcctggacctgttgcacgctcacctgcaggagtggggcagaactatgctatgaacagggttcatagcttcttgaatgacttcaaccagggttacaatccgaaccctataggaggttatggcatgagggtggatggaaggtttggccagctttcaggtgcacgaaatgggctctcttcttttggcccaggttatgggatgggtatgaacgttgaaggtgggatgagtggaacttttggtgcaaactctggtttcatcagtaactccaatgggaggcaaatgggttcatacttcaatggaagttcgaatagattgagtagttctattgggtatcttggttatgactcaggatcgatgttgagttccatgtctaggaattttaatgcaggtgtaaactacccgatcaatcctacaaacatgagtgcttttgctgcccttggaaatgggggtggcgtcaattatatgggtctcccttctattgcccctgagttggcccagttgggcaacatttcaagccttgggtcagggaactttagccgtggagctggagttaataacttaagtttaccttctggctcctatgggaggagcaattcaactggtacaattggtgagcctttttctgcatcaggcaatgcatatgaagtgaacaacccagatacatatgggaacagctctatttatggtggcacatcctggaggttcccttcatctgaagttgacgtgccttctttcagtcatgatcttggaaatgttgatccgaatatgaaatcagacatatcagcaaattacatgggaaattattctgttagcaacaatcagccaagcagaggtatcacttcatagtgggagtattactacacattcatatatgacttgggatagatgaagcacccattcagtcaggcagccaggtgcgtgcatggcaactgtgaatgggtgatatgtcaggttagttttgtctagctgaccagcggtgtggtttacaacaccaacatgctagaggaggaggaagcggatacagaaacattttctgaggggcttcttttctttgagtcatgtttttagttttgattcctgcgcgtggctagctccttttggtttttgaatgagatgtgtagtggtgattattgcggcgcatattttagagatcgtggttcttccaacataagctggaaaaagaagtctgtatacggatgaacatgtataccaaccaaagggatgctgtattatcttgcccatttgttactacattagcctgtgttttatatcgttctgaaccgttcggttttgcactctggaggttttgttggtttgttcgtgaattatgtatgccagtgtagtgtttttctcgtcgagcagctccaatagttatataaattttagctctctaaatcacagatttaagaagttactaaataattttgggagtaaaaaaaatgtgagttctccaatagttctctatatatatgttgtagttttgttttgtatctatccacatctaaaaaaaata

SEQ ID NO: 142817 - DNA, 3078 bp, Zea Mays
atggcctccgcctccctgcaccccgcttctccctcccacccaaaccctaaccatagccccgacgcagatctccgatctgatcgccccatgcccgacgccgacgccgtaagcggaggcgcctcgcccacttccccggagaagcgggaggaggaggaagaggaggcgccggggaaggaggcgaagccggcggcggcggcggaggagcagccgaccccacggaagacgcgccttccgcgcgcttgcaacaataagcccaaacccccgccgccgccgccgtccgagcgtccgcgccgccgtgccgcggcggcgtcgggcgccggcggcgcggacgagacgccacaatgccgcgtggtcacgcctctcgtgtcggagcccgaggcgcctgctgagcttccccgctggcggctccgctgcatgtgggagctcggctccgtgctcaacttcctccacgtgttccgacctctgctgaacatcactggggagttcacggctgaggacgtcgaggcggcgcttatcactcccaacgagattctagatgatgtgcatatgccactgctaaagtcaattcctcctgtaactcgcatggctatgggacgtggaacctgggtgaccgtcctatgcagaaagctgaaggattggtggcattgggttgcagaaggtgatctgccaattgttgcatctcatggaactgaaattgagacatacaaaacactagaaccagctattcgtttattaattttgaaagcgatatgtgatatccgtgttgagcaagaggatattcggaacttcattgacagttcccttaagcatggtcatgacctttctacttttcgtaaagaacggattggaggggattcccttggaatctcatactggtatgaagatgatgagattctcgggcatagattgtatcgtgaaattagacgagtagaacaggttaagaaggagcctggaaagaggtccaggggaaaaggaggatcttcagctatttcagttgtgtcctaccaatgggaaactgttgcgtccacctttgatgagtttgatgatgtggcagaaaaactcttttcaagtcggaacaggacagaggtttctcttggaaagaagttgaagattgaatatcttccagagatagaaaagctccataaaaagaaagagaggttgctcaaaaagcaacagagagaagctcttcttcttgatagctacttggcatcagatggacttaccaccggccgctctctccgtgatagaaagcccgtgacttatacatttgatgactatgatcgctcaataaatgaagccatcaaaattacgaagaaaagagagaactcagctgagcctgttgctactactgccaatagaagggtgcttcctccaagatcggaggcaccaagcaatgggaagttaaataatggtccctcaccaacaaccaatgactcatctgatggaaattcttcaaagtcagatgactaccgagacagcgatggtgaacaagaaaatgaggcacttgatcgcagcaaccggcggaggaaaagatctcagagatacacacaagactttgttgaggctgtctcagatgttgatcctaactttgacagtgacgacgatatcatgggagaggcagtgtatgatgacgaatacctgagaagtcgcaaacagaataagccatcaagtgcttctgaagaggatgaagagttccggttggaagaagatgccgaagatgatgatgaagaggaatattcattgagtaccagtgaagatctagaggagccacaacggcataaaaagctggaaactcgtggccggcgaggtacgaagctgagatcagttggtgaaatccaagcaggtcttagacgcagcaagcgttcttctcgtcctcgtattaactatcgccaatatgatttttcggactcggatacggagcctcgaaaggcaaggaaatctgacgcatcagatcctgatgctggctccgatgccgagaatgatatggagctctcgacatcgagtcaagagcaagaggaggaagaggatgatagtcatgatgaagaaaatggtaataatgcgaatgataaaatggaggaggaccacactgcagaagaaaataaaatagaaccagaggaggagaaggagcagccacagcagcagcctgtagagaagatggatgctcccagcagggaaagtaaaagtgtaggaagaacattcctagatctaaacgagcttgcacctggaggtggctttgatgatggcccaagcttgacagtgagagatgacatggacaacatctagggaataaagttttgttttgatacatttcgggtgctgttggccagttttctgacttccaggcaagggcagatccatggtcctgatggcctgtgatgaatggtgcaactatggtttggcggtgtgagcttatggttatggctgcttcactgatttgcagcagcaggacaggcgatgttccacttgaagcgactttgagcttctccggtgcttatgttatacgtggagaccatgaggaggtagttttatgtatactacatgaaggtcgcaatcgatcatagctgtattgcggccaggctgctgctgcgttgcggccggtctctaggatataaatttattgcctccatttatttagtcttaggcattgtgatgtcaatgagaacatggagggaaacctgtacaccgagtgcggtccgtcggcattcgcccgaccttttccacttgtagattgtaggttttttaaagtccgggcgggattagttctgtatctatacctgacagtctgtttttttctgtcacacctgtgtagctgacattgagcttgtccctgaatgcacaccggcaatgcctctcgttcgctctatatggagaagatgctgcatgtattcagctgatgttgtagcctatggacatgtccattactcagagtggctggcctggtgattgctaatttgatgtatggtttataaaaccaaattcctgtgtgcgtattggttagttgcaaaactttgcaaagataaataatttgggggtgttctgttccattaaacattgcaaaattatgtgaaatgtttggtg

SEQ ID NO: 142818 - DNA, 132 bp, Zea Mays
gtggggacttaagattatctccatgtgggaatttaggattatctttttataaactatttattaatattggtaacttatttgcaatttccgatcgacgctacaatatttttatgaatttaattgtattttgat

SEQ ID NO: 142819 - DNA, 2047 bp, Zea Mays
aaaaaaaggttgataaatcccatcgtattacaaaagcagtttgcatccctgttttgaacatgtgcattccattccttggtggtgcatgtcacttcgatgctgcttttggacctcactttgccagtgcagtgcaatccctcacctgccatgcctactcctagatttgctcaaagatcacatctctcatctcatctgttgattgctttcatgtaatctaggttatcctctaaccttagttgtacctgaaggataaccaaggcgcagtggtaaaccaaggaccagaaagcactgccagtgtgccatctgaaactcctggtcattctcttttactaccattgaaagatcgatctaagagggaggggggactcaaaaggcaaaggacaaaggcaaggctgcaggctttgctttgattctaccctgacccccagcaaaacattaggcccttcaaaagcacatcagaacctgctgcagcaacaagaaactgtgaagaaagcacacagcctgtccacagcatattattgtgcagactgcagcgcagagagaggtggctttgcacttggctagttgcatgcaccactccatgaccatgagaagctcataggactaggaggctggtggcggtagtgcaaaaaagaaactggaggtagtataggattatgagcaggccagcttggtctgcgagggaggcattggcggcctcagccgtggccgccgtcctgcttggaggccttgtgctgatgtctttggtggtggggagggacgcgaggacgccatcgccagctagcgcggctgcgcctgcggtgggtggtagaaggatggtgatcggagccacggaggagctgaagggtggtgatgatcctttgagcagcagcaagaggagggtgcccaatggaccggatccaatccacaacaggtaccttctctttcttgcgtgcaaattaacatggaatgctctctctctctctctctctaaaactttctgttcatttttgtctcactaaattcaagctgaatacatgtaaaaagaatcggcctcaatagcagcttgagatttggtcatgttacaaatcaagtccctatttttcatgctcttgcatgggcctcctgacatcctcttttgacacccaatggcaaaatggtagaagatgagaagaacatgatatgtacttcttttgccatgttcctccaaggatccccataaactcctaaggtccacgtgtattattgaagtggattggagtgaaaatcaaactcagtcccaccctaatccactctaacacacacacacacatgaactgaaatggatacagctgcacctaaataagacctaactgtggatgcaaatgcatccaaacaaggtctaattgtctctaccatatcatcagtgtaaaactgtagactaaatcaacggtgataaagtagagtgctaaaaatctgatagactgaggcaaaaaagtagagtgtagaacatgatatatctacttaaattctgtcactgaaaaaggatgattacacagtttgtcttcattgcacaccatctcccaaattaaaaagcaaaatcttgaacaacacacttgttgcatggtgttgtattgcaacgctttccccttcccctatttcccaaaggctcacagctcagtcgtgcgttcttccaggggagctggagagtctggaagctcaccaggccgagcgtaggcagcagcggtgcacgccggccgccccccaaagaatggaagtttcccaaacacttggcgctggatccctcttctcatctgtggtggtggtggcctggtgtgtgtgtgtgtgtgggggggggggggggcgggtctggcgccgggacgtcacgttctaagcactgctatttgtgatggtttcggcacgaattaaagacactggcttttccgaaaacaaaaggccacgtactctactgatgacggcacaaacgaaagacagcactgtcaagcttccctctcacgaaagacgtacgccggattaaagtttgagcagagagagagagatgtgcaagagctcctttgttaatttcact

SEQ ID NO: 142820 - DNA, 937 bp, Zea Mays
ttgtgcaacagactattcatcagctatactttttggaagtttttgttggggggtgggggagttggaaagagttgcttgctgctgcgcttctctgatgacacattcacaacaagcttcatcaccaccattggcattgatttcaaggttaggacggttgagcttgatggaaagcgtgtaaagttacaaatttgggacactgctggtcaagaacgtttccgaacaattactactgcctactacagaggagccatgggcattctgcttgtatacgatgtcacggacgagtcatccttcaacaacattagaaactggatccgcaacatagagcagcacgcgtctgacaacgtgaacaagattctggtgggcaacaaggtcgacatggacgcgaagcgggtggtgtccatggctcaaggccagaagcttgcagacgagtacgggatcaagtttttcgagacgagcgcgaaaacaaaccagaatgtggagcaggtcttcttcgccatggcgagggacgtgaagcgaaggctcaccgagaccgttgccgccgcggccgagcctccggctatccagatcagcaggccggactcgggccaggccggcgcagcctcgtcgacgaggtggtcatcgtcctgctgtagcacctgatctgccgccgtgtgtgtggctggctctggctgctataggttactgcttaccgcgtggtgtgtgtgtgtgtttacttcctccggtgccaagccaagatttaaatttcgctccaaagatttgccggagcaaacgtgtaggcagatagctaggctgctgtgctgggtttgcttgcttctgtcgtgtaaacaaaacccttgagagacggtagtgtctgattgtgtcggaacatgacatgcttgtacattattagtgcatcgtatatccagctgttgctcccatgtgcactgcgcagggc

SEQ ID NO: 142821 - DNA, 681 bp, Zea Mays
atgtcgaccatcctccgcctgcacgcgccgtctcctgcagcggagcgctgcctctcctccagctgccctgaaccacgggctcagaaccgcatcaccactcgacgcgtcttggtctctcgcccgtccgtatggtcacagcaacaggttttggcagttccgtctacctcaccatgcagtcacagcagcaggctccagcagcttcgccagattggtcgccctcttgtctgcgcttatttgtttgtgttttctcctccggcgagcgacgaggtgaggtgtgtgaacgagttcagcgacgagagcaagtcggtgccccttccacttggcagggaagaagttacaagcttcgcacttggaatttgttctcatgttcttcaggagtatgaatatcctctaggcaagaggaggtctctaatctcttctaaagtaggctacatcaatgagacattgcagcacatacgagtcttcaaagacgtcctaattctgacgaaggctcgaggcaggagaatgtctctaatctcttctaaactaggctacatcagtgagacattgcagctcatacgagtcttcaaaggcgtactaattctgatgaaggctcgaggcaaaaggaggtctctaatcacttctgaagtaggctacatcagtgagacattgcagcccataccaaaagagacctcagtttag

SEQ ID NO: 142822 - DNA, 594 bp, Zea Mays
atgagcaaagctcaaggaagtaatgatcatcaacatgaacatgaagatcccgaagggtcaaaaccactagaagagtacaccatcccgaaaggcaccataacgcgtatcatgcgccaagtcctgccgcaagactcgagggtcaccggcggcgccaaggagaccatggaccagtgcatcgtccaattctccacggccctcgtacgcgccgccacgcaagagtgccggcgagaccgccgcctcaccatcaccgccgacgacctgatcgtcggctttgctaacctcggactggctgactacgtgcagcccatgtccgtgtacctacgtctgtaccgtgagaccgttaataaccagcagcaggccgtagcaccgccgtcaccgaccgtgcagagagggacgacgacggcagtgccgccgccgccgccgaacctcacgctgcaactgggcctgccgtccgtgcctgatgtcaccgagctggcgcgtgatactgacgtgtacgcgctgtggcatggagctgcaccggcagcggggagcacgagcgcctcctcggtggcgccgatgccgccacctgctgctgatggtgatgaagatgagtga

SEQ ID NO: 142823 - DNA, 116 bp, Zea Mays
gaacaaacgcaggagagttgcgtgtcattatattaagaagaaaaaaacataggagagacaagacttgtcaaccctatacaaaggcccctaggccgagacccccctgacattaacac

SEQ ID NO: 142824 - DNA, 388 bp, Zea Mays
atgaagtctatgaaatggcaaatacaacttgatgaagtccatgatcttgttggtctccagatcgatcttgatggtgtcgttggccttgatgagagggtcggagtcggatggtgcggtcgtcgtaggtgttcaggtaggggatgactttctggccaaactgaacagaccttaccttgcagagcttgaactgcacacaaaccaatacataagtgtggttcttgaaagacaattgatccttgaaagacatttgaccgcaacagccatttcatccatcatatcatgccattctcgcttgtgggaaattggaggatgcatgctttatagaatacttggatccactgtacaaattgatacttttctcctatgctcaggggatggatccaattga

SEQ ID NO: 142825 - DNA, 594 bp, Zea Mays
ggagtttctaatagagctacagttggttttcgcttgcccatgagaccatgagggagtttctcacagattttttgcttctactatcaacagaccaacattcttgttttttttgcagtgtccttccgggcgacgattggttcatggaggtctcccaagaagttgtcagcatcatcagtggaaggggtagagttgctaatggtgacagggaagtaaacagcccaacggcctcggtttcagcgcactccatttcttcgttcagatcccatggcagctcctagtttgcaagttggttttttttggtaggcagatcactgtataataatcgatagtatattcttccaacctattcctccactcatttgttttttcttttctttttcaaaacttttgtgctagtattagtagagaggcataattgtttaacctaggaaaataagtcttgagtcattttgttttagagagctgagtcatgcaagtgttgcatggccatattgcacgaggtctacaccgatctgtatcattctttcatcagtttttacttgccagttggcacgttgcatttcatgggtacaagattctacgcttgaagttgtt

SEQ ID NO: 142826 - DNA, 4566 bp, Zea Mays
gagccagaatccagaggctccgtccttcggctaggcgagatcacgtgtctgaatcaaccaaccaaaccctaacccttgcagaggctgcggatgaagccatccaccgccggcgacgcctctgcggcggcggcggcgtcctcttcggggccctctacctccgcgtcgacatccgcgtccacgtctaccgcggacgccacccactacatcgccaagcgggtgctccggggaagcgccgtgctccacgtcgccgagggctgcttccgctcgcccgactccgcggacgtcgtcctcgccaaggaaacttcactggagttggttgctgttggtgatgatggtgttttacagtcaatatgtgaacaagacatttttgggattataaaagatattggtgtattgcaatggcactctagacataatggtttaattccacagatagaatgcaaagatcttctggttgtcctttcagattctggaaagctttctcttctttacttttgttctgagatgcacaggttcttcgcaattgccaatattgagttatcgaaaccaggaaatctgaggcatcatctgggaagaattttagcgatagatcgagaatctaatttcgttgctgtcagttcatatgaggataagtttgcccttatacatgtttctgtttcccagagtggttctggcagcggtattatttctgagaagaaatatttttatccaccagaaaatgaagatgacgcaaggatcataacttcgtctaggaccagcatccgtggtacaatttggacaatgcgcttcatatctgtgccccaagatgaagaatactatccagttctggcaatgataattaacaggaaaggctctgatgtgaatgacttgtcgttatttggatatgactccagcagctgtgttatcaaccacctctctagttattcagaaattggacctttggtacttgacgtatcagaaattcctgaaacgtttggctttgcacttctgttgcgtgttggtgatgctttattgttggatcttagaaatccaacaaatgtctgctgtatccaaagagtcagcttgacgactaacctgattggagagccaatcactgttgaagatccctgtccaggattagatgttgatgatgatgtggctgcttgtgctttgctagaattgagagattctggtaataacataatgaaggatgatggttatatggacattgatggtgttgacagcagaagtaatgtgaaaccaaggatcgtttgctcgtggagctgggagccacctgaccctgtcaggcgaggatgtgcaaggcttctattttgtttggatgatggagaatttcatattttggaatttactttggatgttgaaggggcgaagctgtacacatttgaatatattgataggactttgccttgtagacctcttttttggatgaaaaacagaatgataatagggtttgtagagatgggggacggcatgatttttaaacttggtcaccgcaggttgcttcataaaagcactattcagaatgtagcaccaatattggatctagcaattgctgattaccatggtgagaaacaggaccagatgtttgcatgttgtggaatgtcccctgagggctctcttcgagttttaaggaatggtgtcaatgtggacagacttctgaaaactgaagctatttaccagggtgtcactggtttgtggactttgagaatgaaggcaactgatgcctaccattcttttcttgtgttgtcatttgtggaggaaaccagaatactgtcagtaggactaagttttaatgacatcagtgatgccgtgggattccagcctgatgtttgcactttagcatgtggtttggtggctgataatctgctagttcaaatttacagcaaaggtgttaaggtctgtttgcctacagtatacgctcaccctgaaggtgcccctttaacttctccaatttgcactgactggtatcctgctatcactatcagtgttggtgctgtaggacataatattgttgttgttgctacatctaatccttgttgcttatatgtccttggtgttagatcatcatcttcttaccagtacgagttgtatgcaacacatcatgtgcaattgcagtatgaagtatcatgcatatcaatcccacaagaggattgtatacatgataatgtatctttcagctgtggagagggtgatgacatttgtaagaacccccctcctaaagttaatgtttgcaagtttgctgttattggaactcatagaccttcagtggaaatcatctccttggaacctggagaagcattaagggtattaactattgggactgtatctgtgaataatgcacttggcgcacctatgagtggttgtatacctgaaaatgtcaggtttgttgcggctgagaggttttacattcttgcaggcttgagaaacggaatgctactcagatttgagtcagaaacacgtgattatctccctggttttctctacaaggactcttctattccttctgttaatacattccttcagttgatttcgatacggcgtattggaattactcctgtactgttagtgccaatacatgattcagctaatgctgacatcattgttctcagtgatagaccttggctattacatgcagcaagacatagcctggcatattcgtccatttcatttctttctgcttctcatgtcacacctgtttcatctgttgattgccccaatggtctactgtttgttgctgagagctgtttgcatttggttgaactggttcatgggaagcgattgaatgcacaaaagttttcaattggagggactccaaggaaagtgctataccataatgaaagcagaacactgttggtactgagaactgggctaaatggtgcatcgtcttcttcagatgttgtacaagtagatccacaaaatggggtattactttccagatataaatgtgaacctggcgaaacagcgaaatgcatgcaaattgcaaaaataggaaatgatcaagttttaattgttgggaccactaagtctgctggacggccgatgatgtcaaatggtgaagcagaaagcatcaagggacgcctgattgttttaagcttggaggccgttgaaagtcctcgtgagagcagttcgtttattccaacttttagttttaatccctcttcacattctggttctcctttccacgagattgttggatatacaactgaggaattttctagtaacagcatgtgcagcagtcctgatgagtttagctgcaaccagatccaagctgaacaaatgacagggcaattgagatcattgactcaatatatattgaatggcgcagttcttgctctgtgtccctatctagatcgttatgtgttggcagctgctggtaatatgatttatgtatttggtttcacaaatgaaaatccccacagaataaaaaagtgtgctgttggtaggacacgatttacaataacttgcctgaagacatttgcatcacgaattgctgttggtgattgtcgtgatggtgttctcttctattcttataatgagagtcataggaagttggaattggtctattctgatcctgctcatagattggtgggtgatattgctcttttaaattgtgaaactgctgtggtatcagatcgacgtgggagcatatctgtattatcatgcaccagattggaagtttcagaaagtccacagaagaacttagccgtgaattgttcattttatatgggtgaaacagccatgagcattcagaaggctgcattcaggtatcggcttccaattgatgatgatactgacccggtgcttgagacagtttacaactgtatcgtggcaagtaccatgttggggagtctctttgttatgattccactttcaagtgaggagcatcagcttttgcaagatgtccaagaaaaactctcagtacacccattaactgcaccggtcctgggaaatgatcatgcagagttccgtcagcgtggtaccccttcggtagtgcctcccattcttgacggtgatatgcttgtgcaattcttggagctcaccggtgaacaacagcaagccatccttactcatgctttgccagggaaggggcaacataggcccctctcggttttccaggttttgcaaacattagagcgcgtccattacgctcttaactgaggctttcttcaatcacagttactacaaggtttggatattagagctggttgaccttcattgtttgagatgccgtcagagctgaggttttagtgaccttcgcaatctagacggccgattccaagtctgccatgatatttatcagaacgtttgattgatgatgcaactggagcttgatactgggaagtctcatggtggcgagtatcccgtggaggcaccagattcgtcgaacctcctgtgtatatacagtcggccgcttttggtagactgttgtatggcgcattctgcatagaaacgaatattctttccgtttgtttcaatagataatgtaatgtttcttacgtcagctggtcggatgctcaacgagaaataagggaaacaatgaattgcattggccgtcctgctctatca

SEQ ID NO: 142827 - DNA, 113 bp, Zea Mays
gtcttcatgttttatttcatcaaaagtacttcacatgttttcttttgagttgctcaattttctcaagttaatccgcaccttcctagcccgacttgcccagattcgagcggcgg

SEQ ID NO: 142828 - DNA, 372 bp, Zea Mays
atggccgccgccgccgccgcccccgacgccgacgtctacgatattccgtggctggagaagtacctccccgcccgcgtcgctgacgtcatcggaaactccgatgccgtcacccgcctagaggctggcaatgtgattgatgatgaaactcatttggaagagcatattcccccattccccagttcaacggatgttaaaagggattcacctcttgctcctccccaccctccatcacctacccttgaagaacctgtggaagaagcacccaagacatatgcttctgttgcgaacgaaatcaaaggcaacgatggcgattacagagtcacagcaggctcaacagttggcccagcagccacagtctgcctcagtgcatga

SEQ ID NO: 142829 - DNA, 795 bp, Zea Mays
aacacaagtgtacagtacgcacggtagaattgaaggtaaggcacttgagcaagtgtgtgtctatgtacagagagctcaacctcacactcagttttttcaagcccagaacaaaggtgcaaaaaaaaaagaaaagaaaaggaaaacagcagcacacaaaagcatagaattaaacacctctctctcagtctatcttcttcttcttcttcttcttcttcaacctcgagtcctttttttctttttctgaaggaataatggaaggccagtgctgtgctctcttgatcacatatcgatcccacgtgcataaatacgtacgtgcacgccatcgcgctgatgagattcttcttcagagctcgaggtcgaggacggccgggtggtggtggtggtggcggtgggagtcgatgaggatggaccagagcacgcgcacgtcctcgtcctggcaggactgcacgtccttgtacaggatgcgcatccccctccctggcagcgcagcgcaggcaaaaagaaaagaacgcgatgtgtttcagggcaagtgcaagtgcaatgcagctagctagcaaaagcgaccgagaatgatcggaggcgggcgggcgggcggggcgagagaggtcgatggcttacggttccggcgctcggaatgcgccctcacccacatcctccggagaggggagaagagggagtggagccgcagccaccccatcatagatgatatcccccgccgccacacgggagagggtagagggagaggaaccaacaagtgtggctgcccctgccgtgcaggaggatggaggacgggcg

SEQ ID NO: 142830 - DNA, 878 bp, Zea Mays
tacatgtcctttcaattgctgaatctatgccagtcagtcaaaaagtgaactctgtttggtctcccaattgtacagggttgcgggtcggagcagtgttaatgacctcaaggtgtctgcagaggtctgcatgcctctgataaatgctatcgtgactgagatcaagaatgggacttaccctcaaggatcattcttgaatgtagatgtacctacagatgctgcacaccccaagggctacaaaattacaaaacaaggaacatatatggccagaattagttgggagcagacggtttacaagaagcctgcagtagaaagttaccagacagcaaacatggatgttgatggtgaaaaggatagcgaactagttacttcagaaaatgacctactgtttaagagagtgattgtagggagaagttccaatggagtggaaggagaggaaacggaccacaattccctagttgatggatatatcactgttactcctttgggtgctctttcccgcacagaaccagacgccataccgtatttcaaagcttgtgtctcacgtctggttgataatttctcttctcctggctcttctttttctagaagcagaggatgagccatgaaatttctaaagctgtttatttatggccatgatcaagttccatattgctttttcctaacccatacatggttaccatacatgggcaatattgccattcatgctacctgaatgttattactgcaatcagcatgtgtattctgcttcatagcctatgtcagaattatgcattcacaaatggttgcccgcttctttaccatgcatcttgtaagaaaaataggttcatttacaaatttattttggtgtttaatattcaacaagagcatttgaactaaca

SEQ ID NO: 142831 - DNA, 111 bp, Zea Mays
ctttttgccgccatgcatccttgtgtttccgcacatatacagcccaaattaattagaagagacgggactggctctcgttctagttatgttttttttctaagagacatccga

SEQ ID NO: 142832 - DNA, 567 bp, Zea Mays
cggaaaaaaaatcccattatggacggcgactggtactttttgttcgcggggacggcgactggtactttttgtcgctgcggagacggggagtcttccgactcttccccaacgggaattcctcattcacatccctacgcacgaacggaaacgccccatgctgcgctcgcagtctcgcatggactccaccactgctgctgctaccgcggccgcggctgcggcgccggcgccggtgctgctggtgacgaacgacgacggaatcgacgcgccggggctccgcttccttgtcgaccgtctcgtcgccgcagggcgataccgcgtactcgtctgcgcgcccgacacagacaaatcgggtgtgagccactgcatcacatggcgccctgcactccgctgtaaacgtgttgatataataggtgctacagcatttggagtttcaggaactcctgctgactgtgcttctttaggcatctctggaaaactatttgatggtttggttcctgatctggtacttagtggaatcaacattggaaataattgtgggtaccatgtgtaagtatctttgttgctaca

SEQ ID NO: 142833 - DNA, 2770 bp, Zea Mays
cctagacgctcatgggccggttctgccttatctccctccctcctagtcctaccacttcctcattccccacgtactctctcggctgctcgcttatggcgatcgaagctgcgcgcctctcaccgtccatcgccgccgccgccttcctcgccagccgcccccctcttgccctccgcccgttctcccttcgtcgcaggtttcccctcctccgcgtcctcgccaactcatcgggaggggacggacgcgtcgtcgctctgtcctcgtctgagctccgaaagcgccgaggcctgtcttcctcctctggggctgcggactccgcatctgacggggatgagaagctacgctcgcttcgtcgactcttcgcgcggcccgacgttgctattgacgcctacatcgtcccttcacaggacgcccaccagagcgaattcattgcagaatgcttcacgaggcgtgcctatctgactgggttcactggcagtgctggtacagctgtggtcacaaaaaataaggctgctctctggactgatggccgttattttcttcaggcagagaaggaattgagccaccactggacactcatgcgcagtgggaatcatggtgttccaactactagtgagtggttgaatgatgttttaccatctggttgccgagttggtattgatccgtttcttttctcatttgatgctgctgaagaactgaaggattcaatcgccaataagaatcatgagttagttttggttcagggcatgaacctagttgatgagatatggggagatgcaaggccaaatcccccaaaagaaccaactagggtgcatgacatcaaatatgctggtattgatgtgccatcaaagttgtccttcattaggtcacaacttgctgaaaatgggtgtgatgctgtggtaatttcaatgctcgatgaagttgcttggttgttgaacatgagaggaagtgatgtcccacattcaccagtattttatagctacctcattgtggaggttagcactgctacactatttgtagacaacagcaaagtttctaaagatgttctggagcaccttgagcaagctggtgtgaaacttaagccatatgaagcaattatttctgaagtagaaagactggcagagaaaggtgcaaagctctggttggattcttcaagcgtgaatgcagccataattactgcatttaaatcaagttgtgacatgaaaaagaaaggaaaagcaggtgaagaagttggagaaaaagaagcatcttcaaacgaccggataactggagatcctagtgtccacaatggagtcataagtgctgtatacaatgtttcaccggttgcacttgccaagtcagttaaaaatgatgcagaaattgagggaatgaagaattcacacttaagagatgctgctgctttagcagaattctggtgctggctggaggaggaaatctgtaaaagtgtgccccttacagaggtgcaaattgctgaaaagcttcttgagtttcgtcaaaagcaagatggatttatcgagacaagcttcgacactataagtggttatggtgcaaatggtgctataatacactacagaccaaccccagagagctgcagctctgtaggaagtgacaatctgtttttgttagatagtggtgctcaatacattgatggaactactgacataaccagaacagtgcattttggtgaggcttccccaaggcaaaaggaatgcttcaccagagttttgcagggccatatagctctcgatcaagcagtgttccctgagagaactccaggctttgtgctagatgttctggcacggtcatctctgtggaagattggactggattatagacatggcacaggccatggagttggagctgcgctaaatgtccacgagggacctcagagcattagctatcgatatgggaatttgacagccttacagaagggcatgattgtcagcaacgagcctggttattatgaggacaactcatttggcattcgtatcgagaatttacttctggtaaaggagcttaatctggcaaattcgttcggtggaatttcataccttggttttgagaaactaacctttgttccaattcagagcaagcttattgagtcatccttgatgtcaccttcggagatcaattgggtcaatgattaccacgaagaagtctgggaaaaggtttcccctttgttgagtggccattctcgcgactggttatggaagaacactcgacctcttttagatgtgtaataataactcaacgcacagcacggcttgactgcgtaagtgaaagaaatgaacagacatgtttggctggagcatctcttgaagatctgatggccttcaatggaatgcaactatatggcagtaaacagaggcaagacaatagatgcgtaggctggccagggttcagcggatgataggttgaggctggtgtatttgacatccagccaatttggtgcaacacttgaaaaatgaattacatgcaagccttttctatttattacactatcgacgacaccgtccattgtttgatgaatttattatttattacatttggtacctttttttatacaaaaaaacatctttttagagtgatgaagccatttgagaccatggtttcgtatatggaatcagtcagattcttagggtgctcttggtagggctatggcgaaaacaatttgagctatgatttttgtggtgaattatgatggagctgaagctattttgaagaaaacgattgataaaatagtttggtgacttggcgttactattaaaaaaga

SEQ ID NO: 142834 - DNA, 2615 bp, Zea Mays
cctagacgctcatgggccggttctgccttatctccctccctcctagtcctaccacttcctcattccccacgtactctctcggctgctcgcttatggcgatcgaagctgcgcgcctctcaccgtccatcgccgccgccgccttcctcgccagccgcccccctcttgccctccgcccgttctcccttcgtcgcaggtttcccctcctccgcgtcctcgccaactcatcgggaggggacggacgcgtcgtcgctctgtcctcgtctgagctccgaaagcgccgaggcctgtcttcctcctctggggctgcggactccgcatctgacggggatgagaagctacgctcgcttcgtcgactcttcgcgcggcccgacgttgctattgacgcctacatcgtcccttcacaggacgcccaccagagcgaattcattgcagaatgcttcacgaggcgtgcctatctgactgggttcactggcagtgctggtacagctgtggtcacaaaaaataaggctgctctctggactgatggccgttattttcttcaggcagagaaggaattgagccaccactggacactcatgcgcagtgggaatcatggtgttccaactactagtgagtggttgaatgatgttttaccatctggttgccgagttggtattgatccgtttcttttctcatttgatgctgctgaagaactgaaggattcaatcgccaataagaatcatgagttagttttggttcagggcatgaacctagttgatgagatatggggagatgcaaggccaaatcccccaaaagaaccaactagggtgcatgacatcaaatatgctggtattgatgtgccatcaaagttgtccttcattaggtcacaacttgctgaaaatgggtgtgatgctgtggtaatttcaatgctcgatgaagttgcttggttgttgaacatgagaggaagtgatgtcccacattcaccagtattttatagctacctcattgtggaggttagcactgctacactatttgtagacaacagcaaagtttctaaagatgttctggagcaccttgagcaagctggtgtgaaacttaagccatatgaagcaattatttctgaagtagaaagactggcagagaaaggtgcaaagctctggttggattcttcaagcgtgaatgcagccataattactgcatttaaatcaagttgtgacatgaaaaagaaaggaaaagcaggtgaagaagttggagaaaaagaagcatcttcaaacgaccggataactggagatcctagtgtccacaatggagtcataagtgctgtatacaatgtttcaccggttgcacttgccaagtcagttaaaaatgatgcagaaattgagggaatgaagaattcacacttaagctaaattcctttgctggcacatgacacattgtagagatgctgctgctttagcagaattctggtgctggctggaggaggaaatctgtaaaagtgtgccccttacagaggtgcaaattgctgaaaagcttcttgagtttcgtcaaaagcaagatggatttatcgagacaagcttcgacactataagtggttatggtgcaaatggtgctataatacactacagaccaaccccagagagctgcagctctgtaggaagtgacaatctgtttttgttagatagtggtgctcaatacattgatggaactactgacataaccagaacagtgcattttggtgaggcttccccaaggcaaaaggaatgcttcaccagagttttgcagggccatatagctctcgatcaagcagtgttccctgagagaactccaggctttgtgctagatgttctggcacggtcatctctgtggaagattggactggattatagacatggcacaggccatggagttggagctgcgctaaatgtccacgagggacctcagagcattagctatcgatatgggaatttgacagccttacagaagggcatgattgtcagcaacgagcctggttattatgaggacaactcatttggcattcgtatcgagaatttacttctggtaaaggagcttaatctggcaaattcgttcggtggaatttcataccttggttttgagaaactaacctttgttccaattcagagcaagcttattgagtcatccttgatgtcaccttcggagatcaattgggtcaatgattaccacgaagaagtctgggaaaaggtttcccctttgttgagtggccattctcgcgactggttatggaagaacactcgacctcttttagatgtgtaataataactcaacgcacagcacggcttgactgcgtaagtgaaagaaatgaacagacatgtttggctggagcatctcttgaagatctgatggccttcaatggaatgcaactatatggcagtaaacagaggcaagacaatagatgcgtaggctggccagggttcagcggatgataggttgaggctggtgtatttgacatccagccaatttggtgcaacacttgaaaaatgaattacatgcaagccttttctatttattacactatcgacgacaccgtccattgtttgatgaatttattatttattacatttggtacctttttttatacaaaaaaacatctttttaga

SEQ ID NO: 142835 - DNA, 360 bp, Zea Mays
atggtgcacctcttcctccaaggcctagacgcactccttctcctccggctagagcggcccctggaagagggcgccgccgcggtcgaggctgccgtgacggtcgcggggcagcagctggacgcgcgggtggccgcgctcgtcaggatgctcgtcgcgaagggcagggccgggatgctcgccaaggccctggccgagttcgccgccatctgcatgctctggacgcgtgggtggtcaggatgctcgtccatggccttcgttcaccatggatgcatgctctgtactcttctacaagcaaattctgctacatggcgcctagccttcgttttttggctccgtccctgtactactacggagatttag

SEQ ID NO: 142836 - DNA, 386 bp, Zea Mays
  misc_feature (156)..(255): n is a, c, g, or t
aactattttaaaagatggcggaagaggaaatacctcacttgtaggctatgccataaacataaatgctaatgatgtaggcatttgacactcggacactgtacaggctcagatctgtcggctgaaaatggctgcgagggacaagcagcaacctttaannnnnnnnnnnnnnnnnnnnnnnnnnnnnnnnnnnnnnnnnnnnnnnnnnnnnnnnnnnnnnnnnnnnnnnnnnnnnnnnnnnnnnnnnnnnnnnnnnnncaagaaatctagaaaattcgtcggctacaatttgctgcgagggatcaagcgcaccttgaaccaagcggagcaatgtatcatctgtgtcacagaaaaaagaaacatcaaatcagtaatgcccaactcgttga

SEQ ID NO: 142837 - DNA, 842 bp, Zea Mays
ctcgaactctccatgagattcatagttgcattacttatagcttccttattcgtagacaaagcggattcagaattgtccttccttccaaggataacttgtatccatgcgctttagattattagcctggagttctccaacatcagtatagccaaccctaccctatcacgtcaaagagaaagaaacatacctttttcatatatagatttagaatatgttccctatgctaactgggttcattagttatggtcaacaaacaatacgcgccataagatacattggtcaaagtttcataattaccttatcccacacaaatcgtttacctataacgattcactacccttatgaaaaatcaattacatcggagcgtttctaggggcgaatacactttgaatttgataaatgcattgcttgtgaagtatgtgttcgcgtatgcccgatagatctaccccttgtggattggagatttgaaaaggatattaaaagaaaacaattgcttaattatagtattgatttccgagtttgtatattttgcggtaactgtgttgaatactgtcccacaaattgtttatcaatgactgaagaatatgaactttctacttatgatcgtcatgaattgaattacaatcaaattgctttgagtcggttaccaatctccataatgggagattacacaattcaaacaattaggaattcgccttgaagtaaaatagacaaagaaaaatcttggaattcaagaacgattacagattactaggtattaggattttttattagaaaaatccatttttactaactctaacaaaaaaagaataactactgcttaacaacttatatgtatatac

SEQ ID NO: 142838 - DNA, 3009 bp, Zea Mays
aagcctgacggagcaatgccacgtggaggtggaaggcctacgagtcgtcaacttattttctcggagaagaaacaatgatggtatctgaggaataagcatcggcgtatttccttagacttagatcacgcaaggcaagaatttttcgctatttacgatttcatattcttgttactagatgttctataggaataagaagaaattgcaactcttttccgttacacataataaataaagggtttcaaaagtcaatttttcttttcaatatcttttttttcagaattcaatttttgttcttccacccatgcaatagagaggaatgagaaaagaggggttttcccttaaaaataggctttgaaatagaaatcatggaataatgctgaattcaaatgtttatttctttatttcttttctatagtataagaaaaatgaattaaatgaaatttgtggatttagcacgacctgggtcaaaggggcattccgatttcgctagtaccatcttttgtgccgtgcaaatccagattgagattgaggaaagggagtaaattaagttttcgaatcactgactcatgcccattgtcgaatcctactcagcaattgtcgaatcctactcagccaaaaaaaggggggtacttatgtatggcagaacgggccaacctggtctttcataataaagagatagacgaaactgctatgaaacggcttattagcagattaatagatcatttcggaatgggatatacatcccatatactggatcaaaaaaagactctgggcttccatcaagccactactacatcaatttctttaggaatcgaggatcttttaacaataccctctaaaggatggttagtccaagacgcggaacaacagagttttcttttggagaaacactattattatggagttatacacgcgatagaaaaattacgccaatccgttgagatatggtatgctacaagtgaatatttgaaacaagaaatgaattcgaattttcgaataacggatccttctaatccagtctatctaatgtctttttcaggagccagaggaaatgcatctcaggtacaccaattagtaggtatgagagggttaatggcggatcctcaaggacaaatgattgatttacctattcaaagtaatttacgcgagggactttctttgacagaatatataatttcctgctacggatcccgaaaaggggttgtagatactgttgtacgaacagcggatgctggctatcttacatgtagacttgttgaagtagttcaacacattattgtgagtagaagagattgtggtactatccaaggtatttatgtgagtcctcaaaatgggatgacggaaaaactttttgtccaaacactaattggtcgtgtattagcaaacgatatataaattggttcacaatgcattgcttctcgaaatcaagatattggaattggattagtcaatcaattcataactgcctttcgagcacaaccatttcgagaacaaccaatatatattagaaccccctttacttgccggagcacatcttggatctgtcaattatgttatgggtggagtcccactcatggggatctggtcgaattgggggaagatgtaggtattattgcgggtcaatcaattggggagccagggactcaattaacattaagaacttttcatactggtggagtattcacagggggtactaccaaccttatacgatccccctcgaattcataaaagctaaatcttgtaatcaatggtgggccaataatatttttttgcatatgtattaagacgcttgggctgatttcgaaattgtccaaagttttttatgttgttttcattgcaaaatgatggatctccttccgtaactttcaaattacgagtacgagaattgaaagacatgaaaattctcaattctctacagcgtctaggagatagatcgaccccaccaaacagtccgatttttcctccacgtcgatagggagctaaaagatcggccaccttaatacctgtttcaaagatagataatttcgtatctaactcgataaaggcaggcgcaaatctatgaataggaaatgttgcactagtatccacaggacccaaattgtcaataggctccccaagaacgttaaaaagggatctatgagatcgagtatggaattctgtctactcactttaaattaagtatccgtttctctccttttcccgctaggaccggaaatcctgtattttccatatccatacgattgagtccttaggtttccgaaatagtgtaatggaaaaagaagtgctccgaatcattgctatttgactcggacctgttctgaaaaagtcgaggtatttcgaattgtttgttgacacggacaaagtaagggagaacctccgaaagaatttccatattgaccttggacatataagagttctgaatcgaatctctttagaaagatcttttgcaattggtactcaaaatacttcaatcggtacacgcaagaaataggccaattcggcagctttttgttcaatttctcgtgaagtaaaaaacttctcatcagtacgagtcaagggaatgaccccctggccccggatttccatataaaggatacgacgaggataaagaccctctttaacctgaattctaaatgactggatatcccgcacaaggaattgaaggaagatgcgacgttttattccagggaatccccaacgaaaaatgcacactattccctcttttctatcgaatcggtcataaccactgcctacattccataaaatagtgcaccacaaataggagctaatgaacaggcccgcgattccgtagaaagacatcacgaccccctgtggaaattttttttgttgagatggaagtacagatatcatattcttaccaagataactggaagctccaaccgctaagaatcctaatgaacctagaaaaagaatacaggcccagaaaaaattacctctttttcgagaaccttttagaagttctatccatatgtttatggtacaaaagtt

SEQ ID NO: 142839 - DNA, 506 bp, Zea Mays
ccatgctaatgtgccttggatgatccacatcttcgggtcaggtttatttacaattataacttccacacctattcacttatcatttgggatcatttcccatacaaaaaaagaaaaagagtcaaagaaaggacaggagatgttcctcatgtcaaatcaaacaaaaaatggacgtgaaagataccatagcaatgtggtatcaggctgcctatctccttgtagttggatctccaactttttggaatgttccaaattccacttgagcacagtttaagttatggaaaattcataattcatcagttattttagataatactaaaaacaagatagagtgagatacagaagtgtaaaaaaagagaaaatcgattcatcagacggaacatgagtccctaattccgaatcaagagatttgttgtggaatctgtcagttaagtaaactaataatattaagaactagatcatctaaccccattgaaaaatgaaattggattttcgggagaattttggag

SEQ ID NO: 142840 - DNA, 2013 bp, Zea Mays
ccctccctcctctatataagccgcctacgtccccctcgacccctaccaatcgtcctcgcattatccatccatcatcgactaatccagtgtacgtcgttagttgttactcaagagatcaataccgcaacaatggccgggggttttgccgtctccaagtccggcgccgacggccgggagttcaagggcaggatcacctggtacgtctggatgtgcggcatcgtcgcggccaccagtggcctcatgttcggctacgacgtcggcatctctggtggggtgacggccatggacgacttcctggagctcttcttcccgtcggtgtacgcgcgcaagcaccgcgccagggagaacaactactgcaagttcgacgaccagcggctgcagctcttcacgtcgtcgctgtacctggcggcgctggtggccagcttcgtggcgtcgcgcgcgtgctcgcggttcgggcgcaagcgcacgatgcaggcggcgtcggtcttcttcctggccggcacggcgctgtgcgcgtccgccaccaacatcgccatgctcatcgtgggccgcgtctgcctcggcgtcggcgtcggcttcggcaaccaggcggcgccgctgttcctgtccgagatcgcgccggcgcacgtccgtggcgcgctcaacatcctcttccagctcaacgtcaccgtcggcatcctcatcgccagcgtcgtcaactacttcgcgtcgcgcgcgcacccgctcggctggcgctacgcgctgggcggcgcggcggcgcccgccgccgtgctgttcctcggctcgctcgccatcaccgagacgcccacgagcctggtggagcgcggccgcaccgacgccggccgccggacgctggagaagatccgcggcaccgccgacgtgggcgccgagttcgacgagatccgggccgcgtgcgaccttgcccgcgcgctcggcgaggaggagaagccataccgccggctgatgcgccccgagagccgcccgccgctggtgatcgcgatcgccatgcaggtgttccagcagttcacgggcatcaacgcgctcatgttctacgcgccggtgctgttccagaccatgggcttcgagaccgacggctccctgctgtcggccgtggtcacgggcagcgtcaacgtcgtgtctaccgtcgtgtccatcgtcctcgtcgacagagtcggccgccgcaagctcctgctggaggcgtgcgcgcagatgctggtggcgcagacggccgtgggcgcgatcatgctggtgcatgtgcgggccaacaacaaccccagccagtcgtgggcggtggccatcgtcgtgctcatctgcgtctacgtgtcaagcttcgcctggtcctggggcccgctcgggtggctcatcccgtcggagacgttcccgctggagacgcgcacggccggcttctcgttcgccgtcagctccaacatgctcttcaccttcctcatcgcgcaggcgttcctgtccatgatgtgctccatgcgcgccttcatcttcttcttcttcgccgcctggatcgtggtcatggctatcttcgtcctcacgctgctgccggagaccaaaggcgtgtccatcgacgagatggtggaccgggtctggcgccgccactggttctggaagaggtgcttcgccgacgactacgacgcggccagggtctatgacaactgctagtgctaggcacacacgccgccggggattagttttttttttgtcattgtaattagaaatcggcctgattaattgatttcgttgctatgacatttaaattgatgtcgttgcaatcagcaggcaaaactatatagtatatgagaaatatgctcaggttctcgtgtgattcgtatcgtcctcgtatatatatcttatacgaggaaaacatgacggcagaattgattctacgtacattatctgggcctatttggttcacaacctaggaaaactgtctatcaatcctagctaggtgtctaattttgattgtctgctgcgcgcttgaccttctcaagcctacaaccaaac

SEQ ID NO: 142841 - DNA, 482 bp, Zea Mays
atctttccttgcgtttgcttactgctgtataaacaactacaggaaggagatcttcacgccaatgtacttctttcttgttcggaagcctcttctggaatgagctcttggatcaccttttcagagagagaaggcaagtggtcatttcgaagaagccgaggagagggaacctggaatcaagaaaaccttcagctctcctgtgtaggaggaaagttaacgaacagtgtagtaactgttcagctttgtgtttattcagttgttttgctgcttgaggttattcgtttctaggtgggggttggaatccttttcgccataaacctctcagtggcataaataagatggtttgcataagagtacttcatggataccgtaagggctactactgaaagagaaatgtttaagcagcatggtatgtgagcaactagtgataattattccatccttttttttaatataaagcaggagttttgtcatgcgtcatgtct

SEQ ID NO: 142842 - DNA, 1573 bp, Zea Mays
ttttttctttgtttttttgtgggcctgtccacgtacatatcgttggcgtggatcggaatcttgaagagacgggtggagtggagactctggtctctgacatgcagcaattattgcaggtgcatttgatccgtcccggccgcctacacgatgtccaagtcgggagcgctggatcttgcttctggcctcggagggaagatcaacaaggtggaagtcaagtcggccgtcgatgagtatgagaaatatcatggatactatggagggaaggaggaagcaaggaagtccaactatactgatatggttaataaatactatgatcttgccactagcttctatgagtatggttggggtgaatccttccactttgctcacagatggaatggagaatccttacgtgaaagcatcaagcgacatgagcattttcttgccctgcaacttggtttgaaaccaggaatgaaggttttagatgtgggctgtggaataggtggaccactgagagaaattgcaagatttagctcaacttcagttaccggattgaataacaacgaataccagataaccaggggaaaggagctcaaccgtttagcaggaattagtggaacatgtgattttgtcaaggcggacttcatgaagatgccgttcgatgacaacacttttgatgctgtttacgccattgaggcaacatgtcatgcacctgatccagttggttgctacaaggagatatatcgtgtgttgaagcctggccagtgctttgccgtgtacgagtggtgcattacggatcactatgatcctaacaatgcaacccacaaaaggatcaaggatgaaattgagcttggcaatggcctgccagatatcagaagcactcggcaatgtctccaggcagtaaaagacgccgggtttgaggttgtttgggataaggatcttgctgaagattctcccttgccttggtacttgcccttggatccaagccgattctccctgagtagcttccgtttgacctctgtgggacgcatgattacccgcacaatggtcaaggccctggagtacgttggtcttgctccgcagggcagtgagagggtctctaatttcctggagaaggctgcagaagggctggtagagggcggaaagaaggagatcttcacgccaatgtacttctttcttgttcggaagcctcttctggaatgagctcttggatcaccttttcaggtcagcaagagagagaaggcaagtggtcatttcgaagaagccgaggagagggaacctggaatcaagaaaaccttcagctctcctgtgtaggaggaaagttaacgaacagtgtagtaactgttcagctttgtgtttattcagttgttttgctgcttgaggttattcgtttctaggtgggggttggaatccttttcgccataaacctctcagtggcataaataagatggtttgcataagagtacttcatggataccgtaagggctactactgaaagagaaatgtttaagcagcatggtatgtgagcaactagtgataattattccatccttttttttaatataaagcaggagttttgtcatgcgtcatgtct

SEQ ID NO: 142843 - DNA, 1711 bp, Zea Mays
cgcaccaggtcccactgccaccgcaaccaagcgcaccttgccggccgccgctcgtcctcatcttcaaatcccctcttgcacggctgcacctcctagcccgtagtgtggatccatccccacacggccctcgccaaatctactcctccagtcggcaggaaaggaacccctctctacctcggaggctcggacagagtgaacgcgccacccgccccggcgagcattgtccgctgccgcgcgccaccttccgctcacgggtgcatttgatccgtcccggccgcctacacgatgtccaagtcgggagcgctggatcttgcttctggcctcggagggaagatcaacaaggtggaagtcaagtcggccgtcgatgagtatgagaaatatcatggatactatggagggaaggaggaagcaaggaagtccaactatactgatatggttaataaatactatgatcttgccactagcttctatgagtatggttggggtgaatccttccactttgctcacagatggaatggagaatccttacgtgaaagcatcaagcgacatgagcattttcttgccctgcaacttggtttgaaaccaggaatgaaggttttagatgtgggctgtggaataggtggaccactgagagaaattgcaagatttagctcaacttcagttaccggattgaataacaacgaataccagataaccaggggaaaggagctcaaccgtttagcaggaattagtggaacatgtgattttgtcaaggcggacttcatgaagatgccgttcgatgacaacacttttgatgctgtttacgccattgaggcaacatgtcatgcacctgatccagttggttgctacaaggagatatatcgtgtgttgaagcctggccagtgctttgccgtgtacgagtggtgcattacggatcactatgatcctaacaatgcaacccacaaaaggatcaaggatgaaattgagcttggcaatggcctgccagatatcagaagcactcggcaatgtctccaggcagtaaaagacgccgggtttgaggttgtttgggataaggatcttgctgaagattctcccttgccttggtacttgcccttggatccaagccgattctccctgagtagcttccgtttgacctctgtgggacgcatgattacccgcacaatggtcaaggccctggagtacgttggtcttgctccgcagggcagtgagagggtctctaatttcctggagaaggctgcagaagggctggtagagggcggaaagaaggagatcttcacgccaatgtacttctttcttgttcggaagcctcttctggaatgagctcttggatcaccttttcaggtcagcaagagagagaaggcaagtggtcatttcgaagaagccgaggagagggaacctggaatcaagaaaaccttcagctctcctgtgtaggaggaaagttaacgaacagtgtagtaactgttcagctttgtgtttattcagttgttttgctgcttgaggttattcgtttctaggtgggggttggaatccttttcgccataaacctctcagtggcataaataagatggtttgcataagagtacttcatggataccgtaagggctactactgaaagagaaatgtttaagcagcatggtatgtgagcaactagtgataattattccatccttttttttaatataaagcaggagttttgtcatgcgtcatgtct

SEQ ID NO: 142844 - DNA, 1662 bp, Zea Mays
ccagtggccactgcttaaatccctctcagtctctccttcctctcccattccactagattaccaccacctccacctcgtcgtctcccaccaccgccgagcgcgagccctagcccgatctagccggcggcaggcaccagatcccgccgcccgcggcgtcccgggacgcgccccgccgaatccgccgctcctcgcactgcaacacgcccggaccacggtgcatttgatccgtcccggccgcctacacgatgtccaagtcgggagcgctggatcttgcttctggcctcggagggaagatcaacaaggtggaagtcaagtcggccgtcgatgagtatgagaaatatcatggatactatggagggaaggaggaagcaaggaagtccaactatactgatatggttaataaatactatgatcttgccactagcttctatgagtatggttggggtgaatccttccactttgctcacagatggaatggagaatccttacgtgaaagcatcaagcgacatgagcattttcttgccctgcaacttggtttgaaaccaggaatgaaggttttagatgtgggctgtggaataggtggaccactgagagaaattgcaagatttagctcaacttcagttaccggattgaataacaacgaataccagataaccaggggaaaggagctcaaccgtttagcaggaattagtggaacatgtgattttgtcaaggcggacttcatgaagatgccgttcgatgacaacacttttgatgctgtttacgccattgaggcaacatgtcatgcacctgatccagttggttgctacaaggagatatatcgtgtgttgaagcctggccagtgctttgccgtgtacgagtggtgcattacggatcactatgatcctaacaatgcaacccacaaaaggatcaaggatgaaattgagcttggcaatggcctgccagatatcagaagcactcggcaatgtctccaggcagtaaaagacgccgggtttgaggttgtttgggataaggatcttgctgaagattctcccttgccttggtacttgcccttggatccaagccgattctccctgagtagcttccgtttgacctctgtgggacgcatgattacccgcacaatggtcaaggccctggagtacgttggtcttgctccgcagggcagtgagagggtctctaatttcctggagaaggctgcagaagggctggtagagggcggaaagaaggagatcttcacgccaatgtacttctttcttgttcggaagcctcttctggaatgagctcttggatcaccttttcagagagagaaggcaagtggtcatttcgaagaagccgaggagagggaacctggaatcaagaaaaccttcagctctcctgtgtaggaggaaagttaacgaacagtgtagtaactgttcagctttgtgtttattcagttgttttgctgcttgaggttattcgtttctaggtgggggttggaatccttttcgccataaacctctcagtggcataaataagatggtttgcataagagtacttcatggataccgtaagggctactactgaaagagaaatgtttaagcagcatggtatgtgagcaactagtgataattattccatccttttttttaatataaagcaggagttttgtcatgcgtcatgtct

SEQ ID NO: 142845 - DNA, 1354 bp, Zea Mays
agacacgcggaggcgcgttcctccccatcctcggcaaccacgagtctctccttcctctcccattccactagattaccaccacctccacctccggctcctagcagaggcgcaccaggtcccactgccaccatgtccaagtcgggagcgctggatcttgcttctggcctcggagggaagatcaacaaggtggaagtcaagtcggccgtcgatgagtatgagaaatatcatggatactatggagggaaggaggaagcaaggaagtccaactatactgatatggttaataaatactatgatcttgccactagcttctatgagtatggttggggtgaatccttccactttgctcacagatggaatggagaatccttacgtgaaagcatcaagcgacatgagcattttcttgccctgcaacttggtttgaaaccaggaatgaaggttttagatgtgggctgtggaataggtggaccactgagagaaattgcaagatttagctcaacttcagttaccggattgaataacaacgaataccagataaccaggggaaaggagctcaaccgtttagcaggaattagtggaacatgtgattttgtcaaggcggacttcatgaagatgccgttcgatgacaacacttttgatgctgtttacgccattgaggcaacatgtcatgcacctgatccagttggttgctacaaggagatatatcgtgtgttgaagcctggccagtgctttgccgtgtacgagtggtgcattacggatcactatgatcctaacaatgcaacccacaaaaggatcaaggatgaaattgagcttggcaatggcctgccagatatcagaagcactcggcaatgtctccaggcagtaaaagacgccgggtttgaggttgtttgggataaggatcttgctgaagattctcccttgccttggtacttgcccttggatccaagccgattctccctgagtagcttccgtttgacctctgtgggacgcatgattacccgcacaatggtcaaggccctggagtacgttggtcttgctccgcagggcagtgagagggtctctaatttcctggagaaggctgcagaagggctggtagagggcggaaagaaggagatcttcacgccaatgtacttctttcttgttcggaagcctcttctggaatgagctcttggatcaccttttcaggtcagcaaggtggttttgtaagcttcccagatccatgtcttcctcgttccgtgaccagtttctaagttgttgtgttgccggttttcagagagagaaggcaagtggtcatttcgaagaagccgaggagagggaacctggaatcaagaaaaccttcagctctcctgtgtag

SEQ ID NO: 142846 - DNA, 101 bp, Zea Mays
ccggatttaagggcaaacccgcgcgtctcaaatgcgtgctaggattaagtctcacacatatgatgactcagggtacaaaaatcaatgtaacatctttatta

SEQ ID NO: 142847 - DNA, 402 bp, Zea Mays
gcccaagggatacacgtcccggtgccccccccaccacctcccgttcattatccttggtcttcacctccacctatacctacatctccatctaccaaacatcagacccctccagctaccttgccgacgcatgaacaagaggacgggttagactttgtcgaaaccctcttcaatagtggaggtatcgatggtgatcgacgaccgtgagcttccatgttattgcgttctgatacttgagacttttattatgactatgtatgagatattgtcttttattagtactggatgatgatatgtgtgagacttttgtgatgtaattgatgagactatggatgagacttttgtgatgtaactgatgagactatggatttaaatattgttatgtgattgtgagtgagatgtttt

SEQ ID NO: 142848 - DNA, 780 bp, Zea Mays
gacagaacggaaacagaaaccccaagcatggtatcaacaaaacagcttgttcgaaaaatccagtttaaaacaatattatttaccaattgtaccaaataacaatggtaggttctgacagtactagtcacgtttgccgctaaagctgcggcggcttattccgtagttacgaacaggaattatggatacaagcgggcatattattcctcaccactctcactcttgacaaaaataaatagatcgacggtacaagtctgcgagcatagttcgggaacagcactcctcagttcttgacggtggtgacatgccgcagaagcatctgaatgacatccggggagatgcttgcggcctgctgggtgagttgctcgatcttcgccgccgtttcttcctcgagacgcttgacgtttgcaccggagtcgccgctgctctctgcaaccttcctctgaaactcagcctccatctgggcacggtattcggctatttcccgctcagcctcctcttttgcttgcctgagcctcgctgacttggctctctagcggcattcacaatttgctgagcctcctgctccgcagccagcaactgctggatcccactctggcgcctgttcgcgtccatccctcagctcctgatctggatcggggcgggtcgattcggcagccggagtggaggacggtggagcggctgcggaggttggggaacagatcgcgttcgccgagccgagcgggagggcgacaggaaggcgattggtgaatggagatccgcatatacaacgtggctccacct

SEQ ID NO: 142849 - DNA, 780 bp, Zea Mays
tttatttatcttagcttttatttgttttattaaatttcttgttcgaaaaatccagtttaaaacaatattatttaccaattgtaccaaataacaatggtaggttctgacagtactagtcacgtttgccgctaaagctgcggcggcttattccgtagttacgaacaggaattatggatacaagcgggcatattattcctcaccactctcactcttgacaaaaataaatagatcgacggtacaagtctgcgagcatagttcgggaacagcactcctcagttcttgacggtggtgacatgccgcagaagcatctgaatgacatccggggagatgcttgcggcctgctgggtgagttgctcgatcttcgccgccgtttcttcctcgagacgcttgacgtttgcaccggagtcgccgctgctctgtagtcaccaagacacagaagtgaggtcctgtagtccagtggggaaaaatgggacatggcgtgcatacctctgcaaccttcctctgaaactcagcctccatctgggcacggtattcggctatttcccgctcagcctcctcttttgcttgcctgagcctcgctgacttggctattggacacaggaaacattcatgttcagtattaactattaagaggaagggaggggggtaaaggggtcagctttttagcttcctattagctgacaatttgccaacaagtttaaaagacatttgtacagcacatggttcacaatggaatatgtttttgctaatgggacccataaaagcaagatttcaacccct

SEQ ID NO: 142850 - DNA, 1355 bp, Zea Mays
cctattggagccggatcctcaagttcccagcccactacgaaattgtacccatccccaaccagatcccccgcttctcccgcaaccgcgtcggcgatggcatccgcggcggcggcgaccggcgacggcgagaaggcgcacgcgcacctagggcagcctctcctcgtgccgccgcagccccctcaacaaccctactacgcctacccggccgcctcctacgtgcagcccgccccaccgccgccgccggccccgacgctcgtcttcgtgccgtccccctgctccccgatgctcgtgcgcctccgccgcctgcgcccgcgccgcgcgtcctgcctccgccgattctgcgcgcgcgcgctcccgctcctcctcttcctcgcgctcctcgcggggctcgccttcctcctctacccgtccgccccggccgcccgcgtcgccgacctccgtgtcgacagcttccgcgcgcagccgcccgtcctcggcctcggcctcgcgctgcggctccgcgtcagcaaccccggcttcgtcctcccgctccgctaccgcgcggtctccgccgccgtctcctaccgcggacacctgctcggggccgccaaagcgtggcccgggtccggcgagcttgcggccaggaatgaggtctatgcggatgctgaggtgtgggtggacgccgggaaggtgctggatgacgtgatcgagctcatcggggacgtggccgcggggtcagtgccgcttgagatcgtatctgaggtagtcggctcgatcaaggtgttccgtttccacattcctgtgaaggggctcatatcgtgctcggtaagtatcagcccagtgactcagggaatcataagccaggattgctactaaggatcacgttacgaatcttgctgctttcttctgcagcgcgagtgtgggaggctcccgattcccgaggatattttaaacctgcagagcctgctcgatggaactgaagtacttactatctgtatataatctggatatggtgttgtgttttgtgtaggctggaataatgtagtaatgagtaacggatagcatgctgttggaccacaggggtatatgttatcttgcagtacgtatcagaactgcctatgtctattttgtagctggtgggatgccaccttagtatagttccgttctcgaatatttgtcgtctgcgagtttatttttaaactaaaccgtgacaaataaaaaagaacggagtagtaagttaatcatggtgtatgattttactagactatgcatgatgtatggtggtggttgtggcacgtagcttatggtttgtttgagcatttgaattgaagcgtgctaactgaaatgaatggataatggtcatcggtcatgttctg

SEQ ID NO: 142851 - DNA, 1320 bp, Zea Mays
cctattggagccggatcctcaagttcccagcccactacgaaattgtacccatccccaaccagatcccccgcttctcccgcaaccgcgtcggcgatggcatccgcggcggcggcgaccggcgacggcgagaaggcgcacgcgcacctagggcagcctctcctcgtgccgccgcagccccctcaacaaccctactacgcctacccggccgcctcctacgtgcagcccgccccaccgccgccgccggccccgacgctcgtcttcgtgccgtccccctgctccccgatgctcgtgcgcctccgccgcctgcgcccgcgccgcgcgtcctgcctccgccgattctgcgcgcgcgcgctcccgctcctcctcttcctcgcgctcctcgcggggctcgccttcctcctctacccgtccgccccggccgcccgcgtcgccgacctccgtgtcgacagcttccgcgcgcagccgcccgtcctcggcctcggcctcgcgctgcggctccgcgtcagcaaccccggcttcgtcctcccgctccgctaccgcgcggtctccgccgccgtctcctaccgcggacacctgctcggggccgccaaagcgtggcccgggtccggcgagcttgcggccaggaatgaggtctatgcggatgctgaggtgtgggtggacgccgggaaggtgctggatgacgtgatcgagctcatcggggacgtggccgcggggtcagtgccgcttgagatcgtatctgaggtagtcggctcgatcaaggtgttccgtttccacattcctgtgaaggggctcatatcgtgctcggtaagtatcagcccagtgactcagggaatcataagccaggattgctactaagcgcgagtgtgggaggctcccgattcccgaggatattttaaacctgcagagcctgctcgatggaactgaagtacttactatctgtatataatctggatatggtgttgtgttttgtgtaggctggaataatgtagtaatgagtaacggatagcatgctgttggaccacaggggtatatgttatcttgcagtacgtatcagaactgcctatgtctattttgtagctggtgggatgccaccttagtatagttccgttctcgaatatttgtcgtctgcgagtttatttttaaactaaaccgtgacaaataaaaaagaacggagtagtaagttaatcatggtgtatgattttactagactatgcatgatgtatggtggtggttgtggcacgtagcttatggtttgtttgagcatttgaattgaagcgtgctaactgaaatgaatggataatggtcatcggtcatgttctg

SEQ ID NO: 142852 - DNA, 1003 bp, Zea Mays
cgaggtgggcgacgggacgttcagcaccacctacagagccgtcatgccctccggcacggtggtgtcggtgaagaagctcaagtccgtggaccgcgcggtcgtccagcagcggacgaaggtggtccgcgagctggagcgcctcgcccacatcggccacgagaacctggtccggcccatcgggtacgtcctctacgacgacgtcgcgctgctgctgcaccagcacctggcgaacggcaccctgctccagctgctgcacgacaacggcgagaggcggaaggctgactggcccaggctgctgtccatcgccgtcgacgtcgcccaggggctggcgttcctccaccaggtggccaccgtccacctcgacgtctgctcggggaacgtgttcctcgactcgcgctacaacgcgctgctcggcgaggtcgagatctccaggctgctggacccgtgctcagggtcgccatgctgtgcacggagcgcgcccccgcgaagcggccccggatgaagaaggtggtggaaatgctgcaggaggccagggacagctgagtggtctggttcctctgctcaatgatgtgtggttggctgcttggaacttggaacttggaagtcgaggcgagaaactctgaactgatcatcgttggagttcgagtatggagtccatccggtagcgtttgattctctgtatatattcggtaattagtatcccgatcatgcgccatggatcactggatgttcggtcttggagcaatgtctggaactctggatgcgtctttagcaaagcaattcggtgttctgcattgagggttttattttcatttgtttttgtttttgttttttttttgaaaaaaaaaggagagagaagagaaattctatcccgatgtcgtccgctagaggaggtggttgtctgggtgctatttcttctctctaggagagcctggcccatggcgacgtggcagggatggcctctgtctgctgaggaagaggaatcgtgcctgtctgttaatac

SEQ ID NO: 142853 - DNA, 3516 bp, Zea Mays
ttagcgtgtattgctggaggcagtctaatcctcaacgcaatatgctatcggacatcggtgtacaacagtggcgttcacctagcctctcatggtggggtatccactgccctttcgcacactctctcagtactactgtagtactagaatttcaacccatatgttgagcaagaagaccaccttcgggctttcctctctcctctcgtccactttctttctctcagtcacagaaacacattccctctctctctctccccgacggagtgcgagtgggagcgagcggcggcggcagcagcagcagccacggcccctgtcgccgtgtggtgtgcgggggcccccctctctccgctcctcccctaccataccaggctaccacccaaaaccacacagaaaagcaggcgcacgaacacgcacacgccaggcctgggcaccaccaccaccactgccttcccttgcccccggctcgccccagggcccaggccaagaatccccacccccaaatgccttcctccaccccttgctaccgccgcagcttcctcttcttggccctcctctcggcgtgctcctcggcgccggggacggtggacggcgccgggacagccggcggcggcggggatgccgcggcaatgcaggcgctgcggcgggacctggcgccgccgggctggggcccgggcgcggaccactgcgcgtggcgcggcgtcacctgcgccggcggcggcggcgcggtgaccgcgatcgacctgccgcgccgtgggctccggggggacttcgccgccgccgccgagctccgcgagctggcacgcctcgacctctccgccaactcgctcagcggcggagtcccgcaggcgctcggcgcgctcacccgcctcgagttcctcgacctctcgatgaacgcgctcgccggcgccgtgccgcccgcgctaggcggcgcgtcgaggctccggttcctgaacctctccaacaacgcgctgtccggcgccatccccgacgagctcaggggcctcaaggggctccaggagctgcagatatcgggcaacaacctgaccggcgccctccccggctggctcgcggggctgccgggcctccgcgtgctgtccgcctacgagaacgcgctgtccggcccgatcccgccggggctcgggctctcgtcggagctccaggtgctcaacctccactccaactcgctcgaagggagcatccccagcagcctcttcgagcgcggcaacctgcaggtcctcatcctcaccctgaaccgcctcaacggcaccatcccggacaccatcggccggtgccgcggcctctccaacgtgcgcatcggtgacaacctcctctccggcgccatcccggcgtccgtcggggacgccgccagcctcacctacttcgaggccagcacgaacgacctgtccggcgggatccccgcgcagctcgcgcagtgcgccaacttgacgctgctcaacctggcgtacaaccgcctcgccggcgaggtgccggatgttctcggcgagctcaggagcctgcaggagctcatcgtttccggcaatggcctcggcggagagttcccgagatcgatcctgcggtgccggaacctcagcaagctggacctgagctacaacgctttccgtggcgacttgccggagaacatctgcaacgggtcacggctgcagttccttgtgctcgaccacaacgagttctccggaggcatcccagcagggattgggggctgtacccggctgctcgagctgcagctcggtagcaacaacctcagcggcgaaatcccagccgagataggcaaggtgaagagcctgcagatcgcgctgaaccttagctccaaccacttcaccgggccgctgccccgcgagctcgggcggctcgataagctcgtcgtgttggacttgtcgcgcaacgagatatccggccagatcccaggcgacatgagagggatgcttagcttgatcgaggtcaatctgtcgaacaaccggctcgcgggcgccataccggtgttcggaccgttccagaagagcgcggcctccagcttctccggcaatgccgagctgtgcggcgacccgctgaccgtagactgtggatcatcaatctatggctccagctatggaacggagacggaccacaggggaatatcttacagggtggccttggcagtcgttggttcctgcgtgctcatcttctcgctggtgtcgttgctggtggcgttgttcatgtggcgcgagaggcaggagaaggaggaggaggaggcgaagaagaaggcggcggaggtggcggtggcggcagcagccccacaggtggtggcctcggccgtgttcgtcgagagcctgcagcaggccatcgatttccagagctgcgtgaaggcgacgttcaaagacgagaacgaggtgggcgacgggacgttcagcaccacctacagagccgtcatgccctccggcacggtggtgtcggtgaagaagctcaagtccgtggaccgcgcggtcgtccagcagcggacgaaggtggtccgcgagctggagcgcctcgcccacatcggccacgagaacctggtccggcccatcgggtacgtcctctacgacgacgtcgcgctgctgctgcaccagcacctggcgaacggcaccctgctccagctgctgcacgacaacggcgagaggcggaaggctgactggcccaggctgctgtccatcgccgtcgacgtcgcccaggggctggcgttcctccaccaggtggccaccgtccacctcgacgtctgctcggggaacgtgttcctcgactcgcgctacaacgcgctgctcggcgaggtcgagatctccaggctgctggacccgacgaagggcacggccagcatcagcgcggtcgccggctcgttcggctacattcctccagagtatgcgtacacgatgcgggtgacggtgccgggcaacgtgtacagcttcggggtggtgctgctggagatcctgacgtcgaagctgcccgccgtggacgaggcgttcggcgagggcgtggacctcgtgaagtgggtgcacgcggcgccggcgaggggcgagacgccggagcagatcatggacccgcggctgagcgccgtgtcgttcgcgtggcgccggcagatgctggccgtgctcagggtcgccatgctgtgcacggagcgcgcccccgcgaagcggccccggatgaagaaggtggtggaaatgctgcaggaggccagggacagctgagtggtctggttcctctgctcaatgatgtgtggttggctgcttggaacttggaacttggaagtcgaggcgagaaactctgaactgatcatcgttggagttcgagtatggagtccatccggtagcgtttgattctctgtatatattcggtaattagtatcccgatcatgcgccatggatcactggatgttcggtcttggagcaatgtctggaactctggatgcgtctttagcaaagcaattcggtgttctgcattgagggttttattttcatttgtttttgtttttgttttttttttgaaaaaaaa

SEQ ID NO: 142854 - DNA, 668 bp, Zea Mays
ccccaaatgccttcctccaccccttgctaccgccgcagcttcctcttcttggccctcctctcggcgtgctcctcggcgccggggacggtggacggcgccgggacagccggcggcggcggggatgccgcggcaatgcaggcgctgcggcgggacctggcgccgccgggctggggcccgggcgcggaccactgcgcgtggcgcggcgtcacctgcgccggcggcggcggcgcggtgaccgcgatcgacctgccgcgccgtgggctccggggggacttcgccgccgccgccgagctccgcgagctggcacgcctcgacctctccgccaactcgctcagcggcggagtcccgcaggcgctcggcgcgctcacccgcctcgagttcctcgacctctcgatgaacgcgctcgccggcgccgtgccgcccgcgctaggcggcgcgtcgaggctccggttcctgaacctctccaacaacgcgctgtccggcgccatccccgacgagctcaggggcctcaaggggctccaggagctgcagatatcgggcaacaacctgaccggcgccctccccggctggctcgcggggctgccgggcctccgcgtgctgtccgcctacgagaacgcgctgtccggcccatcgggtacgtcctctacgacgacgtcgcgctgctgctg

SEQ ID NO: 142855 - DNA, 1972 bp, Zea Mays
cgtcgtcgcttgagctctctcgctggcggaccgcccccctcatccctgcggtcacgcgcgacctccatgacctccaccgctgcagaaggtgcaggaagcggtagcttgaaccctccgcattcgaaccctagcggcgatggcggccctaggatccggtcgccgccggggaaagggaataagcccgtcgctctcgccgacatcactaacactgggaagcccaacgccgccagatccatcaccgtccccgacctcgttaaggagaacaccaagttgctgactctgctcaacgagaagacaaagattattgacctcagcagggttgagatatacaagctccgtcttgccctgcaagcatcaaagcaacagaatctacaccttacacaaaccaattcgcagatgcttgcggaaataaacacagggaaagatcgtattaagatgctgcagcatgagctttcttgtacaacagcactgcttaaagtaaaggattcagagcttgatagaaagaaaaacgctggtaatgtacagcagaagggagtaaaatctcaggtcttgaaaaccaaagcttccacagtagcagtagaggctcaccacgttggtgactcagtaaccagtggtgttgaacaccatgtggttgaatctcaatctgccgtatcatcaaatactgtctgccaggagccaccacaagatggaaagcaaaagagaatgcctcaacggagaaggtcttcaagactgaaccaaggttcctgtgagatcaggggagtatctcagaacacactgcatgagaaccctgtagtgcctgtagctccttccactttaagtcttgagaaacagtatggacaaaccactggaaaacatatgaagtcactgcaaaatgagtgcagtgcaactgtgcatgaagtaataatggcttcagaattcgagaaaactgagataaatgagctaccacaaaaaacagatctgaaggtatgggacacatttaataaccagttaaagattaaagatggaaccatttgcagatttaatctacttgtttcctataatgttattcaggagataccagaagcatgttccagtgaaactgaagttcagtctcataaaattggtgataaggccttcaacagtaaacaaaaccatttgacaggaagccaatcatctttgtcattcaataccgttgacacccccgagccaccagaagacaacactgtcaagcggtgctcaaaaaaacggtcatccatagaggatgtaaatgccaaactagacacgattaccagtgagccattgcgacatgaagaaaagagaaaatctcgaaggaaaatatctgcaagactgaattcagtatcttctgagcacacagatatcgttgttgagactgagcacaaagatgttattgtttctttggccggttccacttcaaatgtctcaatggagcagcggacaaatcaagagcaggatggtgattgtttctcaaggaaatccaatgaaaatcagatattagggaggaggtctctaagacgagctgctgaaaaggtcgtctcttacaaggagatgcccttgaatgttaagatgcgacgaccttaactgccaggaggatgaccatggtgacatgttgtagcttgctgtcctgactagccttaagcaggtatccttctgtttttttgtgtgctccagaatcagtgattgcttgcacatctcgttctacttcaaacgaaccaccaaacagtggcgaagctagagcaaacttgaaggttgtacaattgttttgtgggtgcatagacatcatgtgatcgttgtgtatgtaagatgaaagtttgttctttataattagttctgcactttttagactccaacagcgaactcgttaaatataggggttggtcagctcctttctcttttcaacaagagactgtaaaaagtctgtaatacctaaaattctattttaggaaatgtcttctaaaaatgggttccccacttt

SEQ ID NO: 142856 - DNA, 1894 bp, Zea Mays
ctaacattccagctcccgcgccgctctaccgtcgtcgcttgagctctctcgctggcggaccgcccccctcatccctgcggtcacgcgcgacctccatgacctccaccgctgcagaaggtgcaggaagcggtagcttgaaccctccgcattcgaaccctagcggcgatggcggccctaggatccggtcgccgccggggaaagggaataagcccgtcgctctcgccgacatcactaacactgggaagcccaacgccgccagatccatcaccgtccccgacctcgttaaggagaacaccaagttgctgactctgctcaacgagaagacaaagattattgacctcagcagggttgagatatacaagctccgtcttgccctgcaagcatcaaagcaacagaatctacaccttacacaaaccaattcgcagatgcttgcggaaataaacacagggaaagatcgtattaagatgctgcagcatgagctttcttgtacaacagcactgcttaaagtaaaggattcagagcttgatagaaagaaaaacgctggtaatgtacagcagaagggagtaaaatctcaggtcttgaaaaccaaagcttccacagtagcagtagaggctcaccacgttggtgactcagtaaccagtggtgttgaacaccatgtggttgaatctcaatctgccgtatcatcaaatactgtctgccaggagccaccacaagatggaaagcaaaagagaatgcctcaacggagaaggtcttcaagactgaaccaaggttcctgtgagatcaggggagtatctcagaacacactgcatgagaaccctgtagtgcctgtagctccttccactttaagtcttgagaaacagtatggacaaaccactggaaaacatatgaagtcactgcaaaatgagtgcagtgcaactgtgcatgaagtaataatggcttcagaattcgagaaaactgagataaatgagctaccacaaaaaacagatctgaaggagataccagaagcatgttccagtgaaactgaagttcagtctcataaaattggtgataaggccttcaacagtaaacaaaaccatttgacaggaagccaatcatctttgtcattcaataccgttgacacccccgagccaccagaagacaacactgtcaagcggtgctcaaaaaaacggtcatccatagaggatgtaaatgccaaactagacacgattaccagtgagccattgcgacatgaagaaaagagaaaatctcgaaggaaaatatctgcaagactgaattcagtatcttctgagcacacagatatcgttgttgagactgagcacaaagatgttattgtttctttggccggttccacttcaaatgtctcaatggagcagcggacaaatcaagagcaggatggtgattgtttctcaaggaaatccaatgaaaatcagatattagggaggaggtctctaagacgagctgctgaaaaggtcgtctcttacaaggagatgcccttgaatgttaagatgcgacgaccttaactgccaggaggatgaccatggtgacatgttgtagcttgctgtcctgactagccttaagcaggtatccttctgtttttttgtgtgctccagaatcagtgattgcttgcacatctcgttctacttcaaacgaaccaccaaacagtggcgaagctagagcaaacttgaaggttgtacaattgttttgtgggtgcatagacatcatgtgatcgttgtgtatgtaagatgaaagtttgttctttataattagttctgcactttttagactccaacagcgaactcgttaaatataggggttggtcagctcctttctcttttcaacaagagactgtaaaaagtctgtaatacctaaaattctattttaggaaatgtcttct

SEQ ID NO: 142857 - DNA, 4055 bp, Zea Mays
taggatcaaaaccgtctcgccgctgcaataatcttttgtcaattcttaatccctcgcgtcgacagcgacagcggaaccaactcacgttgccgcggcttcctccatcggtgcggtgccctgtccttttctctcgtccctcctccccccgtatagttaagccccgccccgctactactactactagcagcagcagcgctctcgcagcgggagatgcggtgttgatccgtgccccgctcggatctcgggactggtgccggctctgcccaggccccaggctccaggccagctccctcgacgtttctcggcgagctcgcttgccatggagggcgacgcggacggcgtgaagtcggggaggcgcggtggcggacaggtgtgccagatctgcggcgacggcgtgggcaccacggcggagggggacgtcttcgccgcctgcgacgtctgcgggtttccggtgtgccgcccctgctacgagtacgagcgcaaggacggcacgcaggcgtgcccccagtgcaagaccaagtacaagcgccacaaggggagcccggcgatccgtggggaggaaggagacgacactgatgccgatagcgacttcaactaccctgcatctggcaatgaagaccagaagcagaagattgccgacagaatgcgcagctggcgcatgaacgctgggggcagcggggatgttggtcgccccaagtatgacagtggcgagatcgggcttaccaagtatgacagtggcgagatccctcggggatacatcccatcagtcactaacagccagatctcaggagaaatccctggtgcttcccctgaccatcatatgatgtccccaactgggaacattggcaagcgtgctccatttccctatgtgaaccattcgccaaatccgtcaagggagttctctggtagcattgggaatgttgcctggaaagagagggttgatggctggaaaatgaagcaggacaaggggacgattcccatgacgaatggcacaagcattgctccctctgagggtcggggtgttggtgatattgatgcatcaactgattacaacatggaagatgccttattgaacgacgaaactcgacagcctctatctaggaaagttccacttccttcctccaggataaatccatacaggatggtcattgtgctgcgattgattgttctaagcatcttcttgcactaccgtatcacaaatcctgtgcgcaatgcatacccattatggcttctatctgttatatgtgagatctggtttgctctttcgtggatattggatcagttccctaagtggtttccaatcaaccgggagacgtaccttgataggctggcattaaggtatgaccgggaaggtgagccatctcagttggctgctgttgacattttcgtcagtacagtcgacccaatgaaggagcctcctcttgtcactgccaataccgtgctatccattcttgctgtggattaccctgtggataaggtctcttgctatgtatctgatgatggagctgcgatgctgacatttgatgcactagctgagacttcagagtttgctagaaaatgggtaccatttgttaagaagtacaacattgaacctagagctcctgaatggtacttctcccagaaaattgattacttgaaggacaaagtgcacccttcatttgttaaagaccgccgggccatgaagagagaatatgaagaattcaaagttagggtaaatggccttgttgctaaggcacagaaagttcctgaggaaggatggatcatgcaagatggcacaccatggccaggaaacaataccagggaccatcctggaatgattcaggttttccttggtcacagtggtggccttgatactgagggcaatgagctaccccgtttggtctatgtttctcgtgaaaagcgtcctggattccagcatcacaagaaagctggtgccatgaatgctcttgttcgtgtctcagctgtgcttaccaatggacaatacatgttgaatcttgattgtgatcactacattaacaacagtaaggctctcagggaagctatgtgcttccttatggaccctaacctaggaaggagtgtctgctacgtccagtttccccagagattcgatggcattgacaggaatgatcgatatgccaacaggaacaccgtgtttttcgatattaacttgagaggtcttgatggcatccaaggaccagtttatgtcggaactggctgtgttttcaaccgaacagctctatatggttatgagcccccaattaagcagaagaagggtggtttcttgtcatcactatgtggcggtaggaagaaggcaagcaaatcaaagaagggctcggacaagaagaagtcgcagaagcatgtggacagttctgtgccagtattcaaccttgaagatatagaggagggagttgaaggcgctggatttgacgacgagaaatcacttcttatgtctcaaatgagcctggagaagagatttggccagtccgcagcgtttgttgcctccactctgatggagtatggtggtgttcctcagtccgcaactccggagtctcttctgaaagaagctatccatgttataagctgtggctatgaggacaagactgaatggggaactgagatcgggtggatctacggttctgtgacagaagacattctcaccggattcaagatgcacgcgcgaggctggcggtcgatctactgcatgcccaagcggccagctttcaaggggtctgcccccatcaatctttcggaccgtctgaaccaggtgctccggtgggctcttgggtccgtggagatcctcttcagccggcactgccccctgtggtacggctacggagggcggctcaagttcctggagagattcgcgtacatcaacaccaccatctacccgctcacgtccatcccgcttctcatctactgcatcctgcccgccatctgtctgctcaccggaaagttcatcattccagagatcagcaacttcgccagcatctggttcatctccctcttcatctcgatcttcgccacgggcatcctggagatgaggtggagcggggtgggcatcgacgagtggtggaggaacgagcagttctgggtgatcgggggcatctccgcgcacctcttcgccgtgttccagggcctgctcaaggtgctggccggcatcgacaccaacttcaccgtcacctccaaggcctcggacgaggacggcgacttcgcggagctgtacatgttcaagtggacgacgctcctgatcccgcccaccaccatcctgatcatcaacctggtcggcgtcgtcgccggcatctcctacgccatcaacagcggataccagtcgtggggcccgctcttcggcaagctcttcttcgccttctgggtcatcgtccacctgtacccgttcctcaagggcctcatgggcaggcagaaccgcaccccgaccatcgtcgtcgtctgggccatcctgctggcgtccatcttctccttgctgtgggttcgcatcgaccccttcaccacccgcgtcactggcccggatacccagacgtgtggcatcaactgctagggaagtggaaggtttgtactttgtagaaacggaggaataccacgtgccatctgttgtctgttaagttatatatatataagcagcaagtggcgttatttacagctacgtacagaccagtggatattgtttaccacaaagttttacttgtgttaatatgcattcttttgttgatataatttatactttgtggagagttgctgacagacgagttttgtatgctacgaaaaacaaagaaattactccctccgtccagtgaagcaagtcgttttagcattgcaaggcgttagagtagtaacatgagagattacaagaataccctccattaaatgtaaagattcttgtgtcacatacggatgatgtagctagtcatctcagcatttattgattttttatccatcaggcgccaaaagtagaaatgtgtacacaggcacacgcgccaaacacattaacaaaaacgaaaaacaggcacacgcgccaaacacattaacaaaaacgaaaaaca

SEQ ID NO: 142858 - DNA, 4015 bp, Zea Mays
taggatcaaaaccgtctcgccgctgcaataatcttttgtcaattcttaatccctcgcgtcgacagcgacagcggaaccaactcacgttgccgcggcttcctccatcggtgcggtgccctgtccttttctctcgtccctcctccccccgtatagttaagccccgccccgctactactactactagcagcagcagcgctctcgcagcgggagatgcggtgttgatccgtgccccgctcggatctcgggactggtgccggctctgcccaggccccaggctccaggccagctccctcgacgtttctcggcgagctcgcttgccatggagggcgacgcggacggcgtgaagtcggggaggcgcggtggcggacaggtgtgccagatctgcggcgacggcgtgggcaccacggcggagggggacgtcttcgccgcctgcgacgtctgcgggtttccggtgtgccgcccctgctacgagtacgagcgcaaggacggcacgcaggcgtgcccccagtgcaagaccaagtacaagcgccacaaggggagcccggcgatccgtggggaggaaggagacgacactgatgccgatagcgacttcaactaccctgcatctggcaatgaagaccagaagcagaagattgccgacagaatgcgcagctggcgcatgaacgctgggggcagcggggatgttggtcgccccaagtatgacagtggcgagatcgggcttaccaagtatgacagtggcgagatccctcggggatacatcccatcagtcactaacagccagatctcaggagaaatccctggtgcttcccctgaccatcatatgatgtccccaactgggaacattggcaagcgtgctccatttccctatgtgaaccattcgccaaatccgtcaagggagttctctggtagcattgggaatgttgcctggaaagagagggttgatggctggaaaatgaagcaggacaaggggacgattcccatgacgaatggcacaagcattgctccctctgagggtcggggtgttggtgatattgatgcatcaactgattacaacatggaagatgccttattgaacgacgaaactcgacagcctctatctaggaaagttccacttccttcctccaggataaatccatacaggatggtcattgtgctgcgattgattgttctaagcatcttcttgcactaccgtatcacaaatcctgtgcgcaatgcatacccattatggcttctatctgttatatgtgagatctggtttgctctttcgtggatattggatcagttccctaagtggtttccaatcaaccgggagacgtaccttgataggctggcattaaggtatgaccgggaaggtgagccatctcagttggctgctgttgacattttcgtcagtacagtcgacccaatgaaggagcctcctcttgtcactgccaataccgtgctatccattcttgctgtggattaccctgtggataaggtctcttgctatgtatctgatgatggagctgcgatgctgacatttgatgcactagctgagacttcagagtttgctagaaaatgggtaccatttgttaagaagtacaacattgaacctagagctcctgaatggtacttctcccagaaaattgattacttgaaggacaaagtgcacccttcatttgttaaagaccgccgggccatgaagagagaatatgaagaattcaaagttagggtaaatggccttgttgctaaggcacagaaagttcctgaggaaggatggatcatgcaagatggcacaccatggccaggaaacaataccagggaccatcctggaatgattcaggttttccttggtcacagtggtggccttgatactgagggcaatgagctaccccgtttggtctatgtttctcgtgaaaagcgtcctggattccagcatcacaagaaagctggtgccatgaatgctcttgttcgtgtctcagctgtgcttaccaatggacaatacatgttgaatcttgattgtgatcactacattaacaacagtaaggctctcagggaagctatgtgcttccttatggaccctaacctaggaaggagtgtctgctacgtccagtttccccagagattcgatggcattgacaggaatgatcgatatgccaacaggaacaccgtgtttttcgatattaacttgagaggtcttgatggcatccaaggaccagtttatgtcggaactggctgtgttttcaaccgaacagctctatatggttatgagcccccaattaagcagaagaagggtggtttcttgtcatcactatgtggcggtaggaagaaggcaagcaaatcaaagaagggctcggacaagaagaagtcgcagaagcatgtggacagttctgtgccagtattcaaccttgaagatatagaggagggagttgaaggcgctggatttgacgacgagaaatcacttcttatgtctcaaatgagcctggagaagagatttggccagtccgcagcgtttgttgcctccactctgatggagtatggtggtgttcctcagtccgcaactccggagtctcttctgaaagaagctatccatgttataagctgtggctatgaggacaagactgaatggggaactgaggtaacgtggcaaaatccccacataatctcttctgaaagattagaagctagctatacatgcatgttataacttgataaccatatgctagcagtaacaagttcatttcaaaatcgcagatcgggtggatctacggttctgtgacagaagacattctcaccggattcaagatgcacgcgcgaggctggcggtcgatctactgcatgcccaagcggccagctttcaaggggtctgcccccatcaatctttcggaccgtctgaaccaggtgctccggtgggctcttgggtccgtggagatcctcttcagccggcactgccccctgtggtacggctacggagggcggctcaagttcctggagagattcgcgtacatcaacaccaccatctacccgctcacgtccatcccgcttctcatctactgcatcctgcccgccatctgtctgctcaccggaaagttcatcattccagaggtaattaaagcataagagcgttctttctttattacagcaggggagcatttggacaacgtacggtgctgatgagaaagaatctaccttggaatggaatgcgtgcagatcagcaacttcgccagcatctggttcatctccctcttcatctcgatcttcgccacgggcatcctggagatgaggtggagcggggtgggcatcgacgagtggtggaggaacgagcagttctgggtgatcgggggcatctccgcgcacctcttcgccgtgttccagggcctgctcaaggtgctggccggcatcgacaccaacttcaccgtcacctccaaggcctcggacgaggacggcgacttcgcggagctgtacatgttcaagtggacgacgctcctgatcccgcccaccaccatcctgatcatcaacctggtcggcgtcgtcgccggcatctcctacgccatcaacagcggataccagtcgtggggcccgctcttcggcaagctcttcttcgccttctgggtcatcgtccacctgtacccgttcctcaagggcctcatgggcaggcagaaccgcaccccgaccatcgtcgtcgtctgggccatcctgctggcgtccatcttctccttgctgtgggttcgcatcgaccccttcaccacccgcgtcactggcccggatacccagacgtgtggcatcaactgctagggaagtggaaggtttgtactttgtagaaacggaggaataccacgtgccatctgttgtctgttaagttatatatatataagcagcaagtggcgttatttacagctacgtacagaccagtggatattgtttaccacaaagttttacttgtgttaatatgcattcttttgttgatataatttatactttgtggagagttgctgacagacgagttttgtatgctacgaaaaacaaagaaattact

SEQ ID NO: 142859 - DNA, 1305 bp, Zea Mays
ctaacgtctggttttgcggaggattattattgggacaagctaagggcccgccggcagcagcatgaacagaccaagatgcgctcctggccttgctgcgctcgctgtggcgtcgtctttcctctgcttcctctcgccacccggcgctgagtcagcgggagtgttcaccatcatcaaccggtgcaagacgaccatctggccggcggcgacgccgggcgacagcttcggcggcggcgggttcgcgctgcggccggggcagtcggcggtgttcaaggcgccggcggggggctggtcggggcgcatctgggggcggacggggtgcagcttcgacgcgtccgggaacgggacgtgcgccacggggtcgtgcggcacgtcgctgcggtgcggcgcgtccggggcgacccccgtgagcctggccgagttcacgctggcctccgaccgcgacttctacgacgtgagcctcgtggacgggttcaacctgcccgtgacggtgcgccccgtgaacgggcgcggcggcaactgctccgcggcgggatgcgacggcgacctgcgccagacgtgcccgccggagctggccgtgcgcgccggggacgccgtggtggcgtgccgcagcgcgtgcgacgtgttcgacaccgaccagtactgctgccgcggcaagttcggcagccagcccacgtgcccgcccacgccctactccaagcggttcaaggacgcctgccccaccgcctacagctacgcctacgacgacgccagcagcctcttcacgtgctccggcgccgactacatcatcaccttctgcgccagcagcaggtacgctcggtagacgatgtcgccactcgccactatatatattgtgctccggcctccggccctcctccaaactctacgaatgtttcaggaagcaacaggcgtgctcgtaccacaacaaccggctggtctgcagcgacgccagccgccggtcttggccgacgatcacgtccaagctcctcctgcttctgctgccgcccatcatcttctccgcgctgcagtttccagtctgacgacgatgctccaagagaacaaaaccgacctgctgatattctcgatcgttttcttgtaaattacgtacacgattactggtgatcatatgccctaactgtatgtgtatactcttttcggacaccataagtagtgattgtggtgaattattaggcttgcaagttgcaagtactaattacacatatacgaatactaggtgcaggtgtgcaccgttgggtggttcgttcttcattttctctgcttacttgagcacagaaagacaaggttagc

SEQ ID NO: 142860 - DNA, 949 bp, Zea Mays
ctaacgtctggttttgcggaggattattattgggacaagctaagggcccgccggcagcagcatgaacagaccaagatgcgctcctggccttgctgcgctcgctgtggcgtcgtctttcctctgcttcctctcgccacccggcgctgagtcagcgggagtgttcaccatcatcaaccggtgcaagacgaccatctggccggcggcgacgccgggcgacagcttcggcggcggcgggttcgcgctgcggccggggcagtcggcggtgttcaaggcgccggcggggggctggtcggggcgcatctgggggcggacggggtgcagcttcgacgcgtccgggaacgggacgtgcgccacggggtcgtgcggcacgtcgctgcggtgcggcgcgtccggggcgacccccgtgagcctggccgagttcacgctggcctccgaccgcgacttctacgacgtgagcctcgtggacgggttcaacctgcccgtgacggtgcgccccgtgaacgggcgcggcggcaactgctccgcggcgggatgcgacggcgacctgcgccagacgtgcccgccggagctggccgtgcgcgccggggacgccgtggtggcgtgccgcagcgcgtgcgacgtgttcgacaccgaccagtactgctgccgcggcaagttcggcagccagcccacgtgcccgcccacgccctactccaagcggttcaaggacgcctgccccaccgcctacagctacgcctacgacgacgccagcagcctcttcacgtgctccggcgccgactacatcatcaccttctgcgccagcagcaggaagcaacaggcgtgctcgtaccacaacaaccggctggtctgcagcgacgccagccgccggtcttggccgacgatcacgtccaagctcctcctgcttctgctgccgcccatcatcttctccgcgctgcagtttccagtctga

SEQ ID NO: 142861 - DNA, 300 bp, Zea Mays
atggctgcgcgtcaccgcacgtgcctcctggccgcggcagccgcttgctccggcgaggccacgcgcctgcctgctccagcgtggatgagcgccacccccacgctggtcctcgctccctactgcgtatgcctcctagccgagcggtgcggcatagccatggcgccctgcgtgccgcgcttccccgtgcccttgccccagcctcgccaccggccaagggcggcagccaacgcctccgcatgcctatgctcgacggcgctgccagccgccagccccctagacaatccccacacgcgtgcctag

SEQ ID NO: 142862 - DNA, 365 bp, Zea Mays
aaaagggacccctaggcgcatggaggagtcacccaagcatactttgagcattctaagtcttccacactccgtctccgcgcacttgatcaaccgtgttagtgatttgagttccgttcttgtagtgaactcgttgtgcttcattttgagctcaagtcttggcttgtgtgcgtgtgtattgctgcggatttgtgtgtgttgcttcccacccttactcttgtgctttcaccgtgatctttattgtaagggcgagacactccaacttgtggagattcctcgcgaacgggaaaagagataagcaaagaatatcgtggtattcaagttgatcattggatcacttgtaaggggttgagtgcaaccctcgtcca

SEQ ID NO: 142863 - DNA, 238 bp, Zea Mays
tattagtatttgaataaaatatagtattataaaaaacacataaaatatcgataggttcacgaaacgtatgtgtcacacgttttgatcggcatgcctaacaggtgcacattctgtatggctatagggtccaacctaacaaagtactctttttggagattataccatcctcgttatgtttgtgttttgtaattctcaatgaatcgggtatcacactctaagaatgatttaaagcttgtta

SEQ ID NO: 142864 - DNA, 678 bp, Zea Mays
gatttaaagcttgttactcccaatcttaggaaaaataattatcgaaaacccttggagaccaatatcacattagaatatggaaatgtaacttcttatttctgggaggccacatacattagccaaaaaacttcattagtgaattacaactaataagcaatctaaaagagggcaccaccaatgatgtgttgttggtaagaggctgctgggtttgtcaaagcaagttggacaaagggcaacaactgttgtagttgtaagagggttgcggggttagccgcaaactgctagtagaacggcagcaactgttgttgtgtcaagaaggaagcacgacttgctgtcgtgccccgatggtttgcaccaatgagtgcaccaaagatagggctggcgattgttgaaacaagggtgataaaggtaaattgcttgctgcgattgcttgttggagcctatagggttgaagagccgagttttcacatactgaatctatcattgatggaaggaatgggggaagaagagaagctataggagcttgtgagcattgagggaaaatggtcgcgttagcaacacatgtagaaagagcaaggagcataaggagggaaaatatcttggtcgccattgtggctctattgttgctactggatttcgctttctatgttgcttgttggtctcaataatatggttgat

SEQ ID NO: 142865 - DNA, 273 bp, Zea Mays
atggcgtgccacacgtacacctgcttcacgccgtgcgcgtccttggtctcggccaccagtcgcttcagcccgcccggcgcctgctcgccgtcgccgtcgccgtcgggcttggtctggaacttggtgttctccttgatcccggtcagccggctggcgaattgcgcgccctcctggacggcgacgttggggtcgggcttgttctcggaggcgatctgctgccagccgtcgtcgatgatgaggaaccgcggcggcgcgccgcccttggacaggctg

SEQ ID NO: 142866 - DNA, 4113 bp, Zea Mays
atcctgccttgagtgttcgtgcaacgctgcccctgccgcgtcgtcttctggaccgcttctccactccgcccagctcgcagtcgcagctcgctcaaagcagcacagcagcaagcagaaggaagaaaaagagcagcgagagccgagaagagaagcgcgccgccgctcgagctcatcccgccgccggacacaccgcatggccatgaggcacagggcgcggtcctcccccacctccccgctcaccccgtcctccagcgcaagaacaaacaagatacttggtttctctgtatctctcatcctcatcaatctggcttcaattatggagcgtgctgatgagaatctccttccagcagtttacaaggaagtcagtgcagccttcaatgctggtcctgcagatctgggatacctcacctttgtaatgaactttctgaagtcaatagcatctcccttggcaggttgcatctatcaagcaaagatgttcttcctccgccttctatctggagggattcttgggtggcaacaagatctgtcatgaaagtgaagacgtttcagatcattgtcctgcaagggatcattggctcgttgccgtggactgctatagttttcttcacaatgtggttcgaactcattggttttgacaacaacagctcagcagcactgaacagcctcttcgccatcgggtgtgccagcggagcatttattggcggggtgatagcagatcacctgtcaaagtacttcccagattcggcacgggtcatgtgtgcccagtttagtgccttcatgggcatcccgttttcttggatcctcctcacagtcatcccccagtcagttgactactggtatgccttcgccgtcacgcttttcttcatgggcatcacgataagctggtgcgccacctcggcaaacaaccccatgttcgccgaggtggtccctcccaagcaccgcaccatgatctacgccttcgaccgcgcgttcgagggctcattcgcctcgttggctgcccctgccgtgggcctaatcaccgagaagatctatggctatgataccaagaccgtgaaccttgcgaacgggtcagcggaaggggcgtacgcgctctcaagggggctgctgaccatgatgatcgtgcctttcggtgtgtgtgtcctgttctacagccccctgtaccttgtgttcaagcacgacagagagaacgctaaatttgccagcttcaaggagcaggagctagtatgatcaatgatcatacgaatgtgcttccttggtccgcattcataacctctcgtcatcccgggctggagctttgcgtgatgattatgaagataactgccttgatcggcattcagaacatctggtcataccgtcctgggtcattctgagtttcttgttgagattatggcaattgtgccacggagaggtgtggatcaacgtttgttctggcagattttgaagattgttataaggcgacctttttttttgtgctgatcacctatccagaaagccatggcttctcccgacgactgatttgtgttgttaagggatgatttgcttttttgcatggcttctcctgacgactgatttgtgttgttaagggatgatttgcttttttggtaattcttagtcttacaagagaaccccaaggagaagcatatgatatgatctgaaccatgctgaattgctgatgttacatgtagttggaacagatcactaataatgttctgatcactgggatcagctcgttttcagtaatctttctggtttttttttcgcaggaaaaaatttctgtgttttttttgggaaaaacacaggaaattttgcttctgttgattatgaaagcagtgctagcagtttgatttcatctattaaaactatgtgcggaagcaaattccgcaaagaagcaaaggaagaaaatggaaaatgctagctgcctcacgtgggacctcctgtcagagacagacccctttgcacgctttggagccgcagcaaagctcgaactcgatccgggtctccgggccattcgatctccgatcggacggcccagacagctcacttcctctccacctttgcacgctatagctcctctccgagtcgtcgtctccgtcgctgcctgctctgcttgctgcgccactccaaacccaacccaaaacccccacacgagatctgcgcagcaatggcgacgcggtgccacgtcctgctcctcctcgccgccgccttcgcgtccctcctcgcgctcgtggccgcggaagggggcgaagaggggccccgcgggcgccggctgctcgtcctcctggacgacctggccgtgcggtcgtcgcactcggccttcttcggctcgctccaggcgcgtgggttcgatctcgacttccgcctcgctgacgatccaaagctctcgctccaccgctacggccagtacctctacgacggcctcgtgctcttcgccccctccacaccacgttttggtggatcagtggaccagaacgcagtcctcgaatttattgatgctgggcatgacatgatcctggcggcagattcctctgcctctgatctcattcgtggcattgcaacagagtgtggggttgattttgatgaggatccagaggcaatggttattgaccatatgaactatgccgtcacagatgttgaaggtgatcacaccttgattgctggtgacgatcttatccattcggatgtgatactagggtctgaaaagattgaggctcctgtattgtttcgaggaattggacacatggctaatccatcaaacagtttggttctgaaggttctatcagcctctccatcagcatattcagctaatccaaagactaagttagcgtctcctccatcgctcactgggtcagctatatcattggtttcggttatgcaggcaagaaataatgctcgggtgctgttatctggatcactcgatctgtttagcaaccggttcctgaagtctggtgttcaaaaggctgatagcaaaacaagatatgagagagctggaaacgagcaatttgtggcagagataagcaaatgggttttccatgagaggggacatctaaaggctgttaatgttaggcatcacaaggttggggagaccaatgaaccaggcatgtaccgcattaatgatgacctggaatactctgttgagatctatgaatggtccggaacaagctggaagccgtatgttgctgatgatgtgcagcttcaatttttcatgatgagcccttacgttctgaaaactatgtcgactgacaacaagggtttgtattcaacaaccttcaaagttccagatgtttatggagttttccagttcaaagttgagtaccaaagactgggatatactggtctgtcttttacaaagcagattccagtacgtccttacagacataatgagtatgagagattcataacatcagcgtacccatactacaccgcctcattttcaacaatgggtgctttcttcgtattctcgtttgtgtacctgtaccacaaataaaggactcatgggagcgcacaagtctctggaggctgacgtgaccaagatctgtgggcactgaatgttgtgctataagccaagagttacccggcgccaattttatggaaccatgtttttgtactgccaacttagataacatttgacgaccgtgaccgcactcatgggaaatttactcgtgctaggatgttcgatctgcccccacttcttttttttctttcttggaccctttctgatcagcacttgtcagaacgtttacagtctatagcactgaaacgtgattttggaagtactacacccccagtaattttgcactcgtgcccagttctgatttctgatcctgggtgtggacttcaaagtctgcctattatacttccgcaattgttcgtgtttataacctggacgcacgtattttttttcacgggcttattgaacatgatgctcgaagagtgcactaaacatgccatgcacgtattttttttcacgggcttgttgaacatgaatgctcgaagagtgcactaaacatgccgcttcatgtacagaattcgaaatttgtaatgttatatgagcattttctcgggcagtggatgcattttaggtgccgtttggttcacatttgtcatgtacatttg

SEQ ID NO: 142867 - DNA, 2934 bp, Zea Mays
atcctgccttgagtgttcgtgcaacgctgcccctgccgcgtcgtcttctggaccgcttctccactccgcccagctcgcagtcgcagctcgctcaaagcagcacagcagcaagcagaaggaagaaaaagagcagcgagagccgagaagagaagcgcgccgccgctcgagctcatcccgccgccggacacaccgcatggccatgaggcacagggcgcggtcctcccccacctccccgctcaccccgtcctccagcgcaaggttgcatctatcaagcaaagatgttcttcctccgccttctatctggagggattcttgggtggcaacaagatctgtcatgaaagtgaagacgtttcagatcattgtcctgcaagggatcattggctcgttgccgtggactgctatagttttcttcacaatgtggttcgaactcattggttttgacaacaacagctcagcagcactgaacagcctcttcgccatcgggtgtgccagcggagcatttattggcggggtgatagcagatcacctgtcaaagtacttcccagattcggcacgggtcatgtgtgcccagtttagtgccttcatgggcatcccgttttcttggatcctcctcacagtcatcccccagtcagttgactactggtatgccttcgccgtcacgcttttcttcatgggcatcacgataagctggtgcgccacctcggcaaacaaccccatgttcgccgaggtggtccctcccaagcaccgcaccatgatctacgccttcgaccgcgcgttcgagggctcattcgcctcgttggctgcccctgccgtgggcctaatcaccgagaagatctatggctatgataccaagaccgtgaaccttgcgaacgggtcagcggaaggggcgtacgcgctctcaagggggctgctgaccatgatgatcgtgcctttcggtgtgtgtgtcctgttctacagccccctgtaccttgtgttcaagcacgacagagagaacgctaaatttgccagcttcaaggagcaggagctagtatgatcaatgatcatacgaatgtgcttccttggtccgcattcataacctctcgtcatcccgggctggagctttgcgtgatgattatgaagataactgccttgatcggcattcagaacatctggtcataccgtcctgggtcattctgagtttcttgttgagattatggcaattgtgccacggagaggtgtggatcaacgtttgttctggcagattttgaagattgttataaggcgacctttttttttgtgctgatcacctatccagaaagccatggcttctcccgacgactgatttgtgttgttaagggatgatttgcttttttgcatggcttctcctgacgactgatttgtgttgttaagggatgatttgcttttttggtaattcttagtcttacaagagaaccccaaggagaagcatatgatatgatctgaaccatgctgaattgctgatgttacatgtagttggaacagatcactaataatgttctgatcactgggatcagctcgttttcagtaatctttctggtttttttttcgcaggaaaaaatttctgtgttttttttgggaaaaacacaggaaattttgcttctgttgattatgaaagcagtgctagcagtttgatttcatctattaaaactatgtgcggaagcaaattccgcaaagaagcaaaggaagaaaatggaaaatgctagctgcctcacgtgggacctcctgtcagagacagacccctttgcacgctttggagccgcagcaaagctcgaactcgatccgggtctccgggccattcgatctccgatcggacggcccagacagctcacttcctctccacctttgcacgctatagctcctctccgagtcgtcgtctccgtcgctgcctgctctgcttgctgcgccactccaaacccaacccaaaacccccacacgagatctgcgcagcaatggcgacgcggtgccacgtcctgctcctcctcgccgccgccttcgcgtccctcctcgcgctcgtggccgcggaagggggcgaagaggggccccgcgggcgccggctgctcgtcctcctggacgacctggccgtgcggtcgtcgcactcggccttcttcggctcgctccaggcgcgtgggttcgatctcgacttccgcctcgctgacgatccaaagctctcgctccaccgctacggccagtacctctacgacggcctcgtgctcttcgccccctccacaccacgttttggtggatcagtggaccagaacgcagtcctcgaatttattgatgctgggcatgacatgatcctggcggcagattcctctgcctctgatctcattcgtggcattgcaacagagtgtggggttgattttgatgaggatccagaggcaatggttattgaccatatgaactatgccgtcacagatgttgaaggtgatcacaccttgattgctggtgacgatcttatccattcggatgtgatactagggtctgaaaagattgaggctcctgtattgtttcgaggaattggacacatggctaatccatcaaacagtttggttctgaaggttctatcagcctctccatcagcatattcagctaatccaaagactaagttagcgtctcctccatcgctcactgggtcagctatatcattggtttcggttatgcaggcaagaaataatgctcgggtgctgttatctggatcactcgatctgtttagcaaccggtatgctatcatatatacactgaattaatttcccctggttttccataaagtgcatatgttgttccttttatttaggttcctgaagtctggtgttcaaaaggctgatagcaaaacaaggttagcttacttttggagcttttattgacattaatagattatagatttcagctagaaagtatcaagatcttttggctgct

SEQ ID NO: 142868 - DNA, 603 bp, Zea Mays
atggctagtgaaggcgaagcttcacctccacgaaagcatatgttgttggagttgcctagtgaacatcaaagtcagaacttgacatcctcacctcatgcaaatacaagtcaacattttggtgtgtccgcatcatcgtcaacacctgctgcaacatctcatgaacaaggtgcaaatccagaagaaggaattaattaggatgaggatgattcttcaaagttgaagcaagcaaagaagtccacttcaaatgtttggcagtattttaagaagtatgaggttgtcgtagaggagaatggtaaatctgtgaagcaagtttgggccaaatgcaagtattctggttgcaaaaacaagactagcaaagctagggttaaaaatagtagaggaacaactgcattttggtctcatttgaaaaattatcatacgattgtgaaggggcaacaatagctcaaggcagaaaaggatcatggcacagatatatgcattgtccagccatataaatatgatgaataaaccagtttgagaaagttttatacagctattatcatgcatgagtatccatttaacattgttgagcatagacactttgtggaattcattaaatcattg

SEQ ID NO: 142869 - DNA, 702 bp, Zea Mays
ctcatttacttatcctctgtccctacccacacacgtgcggtgcccaccactccccactctgctgagcgcccgcggccggcgccctcacgcccacgcggctaggcttggcgcccgcgcccgtggccgtggctgccacttccaagctcacagcttggctcgagcaaagaggtgagtgatacgccctgcacgagtgtgtggtaggcagcacgatggcgctgcactgctccctgtccacggcctgttcgacgttgtggctgcgagcagcggtgtgacctgatcctcgctttttgaggtcccgtgcgcgcctcgcaggtctagatctttctggcccgcaccaccggaggctcgtgcacaccggctgcacgcgggcgggaacgagcgactctaaggccgtggagctggtgctaggtggtcgtgcgtgcggcgacgatggcgacactgactccgagtccagcgatgacgaggatgcgtaggatcgcatgacggacgaggagcggaggacgctgcgttggagatgatggaccgcgtcccgaaaactatggagttgacggacccggaggagcgaagggccaagatgcgggagctgctgaccaagtacaagctggtggtacacgggggaaggggatgacggacggcgggcgggggaggagggtgagaagaaggggatgatgggctgccacacgaggggagaagaagcatgac

SEQ ID NO: 142870 - DNA, 1481 bp, Zea Mays
atatgacttgacgttttaaggccccaggcccaagcacaacgcagctcacgttttgagctcgtgtgtttaactgtttacgccgcgcaaaattctcgcaaaagaaagcagcggtgtgtcagtgtctgcagtggttcttatctgcagctctttttgccgcccgataatgcgcgttgccgcctcccagcttcccctccccaccaccaccccagcccgccggcgacggcgagcctcggcgccgcccaccgccgcgccgcggccacccccgagagcgctcgccgccatactgcgctcgcgcgtcatcgcgtgcctccgcgcgcaagacagcgagacggcgttgcaggcggctcacgcggctgtccacggcggcattaccgtgttggaggttgtcatgacgactccgggagtgctcgaggttattgaagatctttgcaggagttatccttctttaacattcggggttggcacggtcttaaatgctgctgatgcaaggaaagctatttgcgctggtgcacaatttcttatgagtcctggcacagtcctggacatacttcatgatcttaaagaaagtaatgttctttatattccaggagtgctgacatcaactgaagttttatccgcttgcagtgctggtgcaaaagttgtcaaggtgtacccagtttcagtcatgggtggggagatgtacatgtcagctctgaagaaaccatttcctcttgtaccaatggttgcttctcaaggaattaaaatcggttcaatcaagggatatatggaagcaggggcatctgcagtggtcttatctgatgctatttttgacagtcaattgatgagggatgggaaattcaatgaaatttcggaacttgcaaatctagcaactttagaggcattgcagttcacgaaatgagacaaatctacaatcataacagatttgcgtccagaatatgtggccttctgttctgtggaaggagtcaattcacctcctggtaactacatgctacttctgtgtaaagagtcagttcacctcctaaataaagctgtaggagctctggtgttctatgcacctgcaagaggctgagactgcaacaaatttgtgtgctccgaagtctgaacagggacctgatcattgaggatgccgtgatgctaagaagccaaccatacatttaggtgccgtgtaatggaatcaccacaactcgcaagagaacagaggtgaatggaagagagattgctggtttgcttgtgctttgactgacctagtagatgttaacgcaggttcataggagtgtactagtagtgcatctctgaagaccgttatacttctaggcaaggtcatggactttgtgtgtttaaaaaaaaggtcatggactttgtgtcgatcaaatgatcaatgtgcttgaacaggtgttgtctgtttttacccgggaattctgcatgaaatgagttggtgctatgtatcaatagacttgtagattttaatgcagttttctttt

SEQ ID NO: 142871 - DNA, 1475 bp, Zea Mays
atatgacttgacgttttaaggccccaggcccaagcacaacgcagctcacgttttgagctcgtgtgtttaactgtttacgccgcgcaaaattctcgcaaaagaaagcagcggtgtgtcagtgtctgcagtggttcttatctgcagctctttttgccgcccgataatgcgcgttgccgcctcccagcttcccctccccaccaccaccccagcccgccggcgacggcgagcctcggcgccgcccaccgccgcgccgcggccacccccgagagcgctcgccgccatactgcgctcgcgcgtcatcgcgtgcctccgcgcgcaagacagcgagacggcgttgcaggcggctcacgcggctgtccacggcggcattaccgtgttggaggttgtcatgacgactccgggagtgctcgaggttattgaagatctttgcaggagttatccttctttaacattcggggttggcacggtcttaaatgctgctgatgcaaggaaagctatttgcgctggtgcacaatttcttatgagtcctggcacagtcctggacatacttcatgatcttaaagaaagtaatgttctttatattccaggagtgctgacatcaactgaagttttatccgcttgcagtgctggtgcaaaagttgtcaaggtttcataactgcacattgttctcgtaggtgtacccagtttcagtcatgggtggggagatgtacatgtcagctctgaagaaaccatttcctcttgtaccaatggttgcttctcaaggaattaaaatcggttcaatcaagggatatatggaagcaggggcatctgcagtggtcttatctgatgctatttttgacagtcaattgatgagggatgggaaattcaatgaaatttcggaacttgcaaatctagcaactttagaggcattgcagttcacgaaatgagacaaatctacaatcataacagatttgcgtccagaatatgtggccttctgttctgtggaaggagtcaattcacctcctggtaactacatgctacttctgtgtaaagagtcagttcacctcctaaataaagctgtaggagctctggtgttctatgcacctgcaagaggctgagactgcaacaaatttgtgtgctccgaagtctgaacagggacctgatcattgaggatgccgtgatgctaagaagccaaccatacatttaggtgccgtgtaatggaatcaccacaactcgcaagagaacagaggtgaatggaagagagattgctggtttgcttgtgctttgactgacctagtagatgttaacgcaggttcataggagtgtactagtagtgcatctctgaagaccgttatacttctaggcaaggtcatggactttgtgtgtttaaaaaaaaggtcatggactttgtgtcgatcaaatgatcaatgtgcttgaacaggtgttgtctgtttttacccgggaattctgcatgaaatgagttggtgctatgtatc

SEQ ID NO: 142872 - DNA, 1575 bp, Zea Mays
gaatctctaggacctaagccgttggagatagcatcagtgacagtgatgtcacacggcaattttagccgcaacgctccagctgtaccgcgaaacaaaatttctctacttttcttcgaccgtcctaccctatccgctcccctcgccggcgccgcggcggcggcgagaaagagagaacgcgctcctcttccttctcgactcgatctgccccttccagcccgctcgcccctcatcgagcggcctccgtagccctaggtgatccgcgcctccttccgccgcagcggaacaggacgcctgaccgtcgaccgtcgaagcgattcctctctcgcgggcgtcctcgtctcgccctcctcgcctcctcggtgccagtgggtcggcgcggggaggcatccgtccgggctacggtcgatttgttctccacttgctgttgaactttaaatagacaatggatctggagacagaaaatcgtcttgcttctttactacttgaagaggcccgaagattacaattagaggctaacagggaaggtgttcaagcatatctgcgaaaacctaatgttaggcatcgtccaaactctcggttcctcacagccacagttcgtggagttcagcaagcaaatcgtgttgtggaggtcaatgaaatgtggcgtgccagggaaaaggaactggagttggagtcaaaaatgaaaggcagaagtagcagaagtaaagatcatggtgattttacaggtgagaagcgcaaaagtgaaagaaaccatagctccagctcaaggattgaacaagaagggaccacttatgatacttcgtactcagaccaggaggatggtctcagggatgatgaaattgaaagatttctttattcaagggcgaagcgaggacgtggggctgttggttccaggatggacgagcctggtccataccttgattctctgtcccatcatcaggacaatggacctagcccggacatacgtgtggaagaaaaatgggaacgcagagtacaaggcccagagaagcctccattttggggatgcaagtctctcgatggtcattggcgcttgggcacattggatggaaggccatcaagctctgaaccacagagcaaaaaagaaaagaaaagtaagctggataaaaaggataagatagagaaaaggaaggaaaagggcaagaagaaatccaaacatcgccaccaccgccatcgcagaagcagcaggagtgagtgagtgatgttgcctgttagcagaacagaaaaaaatggacacaacggttctgccatgaccatgagacaagctagctgactgttcctgtgtcttgaaacctgtattgtatggaaacgggatattgtgtaggcttatacaatacaatgttgcgatgtcacatcgtttgttgaagttttatcactttgattaacatctgcaacaggaggttttttcttctctttttcctatactatattgggcgtcgaatattggagtccgaggagcctgttcttcaagcagggcagcctgtcagttggggtttgtagctgaataaaactgtgtatggatgcgtaggccatcaatagctcttagtcatattagtg

SEQ ID NO: 142873 - DNA, 1561 bp, Zea Mays
gggcgtgtgagtgatggacgatcccccaatcctgcgtccaccactcatcactctccccccactcatctctcctgccccgccaccccaccagcgatggccctgtgcgccgccgctgcctccacggccaccgcctccgcgtcggcccatctatcggcctccaccgctcgcccgcggggcccctcctcgacgtcgctgccgtcgtccttcgtcggcgcgttcccgtgcgcggtcgctgcgaggacgaggaggaggcgcgcggcggcggcggcggcccgcgccaccgtcacggtgcgcgcggaggccaggaagagcgtgctgatcgtgaacaccaacggcggcgggcacgccgtcatcgggttctacttcgccaaggagctgctcgccgccgggcacgccgtcaccgtgctcaccgtcggcgacgaggcctccgacaagatgaagaaacccccgttctcccgcttctcggagctgacgagcgccggcgggaggacggtgtggggtgacccggctgacgtcggcgcggccgtgggaggcgcgtcgttcgacgtcgtcctcgacaacaacggcaaggacctcgacgccgtcaagccggtggcggactgggccaagacggccggcgtggggcagttcctgttcatcagcagcgcgggcatctataagccgacggaggagccgccgcacgtggagggggacgccgtgaaggagagcgccggccacgtgggcgtggagaagtacatcgcggagcagttcggcagctgctgggcgtcgttccggccgcagtacatgatcggctccggcaacaacaaggactgcgaggagtggttcttcgacaggatcgtgcggaaccggccggtgccgatcccggggaacgggatgcagctgaccaacgtggcgcacgtccgggacctgtccagcatgctgtcgctggccgtggagaagcccggcgcggcggccggcagggtcttcaactgcgtgtcggaccgcgccgtgacgctggccggcatggccaagctgtgcgcggcggccgcgggcgccgacgccgtggatatcgtgctctacgaccccgccgccgtcggcgtcgacgccaagaaggccttcccgttccgcaacatgcatttctactcggagccccgggcggcgaaggaggcgctggggtggacgagcaccaccaacctgccggaggacctcaaggagaggtacgccgagtacgccgccagcggccgcggcgacaagcccatggccttcgacctcgacgacgtgatcctcgctgccgtcggcaaggcgccggcgagcgtcgccgtatagtatagtataataacacccggccggcaccgacagcgccgcaccacaccatcgtctatactctatactcccggtggcgtccggtttagagatttctctcgtaaaaactataaaaactacgtacgcccgacatgcacgatgtcgcaaacgaacgttacaaaatacgacaaacatttttttttgttttttcgctttggtttttgtacaaggatgaagagaggaaaacatgtttgtccacgactgatcgactgtttgtttg

SEQ ID NO: 142874 - DNA, 96 bp, Zea Mays
ccctccgccgcctccgtcacgccatcgccgcccttccccgcgcgatccccttccccaatccttgcgccaccaacggcgcccgagcaccagccacca

SEQ ID NO: 142875 - DNA, 312 bp, Zea Mays
atggcgcccaagaagcagcaaggagctccccatggcatacaggagcaggcgcccctacatctccctggcgcaggaaattcccaagtgcaggcgcctaggactcccatggccgccagcctctccattgcagccgagctcccttacttccccagccatggagccgaactccagctccccatctccctgcgtaccggtctactggaggtagaagaagaagcatctcgagtctatgacacgtgggccctagttgctaatctccagtgctccaaatggattgcaatttttacagtagaccctctgtgtgatgcttag

SEQ ID NO: 142876 - DNA, 754 bp, Zea Mays
ttagagcagagctcgtcctcccatgggcgcatcacaatacccagccgccctcctctgcccagcagccgagcgcccagctccctccctggatccatggcgtccaagcccctgtgccctctctcccatggcgtgaggcccctactcccatctctctaccagcgcccagccatggtggtcgccgacctccctgctccctgctgttgctcgccttgcttggatgagaagcagccgagcgccctccctgtccatggcgtggagcagcagctcccattccccggcgacatcctcctcgccgtcgtccatggcgcccctgcgaacctccctgtccatggccacaaatccttgcgcccttcctgcgcagcgccgctgctccacccctcccccagcgccccctctctcccatggccgagcagcagctctgctcgcctccccctccttctttttcccttgcgcagcagcaagaagcccctgctcgcagtcttggcgtccaacttcgctgcgcagcggtgccgatccaaaacagcagccccgaatcccctgcatcgcgtgctcgctcgatctgcgcagccccaacatcgacgccgttcaccccggtgagacgacgatgatctttgtttgattccacatcggcattgttctccggtgattaaattgtgtatatgtgctgttttgttttattttgtggaggcgaggaaccccgtgtgttgcgtggagaaggcaagtcgttcaacgctcgtctatctcggagcgatgc

SEQ ID NO: 142877 - DNA, 240 bp, Zea Mays
atggcgcccaagcagcagcaaggagctccccatggcatacaggagcaggcgcccctacatctccctagcgcagaaaattcccaagtgcaggcgcctaggactcccatggccgccagcctctccattgcagccgagctcccttacttcccctgccatggagccgaactccagctccccatctccctgcgtactggtctactggaggtagaagaagaagcatctcgagtctatgacacgtga

SEQ ID NO: 142878 - DNA, 1030 bp, Zea Mays
ttatctgtaggcggatccctgtgcgtgacatttggtatcagatttaccgatccttggctcttcatctttagctccgcccacttcggtcgattcaacgctgactctcgccctgcaaaaccaaactcgggctcttctggccgagttggatattcgcctccagtcactcgacgggaagtggaaatcacggattagtgccctggagtctcaagcggcgaagacggctcgttccatcgctgatcgggcagccgttcttcgtgccgacatcgaggcccaccttacggcctcatatgtcacgaccgagtctcgactccgatagatcgagatcgacaccggaagccgcctctcggccttggaatccaacatgcagatcttggattattggcgccccaaggttgatgcatcactcgccacgatctactcgtccaccgagtggggtcgcatcgaggcttcccgacgggagagttcgacaccgatcggtggccgcatcggtagcttcagcagcttcggcgcaccgggcatcgtcgacacaccgcctcccttcgatgcgtctggtggatcggtactggggcgacctctgggtcctcgattcagagccgacggccctcgatttgggcactgctctgacaccttcctccgggacagtggaattgggcatcccacccaaattcactgaccggtcacgggtacgtgggatgctccttcttcaccttccttcgcgtttgttcctcctggcgagttagggtcccatggtttacttattcatcatctcgggggtttacctaagctcagttttccttcgtttgatgggacaagtccgaagttatggcagaagcgttgtgaggactactttgatatgtattccatagatgaggtagtttgggtgaaggttgtgacgatgcactttgttggggtcgttggacgatggcttcagtctatcgagcctcgtttgtcctctctgtctaggagacgcttttgtcaggctgtgcatgagcggtttgggcgagaacaacacgagctcgtcattcgcaaa

SEQ ID NO: 142879 - DNA, 1423 bp, Zea Mays
aacaagttaacacgtcccgaattggcattacccatctgaaattatattctggacaacgaagaatttgcagccaagaaacgaaagaatgtcgtcacttgtcacagctcaagtggcgatgaacatcagtactacaatggaacttcaatcatgttgctgctacttctgcactacaccactagaacaagatattagcaagaactttttttgttgttgttggttccatgaagaaaatctgaactatacacagtttgcgttgcgctgcatccggtcgtccccggagtcgccgaaggatctcagaagaaggggaagccgccgtccggctccatcttggcggccatcggcgagacgagcatggagccgtagaaatcggcggcgtcccccggcatctgcaggtcgtcgaggttgatgcccgcgagccagtcgtcgccgccgaggtcgccgaagtcctccacctcctccttgggcaggacgacgccggcaggggctggggctgcgcccatgtcgtcgaacgccggtagagagcccagctccgggaacgggtcgtcgtcgatctccgattccggcgtccgcgtgtcggagtgggagtgcgagagcgacgcctccgactccatcgccttcttctccttctccttctgctgctgcatcttctcccactcgttcttcttgttgtacaggcggcacagcacccagtcatccagctgcaggagaatcaaaatcaatccaacagcaagcaggtcagcaccctggccactccttacgacgaggaaacaaagaccaaggaagaagaagactcgacgcgatgtgctcgccgcttaccctgagcgtgccggcgccggacttcttggcgcgggcgccgccggcttcggcgaggcggtactcgtgcatgatccactccgtcttgaccccgcgcggcggcttgccgtggtagaacacgagcgccttcttgatccccgccgtccggccctcgtgctccacgggcttgtccgcgcccgtggccttccagtagcccgacccggcggcgcggttggggcgggagccgttggggtacttgcggtcccgcggcgtgaagaagtaccactcgcggcgcccgaagagggcgcgctccggcaggtcccaggggtcgaagcggtacaggtcgacctcggcgatgatggacaccggcgggcggcgccccgcggcgcgcgcgcagaggtagtgcgccaccagctcctcgtccgtcgggtggaaccggaagcccgggggcaggttgagctccgcctccgcgtcgcggcgctgctgctgctgctgctgctgcacggccgccatcgctaccattggacgctttactcgctcgctgtggcctgtgggttggttggttggttcggttgttggctggcggctagctgctgcgggaggtgagggaaatggagggagtggagtggtg

SEQ ID NO: 142880 - DNA, 1543 bp, Zea Mays
ggaacctccaccgcggaattaccgaaacgcccctgcgctgttcaactaatacttcccctcccccctggcctcggctcccgtccgttcgtccccaatttccccttcgcctttgtcttcccgctcccgtcccgaaatccgcccgccgattaagcttgcttgccctagcagatcgaagcactagccctagccctagccgaggagcgcgcccatggccgccgcggtcgtgggctgaggggccgcggctctttgcatggggtgaggaagcggcgtcccgaggcgcgggaatggaccctagcctgaaggaggaggtgatgaaggcggtggaggaggcgaggtccgcgtcggtgccgcggtgccgggtggtgcgcatcatcgtgcacgacgaggacgccaccgactcgtcctccagcgaggacgaggacgaggacgaggcgggggagcgcgcctcgccgcatccgggctcgccgtcggcgtcggcgtcggcggggagcgtgaagcgcagccgcgtgctgctccagtccgccgggtgcggcgcggaggaggacgaggaggaggaggagggggagggggcgaggttcacgggcgtgcggcggcgcccgtggggccggtgggcggcggagattcgcgacccgatgctccgccgccgcgtctggctcggtaccttcgacaccgccgaggaggccgccgcggcctacgtcgccgcgcgcctccgcatccgcgggcccaaggcgtccgggagcaacctgctcccgtccggtgctcacgccgccggctcgctccctccgcccgcgcaccgcccgcccctgcccccccgccccccgccaccgcctcagcgggagaagcagcagtgcccgccaccgcctctgctcccgccgaagaagcagcagtacccgccaccgcctctgctcccgccgaagaagcagctgtacccgccaccgcttcccctcccgccgaagaagcagcagcaccatcacccgccaccgcctctgcccacacttccgccgaagaagcggctggcgtcaccgcctctgctgcccggaagcgagaagcagtgggtcatctcctccccgtcggagccgcggttcgtcccgctgccggtgtgggctctgatgtccggctccgggaagcgcaagaagcggtcaggctgcggcgggcgcgtccccgccctccacaccccagccgccgccgaggagacagggcgcgcctgagaggccgagacgatagacgacaccatccctgctactggtatccatcccctgctccttgatcatgccaatctgatgaccgctcggtcgatcgatgctaatgtgaagagcctgtaacctctctgtctctctctctctctctctctctctgattcatgcaactgatgatttgtgtacatatgctgctggtgctggagccgcagcaggtgatgaactgatctgtgaaacctgatgaactattcatgtgtaataaataagtatctgttgacatttttcgacccgaacaaaacaaggttgttgttggcttgttgctgtggagatcgcaagattgttgttcc

SEQ ID NO: 142881 - DNA, 1450 bp, Zea Mays
cccgtccgttcgtccccaatttccccttcgcctttgtcttcccgctcccgtcccgaaatccgcccgccgattaagcttgcttgccctagcagatcgaagcactagccctagccctagccgaggagcgcgcccatggccgccgcggtcgtgggctgaggggccgcggctctttgcatggggtgaggaagcggcgtcccgaggcgcgggaatggaccctagcctgaaggaggaggtgatgaaggcggtggaggaggcgaggtccgcgtcggtgccgcggtgccgggtggtgcgcatcatcgtgcacgacgaggacgccaccgactcgtcctccagcgaggacgaggacgaggacgaggcgggggagcgcgcctcgccgcatccgggctcgccgtcggcgtcggcgtcggcggggagcgtgaagcgcagccgcgtgctgctccagtccgccgggtgcggcgcggaggaggacgaggaggaggaggagggggagggggcgaggttcacgggcgtgcggcggcgcccgtggggccggtgggcggcggagattcgcgacccgatgctccgccgccgcgtctggctcggtaccttcgacaccgccgaggaggccgccgcggcctacgtcgccgcgcgcctccgcatccgcgggcccaaggcgtccgggagcaacctgctcccgtccggtgctcacgccgccggctcgctccctccgcccgcgcaccgcccgcccctgcccccccgccccccgccaccgcctcagcgggagaagcagcagtgcccgccaccgcctctgctcccgccgaagaagcagcagtacccgccaccgcctctgctcccgccgaagaagcagctgtacccgccaccgcttcccctcccgccgaagaagcagcagcaccatcacccgccaccgcctctgcccacacttccgccgaagaagcggctggcgtcaccgcctctgctgcccggaagcgagaagcagtgggtcatctcctccccgtcggagccgcggttcgtcccgctgccggtgtgggctctgatgtccggctccgggaagcgcaagaagcggtcaggctgcggcgggcgcgtccccgccctccacaccccagccgccgccgaggagacagggcgcgcctgagaggccgagacgatagacgacaccatccctgctactggtatccatcccctgctccttgatcatgccaatctgatgaccgctcggtcgatcgatgctaatgtgaagagcctgtaacctctctgtctctctctctctctctctctctctgattcatgcaactgatgatttgtgtacatatgctgctggtgctggagccgcagcaggtgatgaactgatctgtgaaacctgatgaactattcatgtgtaataaataagtatctgttgacatttttcgacccgaacaaaacaaggttgttgttggcttgttgctgtggagat

SEQ ID NO: 142882 - DNA, 1189 bp, Zea Mays
ccctatagtttttacattggttgattatcagtcggttacattgtaaatgtgatagaacatgaatcacatcacacaactaaggccgtgtttggtatggctctgtcactctatagtagctctactaaaaaaccttgggtggagctgctctactccagggttaaccagtggtgggtcaataactctaaactgcatgtctaggttgattttttaagatttcggagcagcaaaagaggtactccaaaactgttgtactgcagctttgaaaactccatggagtttgcaactctagagttagggtgtttggcatactctggccagcttctttttggagttttgctctgaagccataccaaacacgccctaagggtgaacttttacctccttatacacaaaagttccaaacattctaggttgattacagtatcattatagtttgtgattggaacttttgcataataattgtactaattaacacttctcagggattgttggtcgaatatctccaagaacttgggcagctatggaggtctttttggcttcttttgcaactgaggattatgatgctatggcctctgccctctctgaaatgggtgctacagggaatgatataaatactaatgaatttgcaaaggacctgcgaaagatattctcatcgatacaggacctggatactgaaatcatagtggcaacagcaaggacccctgatgctacagcagtatctgctaatgttgtccttgatgagaggcagatgaatgctctttttcttgatctggtcagggtgagcgagtcttacgggctgaaatttcctcgggagtttgctcttctcatgaagcagctgctgtattttgatcgctacacaagactgctggctcccagcatgaacatgctgcgagacgagaggatcaacatctccaccaatcgacaaccaagaagaactgatagatttcagtgaagccacgtcgttagtcaccggccacgtactagaggagtcgtgatgggcgataatagcaagctcatgtgacccaatactgtatatagttttgccagaccagcatagaaatgaaccacacgctagaaattgtacactccgtcgtattctgggattgagcgttatatcgtactagtaggtaacatgtaaaggctgtatcccacgaccaaagtaaatttcagatgaactgcttttgtctca

SEQ ID NO: 142883 - DNA, 1638 bp, Zea Mays
cttatccagacatcgattagcacagggcctcgaggtgctttcaggatggcccaagggatccaagctgtgcttggggttggtggggagtggctgaatgacctctcaaagacagccaacacatcagcaggaattccatctcagatgcagcttggtttgctttctccactttaccttcgaaggctttttgagcgcatgggtgccacttatatcaagttaggccagtttgtagcatctgcgccaactttgtttcctgcagaatatgttgaggaattccagaaatgctttgaccaagcaccagctgtcccatatgacgtgattgaatcaatattacgtgaggagctgcagcggccattagatagtgtgtatgaatacattgatccggtgccaatagcctctgcctcaatagcacaggttcatggggctaggttgaagagctctcagaaagatgtggtgattaaagttctaaagcctggtattgaagatactttggttgctgatctgaattttatctatgttgttgcacgtgttttagagttcttgaaccctgaactacaaaggacatcactggtaggcattgtaaaggatataaaggaatcaatgcttgaggaagttgactttagaaaagaggctgcaaatattcaggcatttcagggatacattgatgcaatggggtttgacaggcaggcaaaagccccatttgtgtatcagcactgtagtacaaaacgtgtattgactatggaaagattgtatggagttccgcttactgatcttgattctataagatctcttgttcctgatcctgagttgactttagtcactgcccttaatgtctggtttggaagcttaatttcatgtgaatccttccatgctgatgtacatgctggaaacctatggttgctccgtgatgggcgaattggttttattgattttgggattgttggtcgaatatctccaagaacttgggcagctatggaggtctttttggcttcttttgcaactgaggattatgatgctatggcctctgccctctctgaaatgggtgctacagggaatgatataaatactaatgaatttgcaaaggacctgcgaaagatattctcatcgatacaggacctggatactgaaatcatagtggcaacagcaaggacccctgatgctacagcagtatctgctaatgttgtccttgatgagaggcagatgaatgctctttttcttgatctggtcagggtgagcgagtcttacgggctgaaatttcctcgggagtttgctcttctcatgaagcagctgctgtattttgatcgctacacaagactgctggctcccagcatgaacatgctgcgagacgagaggatcaacatctccaccaatcgacaaccaagaagaactgatagatttcagtgaagccacgtcgttagtcaccggccacgtactagaggagtcgtgatgggcgataatagcaagctcatgtgacccaatactgtatatagttttgccagaccagcatagaaatgaaccacacgctagaaattgtacactccgtcgtattctgggattgagcgttatatcgtactagtaggtaacatgtaaaggctgtatcccacgaccaaagtaaatttcagatgaactgcttttgtctca

SEQ ID NO: 142884 - DNA, 1611 bp, Zea Mays
gccgagtggaatgaagaaagagtgagaagcagcacaaggcgggaagccgggaacggataagataacaatcaacaaacaacaagcccgcgcgagactgttctttctccatttcccaatggccgccgccgccgccgtcttctttccctccaccccgaatcctcggcaccgcctcgccgccgccgcccgccgccctccacccagcttcaccggcgccaccgacgccgtgccgctaccggaggacgaggactccagcgacgacgatgccgacgacgacggcgcgccacgcaggagcgggcgcagggaccggcgccgcgcggtgcgcgtcgcgtgggagaagctagtccggtggtcccgctcctggcgccgccgcaaccgcagcgacgtcctcgagaccacgcgcaaggtggtggttctcgggggcgggtcgttcgggacggccatggccgctcacgtggcggccaagaaggccgatctcgaggtggccatgctgctcagggacgaccacatctgccggtccatcaacaacgcacatgtcaattgcaagtacttatcagaacacagattgccagaaaatatcgtcgcaacaactagtgctgctgatgctttagcaggagctgatttctgcttccatgctgttccggttcagttcatcctttcttgaaagtatttcaacacatgttgatccaaagttgccattcatatcacttagcaaagggctggaactcaatacccttcggacaatgtctacaatcatcccacgagcattgggaaatcgccgccaaccgtttgttgttctgtcaggaccatcatttgctgtagagttaatgaacaaattgcctacagcaatggtggtggcatccaaagacaacaagttggcaagttctgttcaacaactgttagcatccccaaatttgaggataagcacatcaagctgcaggtatagtggaaggcatgagtctcgggaacaactgtatggctgcccttgttgcccaaggctgttcagagatacggtggttggcgacgaagatgggagcaaagccaaccactctttctggcttgtctgggtccggtgacatcatgctcacatgcttcgtcaacctttcgcggaatagaacagtgggactacgcctcggttctggtgaaaagcttgacagaatcatgggttctatgaatcaggttgctgaaggcgtatcaactgctggggctgtcattgcgttggcgcagaagtacaaggtcaaaatgccggtattgacagcggtggcacggataattgataatgagttaactccaactaaggcggttttggagttaatgaatcttccccaggttgaggaagtctgacgaggctagcaacggagttctgcatttttccacttggctccgagtgtagcttgggcccatggccgaccgtatgaaaaatctgccaaagaccgttacttttttttgggtagcattacattattaatgaaaaaatgatatccagtaacggtggtatttagcatttcctaaatttcgaaacacattttcctgtccttgtacaccggcaaaaacttcacgatgacgtttcttttgaaagaggaaactgttctcaagctctggcatttaaattgg

SEQ ID NO: 142885 - DNA, 2330 bp, Zea Mays
gccgagtggaatgaagaaagagtgagaagcagcacaaggcgggaagccgggaacggataagataacaatcaacaaacaacaagcccgcgcgagactgttctttctccatttcccaatggccgccgccgccgccgtcttctttccctccaccccgaatcctcggcaccgcctcgccgccgccgcccgccgccctccacccagcttcaccggcgccaccgacgccgtgccgctaccggaggacgaggactccagcgacgacgatgccgacgacgacggcgcgccacgcaggagcgggcgcagggaccggcgccgcgcggtgcgcgtcgcgtgggagaagctagtccggtggtcccgctcctggcgccgccgcaaccgcagcgacgtcctcgagaccacgcgcaaggtggtggttctcgggggcgggtcgttcgggacggccatggccgctcacgtggcggccaagaaggccgatctcgaggtggccatgctgctcagggacgaccacatctgccggtccatcaacaacgcacatgtcaattgcaagtacttatcagaacacagattgccagaaaatatcgtcgcaacaactagtgctgctgatgctttagcaggagctgatttctgcttccatgctgttccggttcagttcatcctttcttgaaagtatttcaacacatgttgatccaaagttgccattcatatcacttagcaaagggctggaactcaatacccttcggacaatgtctacaatcatcccacgagcattgggaaatcgccgccaaccgtttgttgttctgtcaggaccatcatttgctgtagagttaatgaacaaattgcctacagcaatggtggtggcatccaaagacaacaagttggcaagttctgttcaacaactgttagcatccccaaatttgaggataagcacatcaaggtaaaattgcctagctccatgagttcatcacagaagatacaacaagctacaactgcacgaatgcaaaaatgcatgccatgtaggctcgtatttactaaaactgagaaagaagatgaggtggaagatgcgtgaacgaaatgaaacacagatttttttgctcttcttactatttggttttttatgtatgagaaagagagaaaatttcttacagtttatattcaggggcatgacaatagtttctgaactattaagacaagggaaaagtgactgtgttactacctgaatattccagaacattcaataatttgcaactagtacgttcaacagctaagcataagaaataggtttccttgtttcaaattagttactaccacgcagttcaatactagtcttaggagcaatatcttgggaatttctgttgcttgagaaacttttgtccagctaaaactagcccaactaataggctatacataatatatcataccaacataaagaagtgtgatgaacgtttcttccactgttaactatttatgattttgtacacattaggatttaggaggtaggttagtagagattattttgatcatgacagttttgtacttcagcgacctgtgatactgagaaaacaataggcgaatattttgaatgtgacctatgatacttcagtgatgttacaggagtagaaatcgcaggtgccctgaagaacgttcttgcaatagctgcaggtatagtggaaggcatgagtctcgggaacaactgtatggctgcccttgttgcccaaggctgttcagagatacggtggttggcgacgaagatgggagcaaagccaaccactctttctggcttgtctgggtccggtgacatcatgctcacatgcttcgtcaacctttcgcggaatagaacagtgggactacgcctcggttctggtgaaaagcttgacagaatcatgggttctatgaatcaggttgctgaaggcgtatcaactgctggggctgtcattgcgttggcgcagaagtacaaggtcaaaatgccggtattgacagcggtggcacggataattgataatgagttaactccaactaaggcggttttggagttaatgaatcttccccaggttgaggaagtctgacgaggctagcaacggagttctgcatttttccacttggctccgagtgtagcttgggcccatggccgaccgtatgaaaaatctgccaaagaccgttacttttttttgggtagcattacattattaatgaaaaaatgatatccagtaacggtggtatttagcatttcctaaatttcgaaacacattttcctgtccttgtacaccggcaaaaacttcacgatgacgtttcttttgaaagaggaaactgttctcaagctctggcatttaaattgg

SEQ ID NO: 142886 - DNA, 1664 bp, Zea Mays
gccgagtggaatgaagaaagagtgagaagcagcacaaggcgggaagccgggaacggataagataacaatcaacaaacaacaagcccgcgcgagactgttctttctccatttcccaatggccgccgccgccgccgtcttctttccctccaccccgaatcctcggcaccgcctcgccgccgccgcccgccgccctccacccagcttcaccggcgccaccgacgccgtgccgctaccggaggacgaggactccagcgacgacgatgccgacgacgacggcgcgccacgcaggagcgggcgcagggaccggcgccgcgcggtgcgcgtcgcgtgggagaagctagtccggtggtcccgctcctggcgccgccgcaaccgcagcgacgtcctcgagaccacgcgcaaggtggtggttctcgggggcgggtcgttcgggacggccatggccgctcacgtggcggccaagaaggccgatctcgaggtggccatgctgctcagggacgaccacatctgccggtccatcaacaacgcacatgtcaattgcaagtacttatcagaacacagattgccagaaaatatcgtcgcaacaactagtgctgctgatgctttagcaggagctgatttctgcttccatgctgttccggttcagttcatcctttcttgaaagtatttcaacacatgttgatccaaagttgccattcatatcacttagcaaagggctggaactcaatacccttcggacaatgtctacaatcatcccacgagcattgggaaatcgccgccaaccgtttgttgttctgtcaggaccatcatttgctgtagagttaatgaacaaattgcctacagcaatggtggtggcatccaaagacaacaagttggcaagttctgttcaacaactgttagcatccccaaatttgaggataagcacatcaagtgatgttacaggagtagaaatcgcaggtgccctgaagaacgttcttgcaatagctgcaggtatagtggaaggcatgagtctcgggaacaactgtatggctgcccttgttgcccaaggctgttcagagatacggtggttggcgacgaagatgggagcaaagccaaccactctttctggcttgtctgggtccggtgacatcatgctcacatgcttcgtcaacctttcgcggaatagaacagtgggactacgcctcggttctggtgaaaagcttgacagaatcatgggttctatgaatcaggttgctgaaggcgtatcaactgctggggctgtcattgcgttggcgcagaagtacaaggtcaaaatgccggtattgacagcggtggcacggataattgataatgagttaactccaactaaggcggttttggagttaatgaatcttccccaggttgaggaagtctgacgaggctagcaacggagttctgcatttttccacttggctccgagtgtagcttgggcccatggccgaccgtatgaaaaatctgccaaagaccgttacttttttttgggtagcattacattattaatgaaaaaatgatatccagtaacggtggtatttagcatttcctaaatttcgaaacacattttcctgtccttgtacaccggcaaaaacttcacgatgacgtttcttttgaaagaggaaactgttctcaagctctggcatttaaattgg

SEQ ID NO: 142887 - DNA, 996 bp, Zea Mays
gctatatttagatatccagttagagaagctattggacggtgtatttcttcaccacaatctgtgttccttctaaggctgtctccactagcctccctataccactccctttttcaaactctactctgcaagcagtgcagtctacagtgcaaaatgatgttctgcatggccatatgcacgctcttctgagcacggcctaaggatatataatctcttggagttgctttaaatgtcaagcctttacattttctttttagtcctttaagacatgtttcaattttctagagcatgccattttccactatgctgtgcagtatgaacttgcaccttgatcataacagcctccacttatgcccccttgcagctttgcaagattgactctgagggcaaggcaaggaaggttgtaggctgctcctgcgtcgtcgtcaaggactacggtgaagaatctgagggccttaacatagtgcaggagtatgtcaagtcgcactagatgtgtgacatgtttcagtgatactcttgatttggacctgggcttaaaattatgcttttgcatctggggcttgcctaggagattagaacattttactagaagagccgaagaggatatgtatgaacaatttggacatctgaattttttttgtttatggtgctgtcgtctggttttaatgcaaatcatgaagagccgagtttattcttgatttgtgtttacctttttactcatgtttctatacccatatcccattggcttatggaaatctgttttgtgccgtgtggcaaatcaaatcatacttgaactgcaatttcctgaaactggaggatgaaagcagaaggaaactgtcggagtcgccagacagtgtaacatgcgatagtagagtagcattttttttgttttttttttttttttgctgcttgcctgagcctgaccatacttgccgcacccgcactacatgttagccattttcagccgattcttagaaattgaagacaattaaacaagct

SEQ ID NO: 142888 - DNA, 1168 bp, Zea Mays
ctggctcgacgagccggcagcccggcacttataattccgccttctcccacctgtctcacaccctctagccaaaaccctagcagccgcccggtgctccctctctgcaggtggcggcgcgctcccctcgcctcgtttgttcttcctcccgtctccctcactaatcgctactgacttttctcttgcctgatccagatctcccttcgcagccgccgaggaaccccttcacagcgcggaagatggctgaacaggaggccccagtcgcggttgaggcaccaaccccagttcttggggagcctatggacttgatgactgctctgcagctcgtgatgaagaagtcaagtgctcatgacggtcttgtgaagggtctccgtgaggctgccaaggccatcgagaagcacgccgctcagctttgcgtgcttgctgaggactgtgaccagccagattacgtcaagttggtgaaggcactctgcgctgagcacaatgttcacctggtcactgttcctgccgctaagactcttggcgagtgggccgggctttgcaagattgactctgagggcaaggcaaggaaggttgtaggctgctcctgcgtcgtcgtcaaggactacggtgaagaatctgagggccttaacatagtgcaggagtatgtcaagtcgcactagatgtgtgacatgtttcagtgatactcttgatttggacctgggcttaaaattatgcttttgcatctggggcttgcctaggagattagaacattttactagaagagccgaagaggatatgtatgaacaatttggacatctgaattttttttgtttatggtgctgtcgtctggttttaatgcaaatcatgaagagccgagtttattcttgatttgtgtttacctttttactcatgtttctatacccatatcccattggcttatggaaatctgttttgtgccgtgtggcaaatcaaatcatacttgaactgcaatttcctgaaactggaggatgaaagcagaaggaaactgtcggagtcgccagacagtgtaacatgcgatagtagagtagcattttttttgttttttttttttttttgctgcttgcctgagcctgaccatacttgccgcacccgcactacatgttagccattttcagccgattcttagaaattgaagacaattaaacaagct

SEQ ID NO: 142889 - DNA, 1162 bp, Zea Mays
ctggctcgacgagccggcagcccggcacttataattccgccttctcccacctgtctcacaccctctagccaaaaccctagcagccgcccggtgctccctctctgcagatctcccttcgcagccgccgaggaaccccttcacagcgcggaagatggctgaacaggaggccccagtcgcggttgaggcaccaaccccagttcttggggagcctatggacttgatgactgctctgcagctcgtgatgaagaagtcaagtgctcatgacggtcttgtgaagggtctccgtgaggctgccaaggccatcgagaagcacgccgctcagctttgcgtgcttgctgaggactgtgaccagccagattacgtcaagttggtgaaggcactctgcgctgagcacaatgttcacctggtcactgttcctgccgctaagactcttggcgagtgggccgggagcatgccattttccactatgctgtgcagtatgaacttgcaccttgatcataacagcctccacttatgcccccttgcagctttgcaagattgactctgagggcaaggcaaggaaggttgtaggctgctcctgcgtcgtcgtcaaggactacggtgaagaatctgagggccttaacatagtgcaggagtatgtcaagtcgcactagatgtgtgacatgtttcagtgatactcttgatttggacctgggcttaaaattatgcttttgcatctggggcttgcctaggagattagaacattttactagaagagccgaagaggatatgtatgaacaatttggacatctgaattttttttgtttatggtgctgtcgtctggttttaatgcaaatcatgaagagccgagtttattcttgatttgtgtttacctttttactcatgtttctatacccatatcccattggcttatggaaatctgttttgtgccgtgtggcaaatcaaatcatacttgaactgcaatttcctgaaactggaggatgaaagcagaaggaaactgtcggagtcgccagacagtgtaacatgcgatagtagagtagcattttttttgttttttttttttttttgctgcttgcctgagcctgaccatacttgccgcacccgcactacatgttagccattttcagccgattcttagaaattgaagacaattaaacaagct

SEQ ID NO: 142890 - DNA, 1093 bp, Zea Mays
ctggctcgacgagccggcagcccggcacttataattccgccttctcccacctgtctcacaccctctagccaaaaccctagcagccgcccggtgctccctctctgcaggtggcggcgcgctcccctcgcctcccgccgaggaaccccttcacagcgcggaagatggctgaacaggaggccccagtcgcggttgaggcaccaaccccagttcttggggagcctatggacttgatgactgctctgcagctcgtgatgaagaagtcaagtgctcatgacggtcttgtgaagggtctccgtgaggctgccaaggccatcgagaagcacgccgctcagctttgcgtgcttgctgaggactgtgaccagccagattacgtcaagttggtgaaggcactctgcgctgagcacaatgttcacctggtcactgttcctgccgctaagactcttggcgagtgggccgggctttgcaagattgactctgagggcaaggcaaggaaggttgtaggctgctcctgcgtcgtcgtcaaggactacggtgaagaatctgagggccttaacatagtgcaggagtatgtcaagtcgcactagatgtgtgacatgtttcagtgatactcttgatttggacctgggcttaaaattatgcttttgcatctggggcttgcctaggagattagaacattttactagaagagccgaagaggatatgtatgaacaatttggacatctgaattttttttgtttatggtgctgtcgtctggttttaatgcaaatcatgaagagccgagtttattcttgatttgtgtttacctttttactcatgtttctatacccatatcccattggcttatggaaatctgttttgtgccgtgtggcaaatcaaatcatacttgaactgcaatttcctgaaactggaggatgaaagcagaaggaaactgtcggagtcgccagacagtgtaacatgcgatagtagagtagcattttttttgttttttttttttttttgctgcttgcctgagcctgaccatacttgccgcacccgcactacatgttagccattttcagccgattcttagaaattgaagacaattaaacaagct

SEQ ID NO: 142891 - DNA, 1083 bp, Zea Mays
ctggctcgacgagccggcagcccggcacttataattccgccttctcccacctgtctcacaccctctagccaaaaccctagcagccgcccggtgctccctctctgcagatctcccttcgcagccgccgaggaaccccttcacagcgcggaagatggctgaacaggaggccccagtcgcggttgaggcaccaaccccagttcttggggagcctatggacttgatgactgctctgcagctcgtgatgaagaagtcaagtgctcatgacggtcttgtgaagggtctccgtgaggctgccaaggccatcgagaagcacgccgctcagctttgcgtgcttgctgaggactgtgaccagccagattacgtcaagttggtgaaggcactctgcgctgagcacaatgttcacctggtcactgttcctgccgctaagactcttggcgagtgggccgggctttgcaagattgactctgagggcaaggcaaggaaggttgtaggctgctcctgcgtcgtcgtcaaggactacggtgaagaatctgagggccttaacatagtgcaggagtatgtcaagtcgcactagatgtgtgacatgtttcagtgatactcttgatttggacctgggcttaaaattatgcttttgcatctggggcttgcctaggagattagaacattttactagaagagccgaagaggatatgtatgaacaatttggacatctgaattttttttgtttatggtgctgtcgtctggttttaatgcaaatcatgaagagccgagtttattcttgatttgtgtttacctttttactcatgtttctatacccatatcccattggcttatggaaatctgttttgtgccgtgtggcaaatcaaatcatacttgaactgcaatttcctgaaactggaggatgaaagcagaaggaaactgtcggagtcgccagacagtgtaacatgcgatagtagagtagcattttttttgttttttttttttttttgctgcttgcctgagcctgaccatacttgccgcacccgcactacatgttagccattttcagccgattcttagaaattgaagacaattaaacaagct

SEQ ID NO: 142892 - DNA, 1715 bp, Zea Mays
gcattcccaacggtcaaatcatccccgtctctctcttgaaaaaaaatctcccggaaccaatcacaatcacaaacgcaggcgcagggaggcgagtgcgggcatggccaggaggggagcggcggcgaagggaacctggaggccgaggaggaaaccctcgcgcgcgcaagcggatgtcgacggcgacgcggtacaccgcggcgccgaaggcgggcgccctccgccaaagggacacacaactgccaccggcagcggcgggtttttctgctgctacctgctccggtccctctgcccgcgcagcaagggccgcacctacatcggcttcacggtgaacccgcgccgccggatccggcaacacaacggcgagatcgtcagcggcgcgtggcggacccggcgcggccggccctgggagatggtgctctgcatctacggcttcccctccaacgtcgccgccctccagttcgagtgggcgtggcagcacccgacggagtccctcgccgtgcgcaaggccgccgccgagttcaagtcgctcggcggcatcggcaacaaggtcaagcttgcgtacaccatgctcaacctcccctcatgggaaagtctgaacctgacggtgaacttcttctcctcgaagaacaccaagttcaccaccggctgcccgtcgctgccgagccagatgaaggctgtcgtgtgcggtatggaggatctgcagtgccagcccgacggcccgtcatccgaggaggatgacaatgacatccgcgacgagtcccaagataatggggaagaaccgcctgactcgcctatccgagatggattttcatattctgactactgtttccagcaaccgtcctctgatcaagcgcagccgatggacgagcaaaccataagtgcaggttctggtgtcgaggatgactttgttgacgagttcgcttcttcgatggaaaggagcgaaatccttggcacaagaagaggactgaacggaccaagaacatcgcctctatgttccttgggcgcgtgcagcaacgatgacggattggaagaagaggcaggactgatgtctccattattgatgcccaatgctagctcagatgctggtgacggccgccatatcctcaacggaaaccacgtggtggacttggttaccccgactccactaggccggctccggagaagagactgtatttccagcatctgtccaaagatcattgatctgacgtcctcgcctattgtcattcagttgtagtgtcttgtattagactgacttcatcaggtcctctaaacgatcatgtactctaaattatagaggacaccatcatcctctacttcatccagcagtattctttaaactgtcctctaaatttagaggacactgctagatcatcgatatatatagtttctctattctctcctgtatccatttgaatactttaaacaactagtttagcaaaattaaaatatgtacaatacatttgagagtatgacaaatacgtatgtacaaaaaataaaaaatgtctctaatataattatttgtgtatagataatgtgatttagaggattttgttggaaaggaatgagatatagataatgaaatcttttggaggagactgaaaataacagatatagatgatatatatagaggacgttgctggagacagtcttagcgacacttttcagtgtcataccatgtataagttaaagagtataagacagataaacataggaac

SEQ ID NO: 142893 - DNA, 981 bp, Zea Mays
ctcaagaacgggcgtgaagaagtagatgtcgccgagccggtcgttcgtcggcgagttgccgccatacaccagcagccctcgctggccgtccttctcccccgccgtgaacgcacaccacccgcgaggccccgggtggtgctcggcctccgccctgtcgtccagccgcgtccacgcgccggtctccgtgtccagcgcgaacgcctcggccgagaacttgccggcgccgaggtggccgaggtcactggggtccacctcgccgccgaacagcaccacgtgcctcccgaacccggcggcgcagaacacgctccgggggctgggcctgtcgcccgtggtctggaccgcggcccactcccgggtggccgggtcgtagcagtgcacgtcgtccagctcctcgcccgagaacccgtacaccacccacaccttcccgccggcgacgaccagcccgggcccgccgcgcggctggcacgcctcccccggcggcggcagctgctcccattgccccgccgccacgtcgtacgcccacaggtcgttgaggcggccggcgtcgccgcacccgccgaacacgtacacccgccccgcgcccgcgtccgccgccatggagtggtagctgcggtgcggcgggccgtcggcgccggacgacagcagcgtccacgcccgcgtcgccgcgtcgaaggcgtagagctcgttcagctccttgtgctccaggtcgcgcccgccgaacgtgaacaccgtgccgcccgcggccgccatggtcacgcccacgcgcggcggcggcacgtcgcccgtcgcgtccagcgccgaccacgtctgggtgttgaggtcgaaggcgtacatggtgctgtcaaccgggacgcgcggggtgagctcgccgccgaacgagtaggccgtgcccccgagcagcgtgatggcgtgggagctccgtgctcccggaccggcgcccttctgctccatctgggtgaaaagcattgaaattgcaagcat

SEQ ID NO: 142894 - DNA, 993 bp, Zea Mays
gtaatactgtgcattccttcttggcgtgttgcgtgtagcatagcataggagcgttgtgtatcagcaagaagacgacccttggtacttggtaatagatggcagcacctccgtccatgccggcgccgccgccgccggagccaagcggaggcatcgtatcccccgtggcggtggtggcctcgcatttctgcgcgccctacgtggtgcagctggcggtgaaggagaagaaggtgagcctccgggaaggcgacttcaccatcaccgacaccaacggcgccgtcgtggtcacggtcaagggtgccttgatcagcatccacaaccgccgccgcctcctcgacgccgccggcaaccccctcctctgcctgcgcgagaaggtaatcagcatgcacaacacgtgggaagcgtacagaggggacagcacgagatcgagcgacctgctcttcaccgccaagaaatcctccatcatccagccgttcaagaccgagatgctcatctacctggcctccaacacctcgcacgaggcctgcgacttcatcatgaagggcagcttcaaggagaggtcctgctctttctacctcggcggcaacaactccaacgccttgatcgctaaaatgcaccgcgagcacagcgccacgagcatgttgctgggaaaggactacttcagcctcaccgtgttcccgaacgtcgactacgtgttcatctcggcgcttgtggtcatcctgcaggaaattcacacggacaaaaatgactgaatgcacaccacaggtgtcatacatatggtcatccttctgttctccctagtgtaaccttatataataatcttatgtatattgaggattgcatatatagagacttcaaagcttcttcacttcaaagctccctagtgtaaccttaataatcttacgccccgtttggatcactggaattgaattccattctaataatagtaatttaggcatatatcaattaagctaattcacttgtatacaaaatata

SEQ ID NO: 142895 - DNA, 282 bp, Zea Mays
ctatccacttgctgaataggcactcgagcaaactcctcttccacaaccacttcgtcttgaatttacactccttctgctcggagctcgagcagggctggcatgcggctgagagcccacgcttgcgtttgttcttttgcgcaaaggacccacgtgcctggaataatccaacggaacccaggccactattgccctattccactgacagaagcacttaagttcttcggtttatctccttttacaaacgctcggccacaacactccgccgtccactctggcgagccg

SEQ ID NO: 142896 - DNA, 1725 bp, Zea Mays
acttcccccacgcgccacgtttccgcgcatcccgagactccgagagagtggctggcggaacggaacacaaatccaatctcgctacgtgaagttcgcctcgcggcctcgcctaccaccacccgtgcccgtgtcccgccgccggcggcgctggggatggcggggcccaaggcggctgaggacggctcggcggctccgctgctgcctgcgcaggcgggggaacggagctcaggaggcgtgggcggaggggccacgtccgcgcagacgctggggaacgtggttgtctccatcgtgggcaccggtgtgctcggcctcccctacgccttccgcgcggccggctgggtcgcgggctccatcggcgtcgccgccgccggctccgccacgctctactgcatgttgctactcgtggactgcagggataaactcaaagaggaagaaactgaagagtgctgtcatggtcactatacatatggggatttgggtgacaggtgcttcgggactataggccgatgcttgacagagaccctcgtccttgtttcgcagatagcgctctccttcatccgctcactgtcgtccctttctccgttcagtatatttgcagacgtgtgcaatgtccttgccatggcaatcgttatcaaagaggatcttcagctctttgaccaccccttttcaaacagaagcgcttttaatggactgtgggcagtaccattcaccttcggtgttgcagtcttctgtttcgaaggattcagcatgacccttgcactagaagcgtcgatggcagaccggagaaagttccgctcggtgctttcccaagcagttgccgccattatagccgtgtatgtctgttttggagtttgtgggtacttggcctatggcgaggccaccaaagacatcataacacttaatcttccgaacaattggtcgtctgctgcagttaaggttggcctatgcatcgcactggcattcaccttcccagtcatgatgcacccgatccatgagatcgtcgagacaaggttcagatccaacagatgctttcggaagctcagccacaacgatggcggcgcggagtggataggcttgcacgcaagccgcgtcctcgtggtggcggtcctcactgtggtggcgtccttcatccccttctttgggtccttcatctcgttcgtcgggagcaccatgtgcgcgcttctctcctttgtgctgccggctctcttccatctcagcattgtaggctcgtcaatacccttgtggaggcgggtgctggactacggcatccttctctttggtctggctttcgctggatatggtcttgtcactgctctctcctcgcattgaacaatggcccaaacagtcaaaaaagtgcagagatcaggatatcttgtgatgacaggagtcaaatggatgctaggagcaccatatatcagatagcacggctcggattagtgcgtgattgaactgatccgcttcaacccatatagccgcagtcatccatggaagatataccttagcggattggaatggtgatttcgagaaaccaagttgacattgttctatgcatgttacaaaaatctacagatgtcatgaactttaagagccatatcttaatcgcgtatgcatgttacacatctacatgtgtcacgtttcaaaaaaaaagtttatgttgactattcgatccgatccatcatgtatgtcacatttgaataacaaaaatccattaatgtgtatgtttgc

SEQ ID NO: 142897 - DNA, 1883 bp, Zea Mays
caaacctcaccggcggcggtcattgaccgcaactggttgccgtgtttacttcccccacgcgccacgtttccgcgcatcccgagactccgagagagtggctggcggaacggaacacaaatccaatctcgctacgtgaagttcgcctcgcggcctcgcctaccaccacccgtgcccgtgtcccgccgccggcggcgctggggatggcggggcccaaggcggctgaggacggctcggcggctccgctgctgcctgcgcaggcgggggaacggagctcaggaggcgtgggcggaggggccacgtccgcgcagacgctggggaacgtggttgtctccatcgtgggcaccggtgtgctcggcctcccctacgccttccgcgcggccggctgggtcgcgggctccatcggcgtcgccgccgccggctccgccacgctctactgcatgttgctactcgtggactgcagggataaactcaaagaggaagaaactgaagagtgctgtcatggtcactatacatatggggatttgggtgacaggtgcttcgggactataggccgatgcttgacagagaccctcgtccttgtttcgcaggctggtggttctgtagcatacctgatattcattggccaaaatctccattccacattcagccagctgatgtcaccagctggcttcatctttgccatcctcctgcctctgcagatagcgctctccttcatccgctcactgtcgtccctttctccgttcagtatatttgcagacgtgtgcaatgtccttgccatggcaatcgttatcaaagaggatcttcagctctttgaccaccccttttcaaacagaagcgcttttaatggactgtgggcagtaccattcaccttcggtgttgcagtcttctgtttcgaaggattcagcatgacccttgcactagaagcgtcgatggcagaccggagaaagttccgctcggtgctttcccaagcagttgccgccattatagccgtgtatgtctgttttggagtttgtgggtacttggcctatggcgaggccaccaaagacatcataacacttaatcttccgaacaattggtcgtctgctgcagttaaggttggcctatgcatcgcactggcattcaccttcccagtcatgatgcacccgatccatgagatcgtcgagacaaggttcagatccaacagatgctttcggaagctcagccacaacgatggcggcgcggagtggataggcttgcacgcaagccgcgtcctcgtggtggcggtcctcactgtggtggcgtccttcatccccttctttgggtccttcatctcgttcgtcgggagcaccatgtgcgcgcttctctcctttgtgctgccggctctcttccatctcagcattgtaggctcgtcaatacccttgtggaggcgggtgctggactacggcatccttctctttggtctggctttcgctggatatggtcttgtcactgctctctcctcgcattgaacaatggcccaaacagtcaaaaaagtgcagagatcaggatatcttgtgatgacaggagtcaaatggatgctaggagcaccatatatcagatagcacggctcggattagtgcgtgattgaactgatccgcttcaacccatatagccgcagtcatccatggaagatataccttagcggattggaatggtgatttcgagaaaccaagttgacattgttctatgcatgttacaaaaatctacagatgtcatgaactttaagagccatatcttaatcgcgtatgcatgttacacatctacatgtgtcacgtttcaaaaaaaaagtttatgttgactattcgatccgatccatcatgtatgtcacatttgaataacaaaaatccattaatgtgtatgtttgc

SEQ ID NO: 142898 - DNA, 1648 bp, Zea Mays
tatagctagtctcttggagttgctcttatattgtctgtttagattgtgcaagattttgattggatttagtgtaaggagtttgttgatgctgcttaacatttgacagcaatattatgattgtaacttatataaatcaactaaggtttggaactgctatgccaggtctttgtcaattatgaatagaataacattaattgctttctttttgggcaaacattttttctataaaaattaatccctctctgtttagtttactcggtgccattttgattttgaaggtggactgcagggataaactcaaagaggaagaaactgaagagtgctgtcatggtcactatacatatggggatttgggtgacaggtgcttcgggactataggccgatgcttgacagagaccctcgtccttgtttcgcaggctggtggttctgtagcatacctgatattcattggccaaaatctccattccacattcagccagctgatgtcaccagctggcttcatctttgccatcctcctgcctctgcagatagcgctctccttcatccgctcactgtcgtccctttctccgttcagtatatttgcagacgtgtgcaatgtccttgccatggcaatcgttatcaaagaggatcttcagctctttgaccaccccttttcaaacagaagcgcttttaatggactgtgggcagtaccattcaccttcggtgttgcagtcttctgtttcgaaggattcagcatgacccttgcactagaagcgtcgatggcagaccggagaaagttccgctcggtgctttcccaagcagttgccgccattatagccgtgtatgtctgttttggagtttgtgggtacttggcctatggcgaggccaccaaagacatcataacacttaatcttccgaacaattggtcgtctgctgcagttaaggttggcctatgcatcgcactggcattcaccttcccagtcatgatgcacccgatccatgagatcgtcgagacaaggttcagatccaacagatgctttcggaagctcagccacaacgatggcggcgcggagtggataggcttgcacgcaagccgcgtcctcgtggtggcggtcctcactgtggtggcgtccttcatccccttctttgggtccttcatctcgttcgtcgggagcaccatgtgcgcgcttctctcctttgtgctgccggctctcttccatctcagcattgtaggctcgtcaatacccttgtggaggcgggtgctggactacggcatccttctctttggtctggctttcgctggatatggtcttgtcactgctctctcctcgcattgaacaatggcccaaacagtcaaaaaagtgcagagatcaggatatcttgtgatgacaggagtcaaatggatgctaggagcaccatatatcagatagcacggctcggattagtgcgtgattgaactgatccgcttcaacccatatagccgcagtcatccatggaagatataccttagcggattggaatggtgatttcgagaaaccaagttgacattgttctatgcatgttacaaaaatctacagatgtcatgaactttaagagccatatcttaatcgcgtatgcatgttacacatctacatgtgtcacgtttcaaaaaaaaagtttatgttgacta

SEQ ID NO: 142899 - DNA, 1870 bp, Zea Mays
caaacctcaccggcggcggtcattgaccgcaactggttgccgtgtttacttcccccacgcgccacgtttccgcgcatcccgagactccgagagagtggctggcggaacggaacacaaatccaatctcgctacgtgaagttcgcctcgcggcctcgcctaccaccacccgtgcccgtgtcccgccgccggcggcgctggggatggcggggcccaaggcggctgaggacggctcggcggctccgctgctgcctgcgcaggcgggggaacggagctcaggaggcgtgggcggaggggccacgtccgcgcagacgctggggaacgtggttgtctccatcgtgggcaccggtgtgctcggcctcccctacgccttccgcgcggccggctgggtcgcgggctccatcggcgtcgccgccgccggctccgccacgctctactgcatgttgctactctgcaaatacccccgtttatattatttgaagacaccataagatggacaatcaaaggcggagattgcttgattgcacgattgcaccaatacatataattgcacaagatatgtcttcatactggactactggtggataaactcaaagaggaagaaactgaagagtgctgtcatggtcactatacatatggggatttgggtgacaggtgcttcgggactataggccgatgcttgacagagaccctcgtccttgtttcgcaggctggtggttctgtagcatacctgatattcattggccaaaatctccattccacattcagccagctgatgtcaccagctggcttcatctttgccatcctcctgcctctgcagatagcgctctccttcatccgctcactgtcgtccctttctccgttcagtatatttgcagacgtgtgcaatgtccttgccatggcaatcgttatcaaagaggatcttcagctctttgaccaccccttttcaaacagaagcgcttttaatggactgtgggcagtaccattcaccttcggtgttgcagtcttctgtttcgaaggattcagcatgacccttgcactagaagcgtcgatggcagaccggagaaagttccgctcggtgctttcccaagcagttgccgccattatagccgtgtatgtctgttttggagtttgtgggtacttggcctatggcgaggccaccaaagacatcataacacttaatcttccgaacaattggtcgtctgctgcagttaaggttggcctatgcatcgcactggcattcaccttcccagtcatgatgcacccgatccatgagatcgtcgagacaaggttcagatccaacagatgctttcggaagctcagccacaacgatggcggcgcggagtggataggcttgcacgcaagccgcgtcctcgtggtggcggtcctcactgtggtggcgtccttcatccccttctttgggtccttcatctcgttcgtcgggagcaccatgtgcgcgcttctctcctttgtgctgccggctctcttccatctcagcattgtaggctcgtcaatacccttgtggaggcgggtgctggactacggcatccttctctttggtctggctttcgctggatatggtcttgtcactgctctctcctcgcattgaacaatggcccaaacagtcaaaaaagtgcagagatcaggatatcttgtgatgacaggagtcaaatggatgctaggagcaccatatatcagatagcacggctcggattagtgcgtgattgaactgatccgcttcaacccatatagccgcagtcatccatggaagatataccttagcggattggaatggtgatttcgagaaaccaagttgacattgttctatgcatgttacaaaaatctacagatgtcatgaactttaagagccata

SEQ ID NO: 142900 - DNA, 928 bp, Zea Mays
caaacctcaccggcggcggtcattgaccgcaactggttgccgtgtttacttcccccacgcgccacgtttccgcgcatcccgagactccgagagagtggctggcggaacggaacacaaatccaatctcgctacgtgaagttcgcctcgcggcctcgcctaccaccacccgtgcccgtgtcccgccgccggcggcgctggggatggcggggcccaaggcggctgaggacggctcggcggctccgctgctgcctgcgcaggcgggggaacggagctcaggaggcgtgggcggaggggccacgtccgcgcagacgctggggaacgtggttgtctccatcgtgggcaccggtgtgctcggcctcccctacgccttccgcgcggccggctgggtcgcgggctccatcggcgtcgccgccgccggctccgccacgctctactgcatgttgctactcgtcagtacgctcgcccgcccgcccatccctccttactgatcctcacactgcctgctgctcccgagcaggagtaggcgagtacagtagacgccggtcgcgttctctctcttccccaccattcgttctgctgtttgaccgggcctggcgtgctcttcgccaactttgtgctgcagcctgcagtgttcgctgtgctgttcccttccagatccgatcatccgaatggctcataaaattaaaaatcttctagatttgaagggccgagacagcagtacttgtggggatatatcctgttgtacgatcgtgcaatcaatcaatgtatatcattgattgtaaatcatgtagtgctaatgttttacatataacctcttgttttgtgtctcagtgcaaatacccccgtttatattatttgaagacaccataagatggacaatcaaaggcggagattgcttgattgcacgattgcaccaatacatataatt

SEQ ID NO: 142901 - DNA, 399 bp, Zea Mays
atggtgggcgccatcggcacgctcgtcgtcgacaccgtcgccacgggctacttcacgcgcgtccacttcaaggacagcgccgccgccgccgtgggcgccgccgccgtcggcgacgaggagcaacagcagcagcaggcggcgtcggcgccgcacgtcgacgacggagcagacggcgacggccacggccacggcgggcacgcgcacatgcacacgcacgcgacgcacgggcactcgcacggcgcctcggtcttggcggctgcatcgttcagcactgactttattgttcaggtaatcatcaagaaccccatggtgcagagccggggcaagctgcagctcgccatcaacgccttcatgctcttctgcgcgggccgcatggccacgctggccaagtggacctag

SEQ ID NO: 142902 - DNA, 1430 bp, Zea Mays
gcgcgcgagctcctcccctgtacccctacctctccaccccctcctcgtgccgtccacgcaccaccggcgcgccgcgctgccatggccatgaggccacgcgccgcgctcgccctctccctggcagccggcgtcccgctggtcctcctcctcctcctcctcgcgcccggcgcgcgcgccgacgacggcagcggcgggtgcggggcggcgggcggcggcgaggcggcgccgggcgaccgcgcgcgggccagggcgctgaagatcgcggccttcttctccatcctcgtgtgcggggcgctgggctgctgcctgcccgtgctggggcggcgcgtgccggcgctgcgccccgacagggacgtgttcttcctcatcaaggcgttcgcggcgggggtcatcctggccacggggttcatccacatcctccccgacgcgttcgagaagctcacgtccgattgcctctccggcgggccgtggcaggacttccccttcgcggggctcggcgccatggtcggcgccatcggcacgctcgtcgtcgacaccgtcgccacgggctacttcacgcgcgtccacttcaaggacagcgccgccgccgccgtgggcgccgccgccgtcggcgacgaggagaagcagcagcagcaggcggcgtcggcgccgcacgtcgacgacggagcagacggcgacggccacggccacggcgggcacgtgcacatgcacacgcacgcgacgcacgggcactcgcacggcgcctcggcgctcgtggccgccgtcggcggcgccgagggcgacaaggagcacgcgctgcgccaccgtgtcatcgctcaggttcttgagcttgggattgtggtgcactcggtgatcatcggcatctccctcggcgcgtctcaagaccccagcaccatcaagcctcttgtggtcgccctcagcttccaccaaatgttcgagggcatgggtctaggcggctgcatcgttcaggccaagttcaagctgcggtcgatcgtgacgatggtgctcttcttctgcctgactacgccggtgggcatcgtggtgggcgtcgggatctcgtcggtgtacgacgaggacagccccacggcgctggtcgtggagggcgtgctcaactcggtggcggcggggatcctggtgtacatggcgctggtggacctgctcgccgaggacttcatgaaccccagggtacagagccggggcaagctgcagctcggcatcaacgcctccatgctcgtcggcgccggcctcatgtccatgctggccaagtgggcctagtttactagccacttttttgctctgtgccctctcgattccagtttttttagttgagttgctgtaaaaatactactgttatggagaaacgaacgaatacaacaactcttttttctgaaacccatcgcgacatggatggttgcttgcggatgcggaga

SEQ ID NO: 142903 - DNA, 273 bp, Zea Mays
atggggagtggagactgggcggccatggacaccgaaggggcgagctcgaaccaggacacagggaaacgtgtttggcagctcgcgcgcacagagagaaattcgagctggggcgagcagcacagcaagaggggtgagctcaggaagacggacgccatgggaggaccttgggcgcggtcatggaaatccggccgagcagagcacggagctgagaggaaggagagcgggctgggcgtgcggccaggaaagagactttggctgggcggcttcggctga

SEQ ID NO: 142904 - DNA, 1083 bp, Zea Mays
aaccctatttcatgtgacgtgaacccctttcgctcgctccgagtgcggaggaaggggagctcgacgcacccaagtcgcccgcccacggaacgcgccgccgccgccgccgctggccaaagcaaggtcgcttgagacgggaacgaagctgcacatctccaaccttgactccggcgtcaccatcgaggatgtccaggaactcttctcagaagttggggagctcaagcgttattctatgaattatgacaaggatgggagatctaaggggactgtggaagttgtctttgcaaggaaagtggatgctttggatgctatcaagagatacaatggtgttctacttgatgggaagccaatgaatctagagctcattggaaacaatgtcgaaccacctcccatgccaccagtaatacacagtcgtcctttgcagaactataatgatatccatagcagtatgcctcaatcccaaagaggtggtcagcgaagagtaccccaaggcaacggtcggggtggacgcagtagtcaaagcagtggtggccggggacaggggaaaggccgaggccaggaccggaatcgcaccaccatttctgctgcagatcttgacgccgaacttgacaagtaccatgcagcggcagtgaaggaggaatgaggctctggcgttctgtttactaaacagctggaactatcaatcatatttacagctctgcgggcacgattgagaacaattggaaactaaggggtgtttggtttgaagagtcaatccattctagatgagttggtgaaatgaacttatttctcatattattactaattattagcctatgagtaatgaaatggtaatggatcaattcattctattacataaaccaaacaagaaagtgaggagtgagaaaatgatggactatctcatccctcaaatcaaacacactataacattattgttgtgtctgccctgatctgttatgttgtattttgttttggcttgccaaccgaaggcatcaggcaaacatgttctagagtcctagagttcgttttgaattgactgtgctctgttctcatttttttacgattgtctttaatctttctgat

SEQ ID NO: 142905 - DNA, 1197 bp, Zea Mays
accaaaaccctatttcatgtgacgtgaacccctttcgctcgctccgagtgcggaggaaggggagctcgacgcacccaagtcgcccgcccacggaacgcgccgccgccgccgccgccatcacatcacagaggcctcgccgtcgtctcggatattccccgccgtaggaccagtttccctccagctgccggagaccatgtcgggcggcctggacatgtccctggacgacctcatcaagcagtccaagtcccgacccaaggacagcccggcgtccttgtcggggcctgcccgccgcgcgccacaccccgcccgcgccgcgccctacccaccggccgctcccaaggcccgtgccgccgccgactcgccctacggggtctactccaagcacatcgccgcgatagcgccgcccccgctggccaaagcaaggtcgcttgagacgggaacgaagctgcacatctccaaccttgactccggcgtcaccatcgaggatgtccaggaactcttctcagaagttggggagctcaagcgttattctatgaattatgacaaggatgggagatctaaggggactgtggaagttgtctttgcaaggaaagtggatgctttggatgctatcaagagatacaatggtgttctacttgatgggaagccaatgaatctagagctcattggaaacaatgtcgaaccacctcccatgccaccagtaatacacagtcgtcctttgcagaactataatgatatccatagcagtatgcctcaatcccaaagaggtggtcagcgaagagtaccccaaggcaacggtcggggtggacgcagtagtcaaagcagtggtggccggggacaggggaaaggccgaggccaggaccggaatcgcaccaccatttctgctgcagatcttgacgccgaacttgacaagtaccatgcagcggcagtgaaggaggaatgaggctctggcgttctgtttactaaacagctggaactatcaatcatatttacagctctgcgggcacgattgagaacaattggaaactaaggggtgtttggtttgaagagtcaatccattctagatgagttggtgaaatgaacttatttctcatattattactaattattagcctatgagtaatgaaatggtaatggatcaattcattctattacataaaccaaacaagaaagtgaggagtgagaaaatgatggact

SEQ ID NO: 142906 - DNA, 992 bp, Zea Mays
aaccctatttcatgtgacgtgaacccctttcgctcgctccgagtgcggaggaaggggagctcgacgcacccaagtcgcccgcccacggaacgcgccgccgccgccgccgctggccaaagcaaggtcgcttgagacgggaacgaagctgcacatctccaaccttgactccggcgtcaccatcgaggatgtccaggaactcttctcagaagttggggagctcaagcgttattctatgaattatgacaaggatgggagatctaaggggactgtggaagttgtctttgcaaggaaagtggatgctttggatgctatcaagagatacaatggtgttctacttgatgggaagccaatgaatctagagctcattggaaacaatgtcgaaccacctcccatgccaccagtaatacacagtcgtcctttgcagaactataatgatatccatagcagtatgcctcaatcccaaagaggtggtcagcgaagagtaccccaaggcaacggtcggggtggacgcagtagtcaaagcagtggtggccggggacaggggaaaggccgaggccaggaccggaatcgcaccaccatttctgctgcagatcttgacgccgaacttgacaagtaccatgcagcggcagtgaaggaggaatgaggctctggcgttctgtttactaaacagctggtaaggcgccgggacagtgtggccttctgctttagaagcatgaagtttgctatcttagtcctagtgttttatgctagaaattttttttggcccatgtacaaccgcgtctctgcgtcaagattcctggtgttttatgtgtagcatgaagttgtggtcctactttgcaggaactatcaatcatatttacagctctgcgggcacgattgagaacaattggaaactaaggggtgtttggtttgaagagtcaatccattctagatgagttggtgaaatgaacttatttctcatattattactaattattagcctatgagtaatg

SEQ ID NO: 142907 - DNA, 1246 bp, Zea Mays
aaaaccctatttcatgtgacgtgaacccctttcgctcgctccgagtgcggaggaaggggagctcgacgcacccaagtcgcccgcccacggaacgcgccgccgccgccgccgccatcacatcacagaggcctcgccgtcgtctcggatattccccgccgtaggaccagtttccctccagctgccggagaccatgtcgggcggcctggacatgtccctggacgacctcatcaagcagtccaagtcccgacccaaggacagcccggcgtccttgtcggggcctgcccgccgcgcgccacaccccgcccgcgccgcgccctacccaccggccgctcccaaggcccgtgccgccgccgactcgccctacggggtctactccaagcacatcgccgcgatagcgccgcccccgctggccaaagcaaggtcgcttgagacgggaacgaagctgcacatctccaaccttgactccggcgtcaccatcgaggatgtccaggaactcttctcagaagttggggagctcaagcgttattctatgaattatgacaaggatgggagatctaaggggactgtggaagttgtctttgcaaggaaagtggatgctttggatgctatcaagagatacaatggtgttctacttgatgggaagccaatgaatctagagctcattggaaacaatgtcgaaccacctcccatgccaccagtaatacacagtcgtcctttgcagaactataatgatatccatagcagtatgcctcaatcccaaagaggtggtcagcgaagagtaccccaaggcaacggtcggggtggacgcagtagtcaaagcagtggtggccggggacaggggaaaggccgaggccaggaccggaatcgcaccaccatttctgctgcagatcttgacgccgaacttgacaagtaccatgcagcggcagtgaaggaggaatgaggctctggcgttctgtttactaaacagctggtaaggcgccgggacagtgtggccttctgctttagaagcatgaagtttgctatcttagtcctagtgttttatgctagaaattttttttggcccatgtacaaccgcgtctctgcgtcaagattcctggtgttttatgtgtagcatgaagttgtggtcctactttgcaggaactatcaatcatatttacagctctgcgggcacgattgagaacaattggaaactaaggggtgtttggtttgaagagtcaatccattctagatgagttggtgaaatgaa

SEQ ID NO: 142908 - DNA, 809 bp, Zea Mays
cgagcaccagtaacggcgcgaggttcacagttggaaggcggggcctggagcgtgtagaagccggcgaaggaagagaagcagacggtggacctaacctcgtccttgctcaccttgggcccttacgagccccaccgatccagatctgtgcgacgtattcatggtcggcggggtagggctagttggggcgggagcgtgcaagatcatcgcgccgggggggaagcgggcgtggcgggcacggtgtagatggtagtgcgcgtcgcgaggtggagggcatgtaggagaagaggcgcgtcacgatgggaagaggggaagaggcgcggaaccaaaccagcgtgcggcggcgcccggaggcggcgggtgcacccgaggggaaggagagggagaggctcgaccttgaggagggcagcggggagatgacggaggaggtggcgaaattgaggcgggtagggcgtcggggaaggggctcgcggcggagggtggaggcagacggcgagtgtagaaatttgagtggggaggtggatggtggaggggacagaggcgagtgtgggggatgccggcgcgaggatggagagcgcgagcgagaaggagaagcggggaggggagatcgcggtggggaggggaggggagatcgtggcggggaggaggggggcgggacggcggggtggatctcgtgggcgggcgagatatccgctgcgggacgacgcggcggcgcgatgtgcgggagcgggggcgctgtggaggagagggtggggatccgctgcgcgaacggcagaaccgtgcgccaaattcagtgtggacgcctacggtaa

SEQ ID NO: 142909 - DNA, 195 bp, Zea Mays
atggcaagccagcgatgcaaggactatgattctgccctgtacacagaatattggagatgtgccttcaacactctacactcgatcgtctccagatcaccaactcactgtagaaacaagatccacctcttgacatctgaaagaaactgttcgaacacatatgacaagaacaatgagtcgacgatccgcaaagagtag

SEQ ID NO: 142910 - DNA, 1678 bp, Zea Mays
aattaattaaattctgaactaatctcttgctttataaattacactacatcattataagtgattaaaatattttatcaacacacatgcctactaaaattctactcggtacactaatttagctaattgaccggaatagcgaaataactcgccataactgaatctagcttgataattgcaaagatcatgaagtcacgagagttccgtgactcacacaaataatcgagcacctaatgggcatcgcactagcacattaatttatttaacgatcgaactattctgaataatacattaatttaccgtttcaatagttgactcgaatccgcgagatcggtagtgattttccgatccaggcaattggtcgagcgcttggggaatattgcgctgctagcttcgtcttcatccgattcttggcattcttgatgacgcgcggaacggcgacgatcttcgattgaagtcttcaaccgagtacttgataagcaatacacaggggcctcacttatttttgtctaatatccgggattcggtgttcgacgaaagcgagcagagaagaacgaggttcgacgagcttgacgacgatacgggagggtgctgtatatagagttacaggtctggcgagctgacgcggtcaagataactgtggctaacgagcttgcgatagaagcgatgatagtgcgggagctcgacacgctgtggagagcagataaaattcgtgcgctcggcaaacaaggaaagaacgaggtgagcgtgcgcagagagctcgacaacccgcagcaggggctagcaaggcgtgagctgcgcgcaggcacgcgacgaccacggcaagggagcagagaaaattgtgcggatgactggaacagagacgacgaacacacgcgcacaaaaagcggagcgcgcataggatagggaactgcggcgatgaagcgccatagctggagcaagagcgggacgcgaactaggcgacggcagcgcgcaaggacgatcttggctaggggaaaaactccgcgggcagggatccgagctgaaaggagccgggggagatgggcgcgcagaacgccgagcagagactggagcagggaccgagctcgacacagggagtttcacggcacggtggccatgtctgggaccaggggcgcgacgatgggaactgggggaaaaaatggagctctagccggacgtcaggaagacgagcgagcagcgcaccgaggaggaagtccagggcgtggcgattttggctgccgcgtcaactgttgccctctgttcccaccggaagaaacgccgaatggtggcgagcaggcacggctgggttggaaggtgcacagcgcgcaggtaaaaaggaaccgtgggcggcgagattttatcccctggcgactggagatcttttctccatgagcggcggccggatgaagatgatgacgcgcaggaaatatcccagggagataaacgatgcagcaaggaggttgaagataagagatgtacgcatgaaaaaatcaacgtcagggagcttcaacggggcttggacaaaaatctagtgaacagtacacttcggatagaataagtgacgtgggaagagataaggctaggagatattttccattttgttcttttcctcttgctttttaaagaataccggaattaggattagagtttggatgagatataaacagaccaggccaaaaca

SEQ ID NO: 142911 - DNA, 246 bp, Zea Mays
cttcgacgtaccgggatcggcttatcgagatgttgttgatacatctcggtatagtgctgcgcgcgctcggtacagactggcggtttcacaatatgcaccagcgcatttttgtgcgctttaatggcggtcgctgagcgtgtccagtttcagtgtggtcatggttgttatcctcgtaaggtcgcggttaaccctttctggcaggcatactgctgggcaaagtcgagcacgaatcaagctgatttctta

SEQ ID NO: 142912 - DNA, 861 bp, Zea Mays
actccctatagctagctagatctcttctccattcgtttacctgaagcacaagaataaacgcagccgggcatgggcgaagctaagctcaacaacgtgaccgtcctgctggtggccctcctcctcctgagcagtggcgttcaggacgctgccgccatgccaggcacgttgaactacgacgcgattgtcgccgacgagccaaacggaaagaacaaggacctgtaccgccccgtcgccaacgccaataaatacacccgcgggtgcgagcccatagaacgctgcaggggcgcgcgctgatcaccaagcatatacatatagcacatcgatttcttattattgcatgcacgtttatataagtgctcattgtcttgctgttgtaagtgccagcacaagcatatatacggcgtttatatatactacatactccgatcgttcattccgttccttagtaaccaggttcccggatcaatgtgatcgaggaacaggaacgtggtacacggtacgctactaaaactaggatttaacgctactggaacgagattgtttccacgttcccggaacagaacgaacattcccggaacgaggaacgtggccaagttccccgtccccggttgctaagttccgttccaacttgtaaattatattaaagtgtccaagagtcaaagccactccatcagataatttctctattttactatgtatcaaataacacagatatatatcaacaaaacgacatggaatttggaacggtagaagtacactcttttttaataagtgaacacgcttgaatcatatatataatatagaaagggctcctatactgctatagtggtttagttcagtccctcctaaatattttttcta

SEQ ID NO: 142913 - DNA, 443 bp, Zea Mays
gcttgatttggtggttcctgaaaaggctaaaactatacgtgtagctcatgattgttgttcctgcagagtgcgaagaccaacctgaatgtggagcaggtttttttctccatagcaagagatatcaagcaaaggctttctgaatctgattcaaagccagaggatcgcacgatcagtattaacagacctgatggcggtgaggcttcggcttcacaaaaatcagcttgctgcggatcgtgagggggttacattgtcacaaggaagataaatagtgtgataccatgcttgtaatttacccttctacctttttatctggcttaatcgtccacttctaacttttaattgcaattccttgaattcagacttctgtgttgtaatgtgaacaattttagttgtacccccctgttagcaatgcaagtgctcgtaaaaaaaaaacaatgtaaaaa

SEQ ID NO: 142914 - DNA, 1307 bp, Zea Mays
tccaccctcccccaccaccttccttctctacttctctcctctctcccaccgcatccgatctcgtacctcacttcatcgccccgccgccgcttcgacggcgcgccgaccggctaggacgcgcctccgacccggatagtgttccgctcggtcgaatccgacggccgctcgctgctgcagcgggcgcttgctgtgcgtcgcgtgggctcggctggaggcaggcggaacctttcctgggtctcggagatggcggcgcctccggcgagggcccgggccgactacgacttcctcatcaagctgctcctcatcggagatagcggtgttgggaaaagttgtctccttttacggttctcagatggctccttcactactagcttcatcaccaccattgggattgacttcaaaataagaacagttgagcttgatggtaagcgcataaagttacagatatgggatactgctggtcaagaacgttttcgaactattacaaccgcctactacaggggtgcaatgggaattttgcttgtctatgatgttactgatgagtcatctttcaataatataagaaactggataaggaacattgagcaacatgcttccgacaatgtgaataaaattttggtaggcaacaaagctgacatggatgaaagcaaacgcgctgtaccgacttcaaaagggcaggctcttgctgacgagtatggcatcaagttttttgaaacgagtgcgaagaccaacctgaatgtggagcaggtttttttctccatagcaagagatatcaagcaaaggctttctgaatctgattcaaagccagaggatcgcacgatcagtattaacagacctgatggcggtgaggcttcggcttcacaaaaatcagcttgctgcggatcgtgagggggttacattgtcacaaggaagataaatagtgtgataccatgcttgtaatttacccttctacctttttatctggcttaatcgtccacttctaacttttaattgcaattccttgaattcagacttctgtgttgtaatgtgaacaattttagttgtacccccctgttagcaatgcaagtgctcgtaagtcaatgcaccttgtgttaatggaaatgctagcaaaatcgctgcagagtttaggggcggccgtaccacaacctgttgttttacctctcttccctatatctggatttcgtactgaagaatatatttggtagtttaggattcatatgtattcgttcgagaaaaggattcatatgtattatattcaatcaactacgctttcatggcatctggggatccattctatacctcaattt

SEQ ID NO: 142915 - DNA, 2396 bp, Zea Mays
ttgccatcctaagaccaaccgcccgccgctctcccagtccgagacggccagaccagaacccggacccgggtgccatgctcgcccttccccggcacggccgcatgagttaggaaggcgcaacagaagcaggtgcagatgcgactgcaacttcaccttttcgacggccaggagaaggaacggatggcccaggcggcgaggaaagctgcttgcgccgtactgctctcgccgcagactttcatatttcattcctccgctcggctcctcccggaggccggggcctgcgcggctaaaaaggccatacatcgacagagcgtgcgcggttgtgttccgtcctcctcggtaatagcccgtggcttacacaacgcgcacagggtgttcgacggaacgcccacgcggagcttgccggcatggacatcgatcatctccggctgcgcgcgtgaaggcaggcacgcggacggcatgcgcgcgttcgcggagatgctggacgaatgcggcgcgaccgcgccgaacgccttcgtgctcgcaggcgtcctccggtgctgcgcggggctcggcgacgtcgagtctggcaggcgcatccacgggtggatcctgcggagcggcgtgtgtccggacgtggtgctctgcaatgcagtcctcgacatgtacgccaagtgcggcgaccatgggcgcgctaggagggcgttcggggcgatggcccagaaggacgccacatcctggaacattgtgatcagggcgtgtcttcaggatggcgaccttgtgggggcgacgcagctgttcgatgaatcgtctttgagggatgtttcgagctggaacacgatcgtcagcgggcttatgcggcatgggcacaccactgaggcgttgggtcgcctgcagcaaatggtgcgagctggagttacatttagtaactacacttactccatggtgtttgctttggctggcttgctttcatcgcgggacctaggccggcagctccatggtcgtgtggtggtggctgtattggaggaggatgcgtttgtcggctgctctctcatggacatgtactgcaagtgtggggaaatggagtctgctctgtcaatctttgatcgctggtcagacttcacagaggacagacaatttgcgtggagcacgatggtcgctgggtatgtccagaatggcagggaggaggaagctcttgagttcttccgcaggatgctgcgtgaaggagttcctgctggccagttcatcctcactagcgtagcttcagcctgtgcaaatgcagggatggttgagcaaggcaggcaagtgcatggatttgttgagaagttgggtcacagatttgatgcaccattggcgtctgccattgttgacatgtattcaaagtctggcagccttgaagatgcttgcaggatattcagaagtgctcagaccaagaatgttgctctctggactacaatgctgtgctcctatgcatctcacgggcaaggaagaatggcactagagatcttcagcagaatgaaggccgaaaagatcatgccaaatgagataacccttgtcgctgttctatctgcttgtagccattctggtttggtcagcgacggataccactacttcaaccttatgcaggaagagtatggaattgttccaaacaccgagcactacaattgcatggttgatctttatggacgagctgggctactcgacaaagcaaaaaatttcattgaggaaaacaagatcagccatgaagctgttgtttggaagactttgctgtcagcttgtcgacttcacaagcacatcgagtatgcacaattggcttctgaaaagttggttcaactagaacaatatgatgctggatcatatgttctgatgtcaaacatgtatgccaccaacaacaaatggcttgacactttcaagctcagaagttcaatgaaggaaaggagagtccggaagcagccaggtcaatcatggatccatctgaaaaacgttgtgcatagatttgttgcactggacacatctcacccaagatcggctgaaatttatgcttacttggagaagctgatggagaggctgaaggagatggggtacacaagtagaactgatcttgttgtacacgatatcgaggaggaacagagagaaacatctctgaagttccacagcgagaaacttgctattgcattcgggatcatcagcacgcctgttgggacggcacttcggatcttcaagaatctgcgtgtttgtgaggactgccacgaggcaatcaagtttataacccgagccacagatcgggagattgttgttcgagatttgtatcggttccatcatttcaaggatggccaatgttcctgtgaggatttctggtgaaaggttctgctttgatattggttgataaagtgtaggctgtactatatctgcacgta

SEQ ID NO: 142916 - DNA, 830 bp, Zea Mays
gacgtatatcggatggctgacttcgcggacacgggcacacggcaacagaaggtcttcgccggactctacgcccactgaacacgcccttgagggctgaggccttgacccactgaacacgcccttggcgaccgccgccgctctactcccagttgccctgttcttcgccggacccttcgccggcgacaagcactaaccaacgaccaacacgttttgttgcgatggggttattcaggggcagcttcactctcttggtgggaatgggatgtggtgtctatatagctcagaactacaatgtgccgaacgtcaagaagctattcaacacatatgtttttctggcaaagcacattgaggaaacctaccgtaagccgaagaaagacgatgattgatccttttacatttgttttccatgttatgccctgggaaagcaagtacagctgacgtaatacagaaaggtgcttttttgaaatggtgaaggcatttttgtttatggtctagtttgaactccagtggtaaatgttagttgtggaattcagttgctgtgatagtttttggtcgcatgggcttctagatcatccccttttggcctttgctcgtgttcctgtgcctgagaaatgcactgaactttgtagttgaactgttgaagtgcggccatggataatctagcacatattagtgtgtttgtcaagttaacttaggatgggatgatgtgtttagttgaatctagatttatctttgtttctttaaattgtttgttcttcgatttaccacgatggatgatgacatttgtatttgcaaccagatagtggggatgtgcctttcaccacccataa

SEQ ID NO: 142917 - DNA, 609 bp, Zea Mays
gctgtccgctcctgatgcccgcacccttctattcgcttcctgcggcgcggtaccgcaaaccctaatccgaggttttgttgcgatggggttattcaggggcagcttcactctcttggtgggaatgggatgtggtgtctatatagctcagaactacaatgtgccgaacgtcaagaagctattcaacacatatgtttttctggcaaagcacattgaggaaacctaccgtaagccgaagaaagacgatgattgatccttttacatttgttttccatgttatgccctgggaaagcaagtacagctgacgtaatacagaaaggtgcttttttgaaatggtgaaggcatttttgtttatggtctagtttgaactccagtggtaaatgttagttgtggaattcagttgctgtgatagtttttggtcgcatgggcttctagatcatccccttttggcctttgctcgtgttcctgtgcctgagaaatgcactgaactttgtagttgaactgttgaagtgcggccatggataatctagcacatattagtgtgtttgtcaagttaacttaggatgggatgatgtgtttagttgaatctagatttatctttgtttctttaaa

SEQ ID NO: 142918 - DNA, 959 bp, Zea Mays
tcagctactcctgcaaccacccatcgccgaaccagccgcgtggacttctcccccgcatgcgctccgttttgttgggattccctctgaggtccacttgtgctgcccgatggggatgccagcctcgctccactgggatataaaaccacgccccatgcccgctcccttgaccatcatcgaaggaaccacgagccaatcggagagagaactaccagcggggagcgccagggtgcagagagcgccgccgcgagccatctccgactcgctggcgacttggcctctgtgtgtgcctggggatcatcgttggggaaccagtgaagcatacgcgtggatctcctaggacctgggtcgtctctctcccaccgaattgctcaccggagcaaaacttggccggggacccgccctccgcgtgaaccagcttctccgcgtcaccaacgccggttttgttgcgatggggttattcaggggcagcttcactctcttggtgggaatgggatgtggtgtctatatagctcagaactacaatgtgccgaacgtcaagaagctattcaacacatatgtttttctggcaaagcacattgaggaaacctaccgtaagccgaagaaagacgatgattgatccttttacatttgttttccatgttatgccctgggaaagcaagtacagctgacgtaatacagaaaggtgcttttttgaaatggtgaaggcatttttgtttatggtctagtttgaactccagtggtaaatgttagttgtggaattcagttgctgtgatagtttttggtcgcatgggcttctagatcatccccttttggcctttgctcgtgttcctgtgcctgagaaatgcactgaactttgtagttgaactgttgaagtgcggccatggataatctagcacatattagtgtgtttgtcaagttaacttaggatgggatgatgtgtttagttgaatctagattta

SEQ ID NO: 142919 - DNA, 1309 bp, Zea Mays
catccggccatccgcctataaaaagttgcgagtctcctggctggcaccaaccactcgcactggcatagcatctggtctcgtctctctccgatccctctcctctccctccccctagccactacccacttgagcgagccctaggccctagcaggcgaaagccatggcgtccttgggtgttcgtgccgccgccgccgctcgtcttccctccctccgtcctcgccgcgacggcagcagggtgctcaccggcttgagggtcgggacagggcactacggcgtgcggctcgcgctttcttcgtccacatcagcttctcccagagagttcaaggtcgctggccttcctgtcgatgacagcagtttgggcccgggggatgaatatgagtttggactctatactcctaagctgcttgcagttactggagatgattatgtgtctaacccccgcatgccagacgaggatgagttcgaccatttctaccgtgttgtcgccaagaagactgacatgctgctcagctgccaccttccaaagccgcttgcagtttctgaagaggagaaggccgtgcaggagaagttcaaggagatggcgaacgaatgcatcgacctcctggttgatgcgatgcgccgcatcccagcggagaaaaggcgcccactgttctcggtgtttggtgagctgtacccggtatttgagtcagtgaggtggactgccgagggggggtgtgccaagtggtggatggcgctgcagatcatggagaagctggagatcgtgcgcaagatggtgtcgagcgcttgcggcggcacccctcttgacagaggcacggtgttcgccaggaaggtggacctcaccggtgtcgacggtcaggcgctcgccggccacggcctcgggagcaacttatcagtggtgatcttcgtgctgctccacaacgtcttcagcaacgtcaagtcggacatcgatggcatggtctctgcttccactccttattagccatcgtcacctagctacctacgtgtctacagatttgcagtcactagcctcaagtctccaagtgattggatctctgctacagtgctcttactactgccctagcgcaaatcttgatgtgtccgttctagctactactagtatctaccttggttatgttggatcatgcatgtgattgggttctgctagtactatggtttctgttctacccagtagatggctacttcactgtgttggatcagtcacattacatgatttctgataataatgatgcccttcaatccttctgtttttcgctgatgtttctacaaccatttattctggtaaaagaga

SEQ ID NO: 142920 - DNA, 1346 bp, Zea Mays
catccggccatccgcctataaaaagttgcgagtctcctggctggcaccaaccactcgcactggcatagcatctggtctcgtctctctccgatccctctcctctccctccccctagccactacccacttgagcgagccctaggccctagcaggcgaaagccatggcgtccttgggtgttcgtgccgccgccgccgctcgtcttccctccctccgtcctcgccgcgacggcagcagggtgctcaccggcttgagggtcgggacagggcactacggcgtgcggctcgcgctttcttcgtccacatcagcttctcccagagagttcaaggtcgctggccttcctgtcgatgacagcagtttgggcccgggggatgaatatgagtttggactctatactcctaagctgcttgcagttactggagatgattatgtgtctaacccccgcatgccagacgaggatgagttcgaccatttctaccgtgttgtcgccaagaagactgacatgctgctcagctgccaccttccaaagccgcttgcagtttctgaagaggagaaggccgtgcaggagaagttcaaggagatggcgaacgaatgcatcgacctcctggttgatgcgatgcgccgcatcccagcggagaaaaggcgcccactgttctcggtgtttggtgagctgtacccggtatttgagtcagtgaggtggactgccgagggggggtgtgccaagtggtggatggcgctgcagatcatggagaagctggagatcgtgcgcaagatggtgtcgagcgcttgcggcggcacccctcttgacagaggcacggtgttcgccaggaaggtggacctcaccggtgtcgacggtcaggcgctcgccggccacggcctcgggagcaacttatcagttgaggacgttcatggcttcatgctgtttacgatgaatataatatgcttgcatgcatgttgtttcttaattttgggtgaaacgaacacaggtggtgatcttcgtgctgctccacaacgtcttcagcaacgtcaagtcggacatcgatggcatggtctctgcttccactccttattagccatcgtcacctagctacctacgtgtctacagatttgcagtcactagcctcaagtctccaagtgattggatctctgctacagtgctcttactactgccctagcgcaaatcttgatgtgtccgttctagctactactagtatctaccttggttatgttggatcatgcatgtgattgggttctgctagtactatggtttctgttctacccagtagatggctacttcactgtgttggatcagtcacattacatgatttctgataataatgatgcccttc

SEQ ID NO: 142921 - DNA, 1374 bp, Zea Mays
acccactcgcagtctcgcactcgtccctctccctctcctctctcctctccctacccagttgcgcgagccggcgagccctagcaggcaaaagccatggcgtccatggttcttcgtgccgctgccgccgctcgtcttccctccctccgtcctcgccgcaacggcagcggggtgctcaccggcttgaggatcgggacagggcactacggcgtgcggctcgcgctttcttcgtccgcggcagcttctcccaaagagttcgaggtcgcttgccttcctgtcgatgatagcagattgggcccgggggaagattatgtgtctgaccttcgcatggcagacgaggaggagttggaccatttctaccgtgttctcgccattaagactgacatgctgtttagagcctaccctgaacacaagccgtttgcagtttctgaagaggacaaggccgtgcaggagaggttgaaggaatttgcgaacgaatgcatcgacctcctggatgatgcgttgcgccgcatccccgcggagaaaaggcgcccactgttctcggtgtttggtaatgtgtaccaggtatttgcgtcagtaaagtggtatgcggagggggggtgtgcccagtggtggatggcgctgcagatcacggaggagcttgagatcatgcgcaagatggtgtccagcgcttgcggcggcacccctcttgacagagagacggtgttcgacaggaaggaggccctcaccggtgtcgacgttcaggcggcgctccgcggccacggcgtcgagagcaacttatcactggtgatcttcgagctgatcgacaacatctacagcaatgtcaagtcggacatcgatgacatggtcttcgctttcactgcttagacatcgttacctacgtgtccacaccacatggagcttttcagtcaccaccctcaaatctccaagtgattaggatctctgctacactgcttttactaccctaactcaagttttgatgtgatcggctgcctacaatggtctacagaatctaccctaactcaagttttgatgtgatcggctgcctacagaatcgagctttgagtcactttccctctgttgttcgttccagctatacttttgataatgcatgtgataattgggtcgctgcttttagaactaaagatgtactcaggatcatcctaatacctcataaagccaattcttcttctaacttgtgtgatgtatggagtcctagcctagttgtgcaaattctgtcgtacctttattgttagcgttgacggcggctgtcggcacccctcctgtgtatgtgatgccgccaccaccgacagtctagctaaactgattagtatcggtaaaaatagaaaaacgaggatgaaatcctgatccaacaga

SEQ ID NO: 142922 - DNA, 1347 bp, Zea Mays
acccactcgcagtctcgcactcgtccctctccctctcctctctcctctccctacccagttgcgcgagccggcgagccctagcaggcaaaagccatggcgtccatggttcttcgtgccgctgccgccgctcgtcttccctccctccgtcctcgccgcaacggcagcggggtgctcaccggcttgaggatcgggacagggcactacggcgtgcggctcgcgctttcttcgtccgcggcagcttctcccaaagagttcgaggtcgcttgccttcctgtcgatgatagcagattgggcccgggggaagattatgaggagttggaccatttctaccgtgttctcgccattaagactgacatgctgtttagagcctaccctgaacacaagccgtttgcagtttctgaagaggacaaggccgtgcaggagaggttgaaggaatttgcgaacgaatgcatcgacctcctggatgatgcgttgcgccgcatccccgcggagaaaaggcgcccactgttctcggtgtttggtaatgtgtaccaggtatttgcgtcagtaaagtggtatgcggagggggggtgtgcccagtggtggatggcgctgcagatcacggaggagcttgagatcatgcgcaagatggtgtccagcgcttgcggcggcacccctcttgacagagagacggtgttcgacaggaaggaggccctcaccggtgtcgacgttcaggcggcgctccgcggccacggcgtcgagagcaacttatcactggtgatcttcgagctgatcgacaacatctacagcaatgtcaagtcggacatcgatgacatggtcttcgctttcactgcttagacatcgttacctacgtgtccacaccacatggagcttttcagtcaccaccctcaaatctccaagtgattaggatctctgctacactgcttttactaccctaactcaagttttgatgtgatcggctgcctacaatggtctacagaatctaccctaactcaagttttgatgtgatcggctgcctacagaatcgagctttgagtcactttccctctgttgttcgttccagctatacttttgataatgcatgtgataattgggtcgctgcttttagaactaaagatgtactcaggatcatcctaatacctcataaagccaattcttcttctaacttgtgtgatgtatggagtcctagcctagttgtgcaaattctgtcgtacctttattgttagcgttgacggcggctgtcggcacccctcctgtgtatgtgatgccgccaccaccgacagtctagctaaactgattagtatcggtaaaaatagaaaaacgaggatgaaatcctgatccaacaga

SEQ ID NO: 142923 - DNA, 1459 bp, Zea Mays
acccactcgcagtctcgcactcgtccctctccctctcctctctcctctccctacccagttgcgcgagccggcgagccctagcaggcaaaagccatggcgtccatggttcttcgtgccgctgccgccgctcgtcttccctccctccgtcctcgccgcaacggcagcggggtgctcaccggcttgaggatcgggacagggcactacggcgtgcggctcgcgctttcttcgtccgcggcagcttctcccaaagagttcgaggtcgcttgccttcctgtcgatgatagcagattgggcccgggggaagattatgtgtctgaccttcgcatggcagacgaggaggagttggaccatttctaccgtgttctcgccattaagactgacatgctgtttagagcctaccctgaacacaagccgtttgcagtttctgaagaggacaaggccgtgcaggagaggttgaaggaatttgcgaacgaatgcatcgacctcctggatgatgcgttgcgccgcatccccgcggagaaaaggcgcccactgttctcggtgaagtttgcatttgctgttctttttttgctgctttgatttccagctgagaaactgctggctgcttgtttgtttgtttgtgcaggtgtttggtaatgtgtaccaggtatttgcgtcagtaaagtggtatgcggagggggggtgtgcccagtggtggatggcgctgcagatcacggaggagcttgagatcatgcgcaagatggtgtccagcgcttgcggcggcacccctcttgacagagagacggtgttcgacaggaaggaggccctcaccggtgtcgacgttcaggcggcgctccgcggccacggcgtcgagagcaacttatcactggtgatcttcgagctgatcgacaacatctacagcaatgtcaagtcggacatcgatgacatggtcttcgctttcactgcttagacatcgttacctacgtgtccacaccacatggagcttttcagtcaccaccctcaaatctccaagtgattaggatctctgctacactgcttttactaccctaactcaagttttgatgtgatcggctgcctacaatggtctacagaatctaccctaactcaagttttgatgtgatcggctgcctacagaatcgagctttgagtcactttccctctgttgttcgttccagctatacttttgataatgcatgtgataattgggtcgctgcttttagaactaaagatgtactcaggatcatcctaatacctcataaagccaattcttcttctaacttgtgtgatgtatggagtcctagcctagttgtgcaaattctgtcgtacctttattgttagcgttgacggcggctgtcggcacccctcctgtgtatgtgatgccgccaccaccgacagtctagctaaactgattagtatcggtaaaaatagaaaaacgaggatgaaatcctgatccaacaga

SEQ ID NO: 142924 - DNA, 1545 bp, Zea Mays
catggattgtgtgtgcatcgaggcacacacattcctacaaattccatctctatctgttgaccttgcattgcaacaacctcgctctatcggcaagtcccgatgggcgatggccggacaagagcatcgctgccggaggatcgtgctgttcccgttgccgttccagggccacatcagtcctatgctccagctcgccgagctgctccatgcgcggggcctcgccgtgacggtcctccacaccggcttcaacgcccccgacgccacgcgccacccggagctcaccttcgtccccatccacgagtcgtcgttccccgacgaggtcacgtccctcggcaccgacatcgtcacgcagctcctggccctgaacgccgcctgcgaggcgcccttccgggaggccctcgcgtcgctgctccgtggtggccaggacgtcgcgtgcgcggtggtcgacgggcagtgctactcggcgctgcgcgcggcacaccggctgggcgtcccggcgctcgtgctgcggacagacagcgccgccacgttcagcagcatgctcgcctacccacggctgcgcgacgccggtttcgttcccgtcaaagaggagaggctggacgagccggtgccggatctcgagcggctccgagcgcgggacctgatccgcgtcgacggcagcgacacggacgcgctgtgcggcttcatcgcccgcgtcgccgacgccgtccgggcctcggcgtccggcgtcgtcatcaacacgttcgagaggatggaggcgtcggagctggccaagatccagcgcgagctgtcccgtccggcgttcgcggtggggccactgcacttgctgtcccaggcaccggcggagcagagcctgcacgcgcccgaccgcggctgcctggcttggctggacgaccacccgccgcgctccgtgctgtacgtgagcttgggaagcgtggcctgcgtcgaccgcggcgcattcgtggagatggcgtgggggctggcccgcagcggggtgtcgttcctctgggttgtccggccgggcttggtcggcggcgtgccggaggttccgccgctgccagatgggttcagcgaggaggtacggaacagagggaagatcgtctcgtgggcgccacagagagaggtcttggcgcacgccgccactgctgcgttctggacgcactgcggatggaactccacgttggagagcgtttgcgaaggcgtgcccatgcttgtgcagccgtgcttcgcggaccagatggtgaatgcgagatatgtcacgcatgagtggggtgttgggcttgaggttggggaagagattgagaggggcagggtcgccatggcggtgaccaaactgatgaccggggaagacgcagctcagatgagggggagggcttaccatctcaagatacttgcatctgctgctactagtttgcccatagatagcctaatccattacatatcgtccctgtgaactccgaaaatttgtcatgccaaattgtcaaatgctaatatgttgcaaacttgcaatctgtcaggaattttaaggcctgtttggtttgagagact

SEQ ID NO: 142925 - DNA, 1153 bp, Zea Mays
acatgaaaaaaagagcatgcatgcatgataagtaaacgtgtccagtggcagagtcgcaggagccggacatgctggtgacggagctgccgccgtaccgcgtccgtgacatgccgtccgccagcggggccaccctcgggctaatgcgggacctgatttcgcgagcggtgacggccgtgaacgcctcgtcgggtctcatcatcaacacgttcgacgcgctggagacggacgagctggcgtcgctccggcgcggcctcgccgtcccggtgttcgacatcgggccgctgcacgtgcactcgccggcggcctcgagcagcctgctgcggcaggaccgagggtgcctggactggctggacgcgcggggccccgcgtccgtgctctacgtcagcttcggcagcctggccagcatgtccgcggcggacctggtggagacggcatggggcatcgccaacagcggccgccctttcctgtgggtgctccggccgggcctcgtccgcggcgcgccgccgagtcagccgccgccgctgcccgacggcttccacgcggagacgcgcggccggggcacggtggtgagctgggcgccgcaggaggaggtcctggcgcaccctgccgtgggcgcgttctggacgcactgcggctggaactccacgctggagggcgtgtgcgccggcgtgccgatgctgtgccgcccctgcttcggcgaccagatggggaacgccaggtacgtggaccacgtgtggcggaccggcctcgcgctccacggcgagctggagaggggcaaggtggaggcggccatctcgacgatgatgggggcaggcgggcccggcacggcgctgcgtgggagggcacgggagctctgtagaagagcggcggagtgcatggccaaggccggctcgtccgacctcaacgtcgacaagctcgtgaaccacatcatgtccctcacggcgcggcggtgccaatagtgacttaattatttgagtaacacatgctcatctgcataattaagcctgactaatctgtttgctacaaatccacttgcactggctgtttcaaagtttcaagtttgatggagacatggagcatggattagttactgttgtacacttgtgcatcttcatgtgcatcttcatataatattgtgtgtaagctttgctga

SEQ ID NO: 142926 - DNA, 1644 bp, Zea Mays
caaagacagggtcaggactcaggaggactccaagaaccaccgaatgggctccgtaggccaaaccgccaccggccaccgccgccgcgtgctcttcttctcgctcccgtaccagggccacatcaaccccatgttccagctcgccggcctgctccacgcgcgcggcttcgccgtcaccgtcttccacacccacttcaacgcgccggacgcgtcccagcacccggcctacgacttcgtccccgtccagttcgacgggacgccggcggacagcgcggacacggtgcgggtgaccgtggagcacgtcctcgccgtgaaccgcgcgtgcgaggccccgttccgggagcgcctggccgcgctgctggaggaggaggaggaggaggtcgcgtgcctcgtcgccgacgcgcacctgctcacgctcatggacgtggcacgcgggctcggcgtgccgactctcgcgctccgcaccggcagcgccgcgtgcttccgctggttcatggcgtttcccatgctctgcgacaagggctacctgtcctctcacgtggcagagtcgcaggagccggacatgctggtgacggagctgccgccgtaccgcgtccgtgacatgccgtccgccagcggggccaccctcgggctaatgcgggacctgatttcgcgagcggtgacggccgtgaacgcctcgtcgggtctcatcatcaacacgttcgacgcgctggagacggacgagctggcgtcgctccggcgcggcctcgccgtcccggtgttcgacatcgggccgctgcacgtgcactcgccggcggcctcgagcagcctgctgcggcaggaccgagggtgcctggactggctggacgcgcggggccccgcgtccgtgctctacgtcagcttcggcagcctggccagcatgtccgcggcggacctggtggagacggcatggggcatcgccaacagcggccgccctttcctgtgggtgctccggccgggcctcgtccgcggcgcgccgccgagtcagccgccgccgctgcccgacggcttccacgcggagacgcgcggccggggcacggtggtgagctgggcgccgcaggaggaggtcctggcgcaccctgccgtgggcgcgttctggacgcactgcggctggaactccacgctggagggcgtgtgcgccggcgtgccgatgctgtgccgcccctgcttcggcgaccagatggggaacgccaggtacgtggaccacgtgtggcggaccggcctcgcgctccacggcgagctggagaggggcaaggtggaggcggccatctcgacgatgatgggggcaggcgggcccggcacggcgctgcgtgggagggcacgggagctctgtagaagagcggcggagtgcatggccaaggccggctcgtccgacctcaacgtcgacaagctcgtgaaccacatcatgtccctcacggcgcggcggtgccaatagtgacttaattatttgagtaacacatgctcatctgcataattaagcctgactaatctgtttgctacaaatccacttgcactggctgtttcaaagtttcaagtttgatggagacatggagcatggattagttactgttgtacacttgtgcatcttcatgtgcatcttcatataatattgtgtgtaagctttgctga

SEQ ID NO: 142927 - DNA, 1455 bp, Zea Mays
tttaactctcgtggcaacgaaatgacacgttagttcataaaaccaaatacgctaactttttctgatcggcatccaacgacgcaattgacatcccctcgcctaccccagctctacccgcgacgaagcatcaccaggtacccccagaaccctaatccaagcgacttttgttcggatctcacccgattacgagaaggatgacgtgctcaatggatctcccggccaagggcgggttcagcttcgacctgtgccgccgcaacagtatgctggagaagaacgggctcaaactcccgggattcaggaagaccggaacaaccatcgtcggcctcgtctttcaggatggggttgttcttggggcagacacaagagcaactgaggggcctatagttgctgataagaattgtgagaagatccactttatggcgccaaacatttattgttgtggagcaggaactgctgctgacactgaggctgttacagacatggtcagctcgcagctacagctgcaccgttacgcaacgggtcgcgaatctagagtcgtaactgctcttacactgctgaagtcacatctctttaggtatcaaggccatgtcagtgctgcccttgttcttggtggagtggattgtactggaccgcatcttcacactgtttatccacacggctccactgatactcttccttttgccacgatgggttctggatcccttgctgcaatgtcagtgtttgaatcgaagtataaagagggcctcactagggaagagggaatacaactggtgtcagaagcaatatgtgcaggtatcttcaatgacttgggtagtggaagcaatgtggatgtctgcgtgataaccaaggggaagacagaatacttgagaaaccaccagttgccgaatcccagaacttatgttagttcaaagggatatagcttcaccaaggggcagactgaggtgttgtccgcaaagatcacacatctcaagcagaaggttgaggtcactgagggcggtgatgctatggaggagtgatcctgtatgcttgcatccaggtaaaacagtcatactcttttttatattattttacttagtggaggagctaggaaaagacagaatggagatctttgttgtactttctcgactgaatccggactttcatgtcaaaggtgtttccaattaaatgcttgtttctgaatgtttaaactgcaatggtatgttacaactttctttgagatgttattgctactgctgcatctgttgcttggtgcatgaaggaaggggtagccttgaacgtcaggttatgaaatggcgctacaaaaatcatgcctgatgcagatgcactagttgtctagttgcatttatttggattacaatacagggctctgtcaaatctgcctgaatggtaaattatgttaagttcgtcaatatacttgtggtacagataaatctcaaatccgaaagtcattgagtt

SEQ ID NO: 142928 - DNA, 1168 bp, Zea Mays
aactttttctgatcggcatccaacgacgcaattgacatcccctcgcctaccccagctctacccgcgacgaagcatcaccaggaaggatgacgtgctcaatggatctcccggccaagggcgggttcagcttcgacctgtgccgccgcaacagtatgctggagaagaacgggctcaaactcccgggattcaggaagaccggaacaaccatcgtcggcctcgtctttcaggatggggttgttcttggggcagacacaagagcaactgaggggcctatagttgctgataagaattgtgagaagatccactttatggcgccaaacatttattgttgtggagcaggaactgctgctgacactgaggctgttacagacatggtcagctcgcagctacagctgcaccgttacgcaacgggtcgcgaatctagagtcgtaactgctcttacactgctgaagtcacatctctttaggtatcaaggccatgtcagtgctgcccttgttcttggtggagtggattgtactggaccgcatcttcacactgtttatccacacggctccactgatactcttccttttgccacgatgggttctggatcccttgctgcaatgtcagtgtttgaatcgaagtataaagagggcctcactagggaagagggaatacaactggtgtcagaagcaatatgtgcaggtatcttcaatgacttgggtagtggaagcaatgtggatgtctgcgtgataaccaaggggaagacagaatacttgagaaaccaccagttgccgaatcccagaacttatgttagttcaaagggatatagcttcaccaaggggcagactgaggtgttgtccgcaaagatcacacatctcaagcagaaggttgaggtcactgagggcggtgatgctatggaggagtgatcctgtatgcttgcatccaggtaaaacagtcatactcttttttatattattttacttagtggaggagctaggaaaagacagaatggagatctttgttgtactttctcgactgaatccggactttcatgtcaaaggtgtttccaattaaatgcttgtttctgaatgtttaaactgcaatggtatgttacaactttctttgagatgttattgctactgctgcatctgttgcttggtgcatgaaggaaggggtagccttgaac

SEQ ID NO: 142929 - DNA, 1356 bp, Zea Mays
tttaactctcgtggcaacgaaatgacacgttagttcataaaaccaaatacgctaactttttctgatcggcatccaacgacgcaattgacatcccctcgcctaccccagctctacccgcgacgaagcatcaccaggtacccccagaaccctaatccaagcgacttttgttcggatctcacccgattacgagtatatacatcccgcttcgctccttcccgtggcgattcgccgtgttcttgacctgtcgcggtgcctttgcgttggtgcaggaaggatgacgtgctcaatggatctcccggccaagggcgggttcagcttcgacctgtgccgccgcaacagtatgctggagaagaacgggctcaaactcccgggattcaggaagaccggaacaaccatcgtcggcctcgtctttcaggatggggttgttcttggggcagacacaagagcaactgaggggcctatagttgctgataagaattgtgagaagatccactttatggcgccaaacatttattgttgtggagcaggaactgctgctgacactgaggctgttacagacatggtcagctcgcagctacagctgcaccgttacgcaacgggtcgcgaatctagagtcgtaactgctcttacactgctgaagtcacatctctttaggtatcaaggccatgtcagtgctgcccttgttcttggtggagtggattgtactggaccgcatcttcacactgtttatccacacggctccactgatactcttccttttgccacgatgggttctggatcccttgctgcaatgtcagtgtttgaatcgaagtataaagagggcctcactagggaagagggaatacaactggtgtcagaagcaatatgtgcaggtatcttcaatgacttgggtagtggaagcaatgtggatgtctgcgtgataaccaaggggaagacagaatacttgagaaaccaccagttgccgaatcccagaacttatgttagttcaaagggatatagcttcaccaaggggcagactgaggtgttgtccgcaaagatcacacatctcaagcagaaggttgaggtcactgagggcggtgatgctatggaggagtgatcctgtatgcttgcatccaggtaaaacagtcatactcttttttatattattttacttagtggaggagctaggaaaagacagaatggagatctttgttgtactttctcgactgaatccggactttcatgtcaaaggtgtttccaattaaatgcttgtttctgaatgtttaaactgcaatggtatgttacaactttctttgagatgttattgctactgctgcatctgttgcttggtgcatgaaggaaggggtagccttgaac

SEQ ID NO: 142930 - DNA, 144 bp, Zea Mays
gtgtttgacacatcagatttaattccttatgggtgtttatttaaattattctttgatccaaaatgcaggcttttcttcacatgatgaactcttctacaagagaaggtggatgactaaagataagggtaatagttaataattatt

SEQ ID NO: 142931 - DNA, 529 bp, Zea Mays
agtacatataacctggtgccggcctactcctctgattaacgaagccgccgaaccacctcctatcgctaccaaactagaagcgccaatggggtcagggtgagaccgccgacgccgttcctcaacttcgccatcggtcggagtctgccaggcggccgggtttaggaacgccaatgccgggagagaaattaagatcgacctgtgtggatcttcctcaagcgcgagatgtagggatggatggcctcggccatggtgttcccttgccggtgcgggtctcgccgcggtgccgcaaccccgacgtggacagatctcgtctcaaccttgtcgctgacgagcaagctacagaggattctgaggttcagctggtagagactgctgagcaggagctcgttgaaggcaagttgtgcccttgatcacttcttttacccattcatgttcttattaatcataatgatctgcataggttaatttttatgggacccaataggttaccctagattttgactatctttataccttgtttcaccactgg

SEQ ID NO: 142932 - DNA, 594 bp, Zea Mays
gattaacgaagccgccgaaccacctcctatcgctaccaaactagaagcgccaatggggtcagggtgagaccgccgacgccgttcctcaacttcgccatcggtcggagtctgccaggcggccgggtttaggaacgccaatgccgggagagaaattaagatcgacctgtgtggatcttcctcaagcgcgagatgtagggatggatggcctcggccatggtgttcccttgccggtgcgggtctcgccgcggtgccgcaaccccgacgtggacagatctcgtctcaaccttgtcgctggtgagtcgcccttcagcagtctcagtaggagcgtagcaacccgtagcgccaactcaatcggtgtttcggtcgccggggaatcgggccgccagtcacgggcatgcgtactgtcgtggacggccggcagcgccgccgtggccgggtaccggaggtaggcgatgagtcgtgggccgtccgatccaagtagtgtggttgaggttagatctcacagggtcggctggtgcttttgtaaaagagacctcggcaaataatgaaaacaacccgcggtccagtctcgtgatcgcctgtatcttagtaata

SEQ ID NO: 142933 - DNA, 2054 bp, Zea Mays
aggctgcatgccaatgtagcagtgtcttcagccgacacccccatctttttcaatcctcaggcaggcgcagcgcaggcagcatccacagcctgaatccaccacaccagcaccacccagcaccgatggccggcgacgacggacgtgctccctccggcctccgcgtcgtgatgttccccttcccgttctggagccacattaaccagatgctccagctcgggaagctcctccgtgcgcggggcctgggcgtcaccatgctccacaccgacttcaacgcgcccgaccccgcactccacccggacatcaccttcgtgtccatccgcgagtccctccccgccgaggtcgtcgccaaccccgacatggtagagcagatgatgcagctcaacgccgtctgcgaggcgccgttccaggcggccctcgccggggagctgctggcgcgcggtacaacaaccggtggcccgcgcgaggtcgcctgcgtggtggtcgacgggcagtggtacaagatgctgggcgcggccacgcgtgtcgctgtccccgcgctcgtgctgcgcgccgacggcgccgccaccttactcagcatgctcgccaccccgcgcctccgcgccgacggttacctccccatcaaaggcactcgatccaccaccctcttctcctccccttctccgcgtgacgatcttgtgccaccggcacggcaccgaccggttactcgttttttcttgtcttgcatgcagaagagcggctggacgaggtggtgccgggcctggagcccctgcgcgtgcgggacctgatccgcgtggacggcagcgacgacgagacggtgctccgtttcatcacccgcaacgccgaggccgtgcgggcctcgtcgtcgggcgtggtgctgaacacgttcgagggcatcgagggcgcggcgctggccaagatccggcgcgagctgtccggccgcccggtcttcgccgtggggccgctgcacctggcgtcgccggaccccgcggcggcggcggccgcggggtaccaggacgcgccggaccccacctgcttggcgtggctggacgcgcgcccgccgcgctccgttctgtacgtcagcatgggaagcgtggcgcgcgtcgaccgcgccgtgttcgaggagacggcgtgggcgctggccggcagcggcgtgccgttcctgtgggtcctccgccgcggctccgtccgcggcgcggatgaggaggtgccgccggtcccggaggagctccgcgagacggtgaggcacaggggcaagatcgtggcgtgggcaccgcagagggaggtcctggcgcacccggcggtgggtgggttctggacgcactgcgggtggaaatccatggtggaggccatatccgaaggggtgcccatgctcgtgcagccgtgcttcgccgagcagatagtgaacgcgaggtatgtgacgcaccagtggggcatcgggtacgaggtcgggaagccgcttgagaggacagccatggcgaaggcggctagaaagctgatggccggcgagctggggccacaggggccaagggagagggctcggcttcttaaggcgcaggcgaagcagtgcgttgcagaaagaggaggaattagtttggctctcgacggtctggtggactacatttgctcgctgtgatgtttgatcagctttcaggtttcagcatgacgatggcgctctgaataatgaactgcatgttatatgtccgatgcaataaggaatagaatgtggacagcattttggtttacttaattctctggcaaatatatcgttggagtttatgagctaaggtctatttattagtatcacattgataattgataatggaagagaaacaacttaaatagcttctttattgtcactcttcgctacttctttttgtgtgagttctactcgcctataaattagtggaacatcctcctcttaaacacaagaaaaaaatcaatctactatattttagtgagagagctatcttagggaggctccagcatgccatgtcagcgtctagtttcagcaaacccggtttttgatgattttgcacgagtcggatagttcggta

SEQ ID NO: 142934 - DNA, 1976 bp, Zea Mays
cctcttcacatgcctcgtgtctcgtcaggctgcatgccaatgtagcagtgtcttcagccgacacccccatctttttcaatcctcaggcaggcgcagcgcaggcagcatccacagcctgaatccaccacaccagcaccacccagcaccgatggccggcgacgacggacgtgctccctccggcctccgcgtcgtgatgttccccttcccgttctggagccacattaaccagatgctccagctcgggaagctcctccgtgcgcggggcctgggcgtcaccatgctccacaccgacttcaacgcgcccgaccccgcactccacccggacatcaccttcgtgtccatccgcgagtccctccccgccgaggtcgtcgccaaccccgacatggtagagcagatgatgcagctcaacgccgtctgcgaggcgccgttccaggcggccctcgccggggagctgctggcgcgcggtacaacaaccggtggcccgcgcgaggtcgcctgcgtggtggtcgacgggcagtggtacaagatgctgggcgcggccacgcgtgtcgctgtccccgcgctcgtgctgcgcgccgacggcgccgccaccttactcagcatgctcgccaccccgcgcctccgcgccgacggttacctccccatcaaagaagagcggctggacgaggtggtgccgggcctggagcccctgcgcgtgcgggacctgatccgcgtggacggcagcgacgacgagacggtgctccgtttcatcacccgcaacgccgaggccgtgcgggcctcgtcgtcgggcgtggtgctgaacacgttcgagggcatcgagggcgcggcgctggccaagatccggcgcgagctgtccggccgcccggtcttcgccgtggggccgctgcacctggcgtcgccggaccccgcggcggcggcggccgcggggtaccaggacgcgccggaccccacctgcttggcgtggctggacgcgcgcccgccgcgctccgttctgtacgtcagcatgggaagcgtggcgcgcgtcgaccgcgccgtgttcgaggagacggcgtgggcgctggccggcagcggcgtgccgttcctgtgggtcctccgccgcggctccgtccgcggcgcggatgaggaggtgccgccggtcccggaggagctccgcgagacggtgaggcacaggggcaagatcgtggcgtgggcaccgcagagggaggtcctggcgcacccggcggtgggtgggttctggacgcactgcgggtggaaatccatggtggaggccatatccgaaggggtgcccatgctcgtgcagccgtgcttcgccgagcagatagtgaacgcgaggtatgtgacgcaccagtggggcatcgggtacgaggtcgggaagccgcttgagaggacagccatggcgaaggcggctagaaagctgatggccggcgagctggggccacaggggccaagggagagggctcggcttcttaaggcgcaggcgaagcagtgcgttgcagaaagaggaggaattagtttggctctcgacggtctggtggactacatttgctcgctgtgatgtttgatcagctttcaggtttcagcatgacgatggcgctctgaataatgaactgcatgttatatgtccgatgcaataaggaatagaatgtggacagcattttggtttacttaattctctggcaaatatatcgttggagtttatgagctaaggtctatttattagtatcacattgataattgataatggaagagaaacaacttaaatagcttctttattgtcactcttcgctacttctttttgtgtgagttctactcgcctataaattagtggaacatcctcctcttaaacacaagaaaaaaatcaatctactatattttagtgagagagctatcttagggaggctccagcatgccatgtcagcgtctagtttcagcaaacccggtttttgatgattttgcacgagtcggatagttcggta

SEQ ID NO: 142935 - DNA, 112 bp, Zea Mays
gaaaaaaaaaaaacatgccaaattagttggtttgagcaagtaaatttatacttaagatctattcttcaccttgtgcttcctagatttgtcacccactcaccctgcaataaac

SEQ ID NO: 142936 - DNA, 2202 bp, Zea Mays
gtgcccccacgcgcctacccactgttcccggctccccacccgctccactccgtcccgtcccgtcccgttacaaaaccccgagctgcaaccccacagccagagagagagactctcccggctcccctgcctgcgcgccgtctcctccaggctccagcgcctcgcggccaccccgtacgtaccacggcacggctgcacggccgatggcgtaccccgccgcgccgcacacgagcgcggccttcctcgctagcttcgcgacgccgctccccgcgcgccgcgcctcgcccccgacccggcgccgcgcggtgtcggtcgccgccatcgccaccaccaccacctgcgtcttcgccgacgccccccgtgggatcaaggaggagcaggcggactcgggcgcccaggcggcggcggctgcggctgcgcggagggacgtcagcccggacaccgtggcctccatcatcctcggcggtggcgccggcacgcgcctcttcccgctcacgcgtacaagggccaagcccgcggtgcccgtcgggggatgctacaggctcatcgacatcccgatgagcaactgcataaacagcaagatcaacaagatctacgtcctcacccagttcaattcccagtctctcaatcgccacatcgcaaggacatacaactttggtgagggagttggattcagtggcgggtctgtggaggtgctggcagctacccaaacagctggggaatcaggaaagaaatggttccagggaacagcagatgctgtcaggcagttcctctggctttttgaggatgcaagactcaaatgtatagaaaacatactgattctgtctggtgatcatctgtatcggatggattacatggattttgtgcagaagcatgttgactctggtgctgatatttcagttgcgtgtgttccaatggatgaaagtcgggcatctgattttggattgatgaaggccgacaggaatgggcacatcactgatttccttgaaaagcccaagggtgcagatttggaatcaatgcaagtggacatgggattgtttggattatccccagagtttgcaagtacgtacaaatacatggcttcaatgggaatatatgtattcaaggcagatgttctcagaaagcttctgagaggccattatcctacagctaatgattttggcttagaagtgattccaatggctgcaaaagattatgatgtgcaggcttatttgtttgatggttactgggaagatattggaacaataaagtctttctttgaagcaaaccttgctctcactgatcagtctcccaacttctatttttatgatcccgtgaagcctatttttacatctcctagatttttacccccaaccaaggtagaaaactgcaaggttttgaactctatagtttcacatggctgctttctaactgagtgcagtgttgagcactctgtcattggtatccgctcaaggttagaaccgggagtgcagctcaaggacaccatgatgatgggggcagattactaccagactgaagctgagagattatctgagctgtctgttggaaaagtcccagtcggtgttggagagaacactaaaataaggaactgtatcattgataaaaatgctcgaattggaaagaatgtagtcattatgaactctgagaatgtgcaagaagcagacaggccagctgaaggatattacattcgttctgggataactgtggtgctcaagaatgcagtaattctgaatggtacaaaaatttagaagattatagaattatctgcagaataccaatccctcagtgaagagcacaccattgaagcccacagcagagttctacgacgcagatgcagtcaataaaaccccaatagcacaaaagattaggagactgtcgatgcagctaaagaagtgtggatataggcatggagcacctgcaacacgccaacggtacggccaaaccatgagcatgaggccatttcacgtcctttcataagcctcggctagtgccggcgcgcgcagggtatcttttgttccttttttctagcagtaatttacgtgaagtgtctgtacatgtagagggagagatagggtacaagtacgagagagcatgttatagtacctactcttattatttgtttatttattgttgtgccgaagaacgacccgtgcatctcatgtgccaagtccatgcctaattgcctattgatgcccactttcgggg

SEQ ID NO: 142937 - DNA, 1567 bp, Zea Mays
gctcgggtggtgcctcgggttcagccaacctcgcacatggcgcgctgctccgtcgcgaaaccgctctgcgccaccaccgcgactccccgccttacccgtcgctgccggcagctctccgcgaacgccaccaccccggccatggccaccagtaaagcacggttgccggccctaaacaaaccggccaaaccgccgccgcctctcctctcgcgtccgaagctccccgtccccaccaacaccgcgactgacaccactagcggcaaggattgcaccaagaaaccaccgccggaagctacggactcacatccgccctcgtccggcgccggcgacgtgctccgcctgatggacgcgctgggcatcccgcccgacgaggacatctacatatcccttctcagggagtgcgccgacgcagcagaggtggcctccgtgcacgcgcacataaccgcccgtcgcgcctccgatggactcccgtcgccggtcgccaaccgtctcctgctttcttacgccgcgtgtggggacatcgaagctgcccgccgggtattcgacggaatgcccaccactaacggcatggcgtgggcgaccatggtgtccgcctactcggatggctgcctccaccatgaagcgatgcgtctgttcgcccacatgtgccatggaacgccggtcctggacggcgattgctactcccatgccatcgtggccgtgctgcggtcatgtacccgtgcaggcgagctacgtctcggtgagcaggtacacgctctcgtcgtcaagaaaggcaggatccacggtgacattggcagctcgctagtgcagctgtactgcgatggaggcggttttcacagaagcgcgcggcgagttctcgcgacgacgatgcagcaccactgtcaggaaccagtccctgaggcggcctggacgagcctgatcacatcctgccaccgtgaaagcctactgagcgaggctgtggatgtcttcagggacatggcgtcctcgggcgttccaaggagcagcttctccctgtcgagcatcctcgcggtgttcgcagagtcacaggacccagggtgctgctgcgggcagcaggtgcacgccgacgccatcaagcgcggcgtggacacgaaccagttcgttggctccgggctcatacacatgtacgcgaagcaagggcagctggcggacgccaccagggcgtttgagacgatcggtggcaagcctgacgccgcgtgctggagtgccctggccatggcctatgctcgcggcggacggtacagagaggccaccagaatcatgtatcagatgaaagctgccgggatgaatccttctaaggagatggccgatgcggttaggttggcttgtttcagatgataatcctgaactactagtagtctggtagttgttgccgccaaagagtgagttactttgattgtacaattgtgttaagcagacgccagtgcactggtgtctggttccaaatgataaggtactttttttcatttaggaggccgccctatagtcatatgctgtactactcattaactactctctttttgtaatgctgggcgaatatggtctagggcct

SEQ ID NO: 142938 - DNA, 748 bp, Zea Mays
gggtcgtatactcatttctgtaatttccaaaacatcaggaaacaatgcactactttacagaagggaaaatcctctctccttgagatgctcttttcgctccttgaaagcaagaaataaccgttcatcagctgtggcacctaaggactactgtgaaacttacatccaatttttgagagataaatggatagttcctgatttagatcctccaagccctaaagatgtggacctattgtatcagtttatagataagtgtaaaaggctcatggtagtaactggggcaggaatgagcactgaatctgggattcctgattacaggagtcctaatggtgcatacagtacaggtttaattttaaaccactttctcatcaggttgcatcatcgtgctgggagtaatccacttgagctgcatgggagtgtatatgaggtaatttgtttagaatgtctgaatgtggtacatccatcagtcgagaatcattccaggaggaatgtggtaaataacactgacccttgttggaagcttgagatatatcattcgcacgtcagatgttgggtgcagtcactgatgcagatatacctacaagttcgaaaagaaaccgacagaagatgttgtcgatctgacccccaaaaatccgtattgggaagtctcacaaatttcatagacctcttgtcatagcggtcacaaaaggttgtgttgacaatagccacacagccttcggtccagttacccgggttcctcgtcgcataacct

SEQ ID NO: 142939 - DNA, 1861 bp, Zea Mays
ccgtaaacccacccacaccccctgctccttttaagcagccccgctcgctctccgcagtgaccgatagaacacgacctggggggttcagatcggatcggaagcttccataagtttccatcgggcttcgccggtatggcgatccgcaaggggtcttcgtacgccgtcgcggcacttctcgcgctcgcctctgtcgccgccgttgcaggggaggtcttcttccaggagaagttcgaagatggctgggaaagtcggtgggtcaagtccgagtggaagaaggatgagaacatggctggtgaatggaaccacacctcgggaaaatggaatggagatgccgaggacaaaggtattcaaacctccgaggattacaggttctatgccatttcagccgaataccctgagttcagcaacaaggataagaccctggtgctgcagttctctgtgaagcacgagcagaagcttgactgcggtggtggctacgtcaagttgctgggtggtggtgatgtagaccagaagaaatttggtggagacacatcttacagcattatgtttggaccagatatctgtgggtacagcaccaagaaggttcacactatcctgaccaaggatggcaagaaccacttgatcaagaaggatgtgccttgtgagactgatcagttgactcatgtttacactttgatcatccgtcctgatgcaacatacagcattctcattgataatgaagataagcaaactggcagcatctacgagcactgggatattcttccccctaagaaaatcaaggacccagaggctaagaagcctgaggactgggatgacaaggagtacattcctgaccctgaggacaagaagccagagggctatgatgatattcccaaggaaattcctgaccctgatgctaagaagcctgaggactgggacgatgaggaagatggtgaatggactgcccctaccattcccaacccagaatacaagggaccatggaaacaaaagaaaatcaagaacccgaactaccagggtaaatggaaggcacctatgattgacaacccagattttaaggatgatccatacatttacgccttcgacagcttgaagtacattggcattgagctgtggcaggttaaatcgggcactctgtttgacaacatcatcatcactgatgaccctgccttggccaagacttttgcagaggagacctggggcaagcacaaggaggcagaaaaggctgcttttgatgaggccgagaaaaaaaaggaagaagaggatgccgccaagggtggggatgatgaggatgatgacctagaggatgaggaagacgatgagaaggcagacgaggacaaggccgactctgatgccgaggatggcaaggattctgatgatgagaagcacgacgagctctagatggcgaggatgatgttgcggccgctggcctagatttatcagctctgccactatgaagttctttttttttcccgtgaccaccaagaatgtagaacactgctaataagcagatggacagtttgggtcgccgtagcgctttgtagtcatttttcccattaaagccgataacactgaacaaggaggaaggatcttttgcccacgattgttatctccctttctgatgttaaatgtgagcctttgcgaaagcactggttccgtcacgcgtgtggactttgcatgtgcggcgtgtttaggttgaggatcgtcgtgccgttttcgcgtagggaaacgttcgtgcctgatcactgttctagctatcgatatggtctcttttcaggcaaactcgctccgtttcctcctctcagtgttactgattttgcctggtataagatttgttattttttttattgggcccgtccatata

SEQ ID NO: 142940 - DNA, 210 bp, Zea Mays
atggagccggatgctgttgatttctttggggaatgtatgaatagtccccgaaatggtcgtactccgcttgcaaatgagatatatgagcaaatggttgcagagaaggaaagagagctagaagaaggagaagcacaaaagtcaccctctaagctcaacaggccgcacttgaagaaaaccaaagtttgttgcgccagacccaagaggaagtga

SEQ ID NO: 142941 - DNA, 1083 bp, Zea Mays
tatctctcgatattcagcttgattcgttactgtcttagttatttttctcgcttaattaaggcacgaccaaagaaagtgatggggaatctatggatactagcagcgaaggtagcagtgaaactgatgatatccgattaagaagcttaactgtggaagctacacatcgattggatggtggctttcaaagggatggcgatgaaatgcactcaccatcgactcgtccaatttttgaatatcttgagacagatccaccatttggtagagagcctttaacagacaaggtatcagttcttgcaagtagatttccagatttgaagaaattcagaagttgtgacctgctgccaaccagttggatgtctgttgcatggtaccctatctatagaatccctactggaccaacactcaaggatttggatgcatgtttcttgacatttcattacttatcaacaccttccaaggatactgatcccagtacaccaccatgccccaatttgggggggcttaattgcaacatgaacgccgctggcaaactaacattgcccgtctttggactggcatcatacaaattgaagagctctatttggtcgtcaaataggcctgaggagcagcagcttgcagcttcactgacgcagacagcagatgactggcttcgccatcgccaagtgtaccatccagacttccggttctttctcacccacttcaacacagcattgagatgacatgagatggtcgcatctctcgctgtaaattgtcttcgttagtacaacctccgttctcgaatatttgttgtccactatatttttgaactaaaacgcgacaaataaaaaagaacggaggaagtatattatatgttgttggctgagccaggctacctgtaacactatgtggttgaccgcgtaactagcgcttctctgaacttttttcgtatggttcagtagttcaagccagacagctaatttgtaacttctccaataattcttttgttgtaggtaaacttttgagagtaaacattatggagatctgtaaaacagaaactgatggttataaactttttaaacttagacttgagaacacattgcttat

SEQ ID NO: 142942 - DNA, 717 bp, Zea Mays
cggaaggaaccaaacaggcaaacggaacggaacatctcctcggctccttcctcctctggccagctgctgtcgcccctcgcccgccacggcacctcctccacttccagatcttcccgccgtcccaaaaatagtgcccaccaaaaccctaccctccccgcccgtttcatcccctccctcgcggcctccgaccccgcccttccgccgcctgactaataaaccctagcacccacctccgccgctgccatggcgggcccgtccggcgcatcctcctcctcgcgcggcggcggcggcggcggcgttgaccgcttctacagcccgccccacgtgcgccgccagcagcaggaggagcagctgcagcggctcaagggcctggcccaggggcagcgcacgtcgtccccggcggcggggacgctcacgcccagggccgccaggcagaagacgccaccggctgagacgcccgccccggttaacgagtccgagaggcgggtcgacgcgtcctccaagccgcccgtgtccgcgacggcctccaccgccaaggcggctgcgacggctgatgcggtcacgacctcgccgccggcgcctgcggtgctggatgaggtcgggaatctcgataggttccttatctccaccacgccatctgtgcccgtgcactacctgcccaagaatcatgcggcagaactgttgctgattgttagatttttgcctgatggtgcataa

SEQ ID NO: 142943 - DNA, 270 bp, Zea Mays
gcatctatccagaccagcatgaggggatggaggattggtgatgttacgaattctcgaccatatttctgccttggagatctctgggaggctttcaatgagtggagcttttacggggctggtgttccccttgttataagtggaagtgaatctgtgattcagtattatgtgccatacctttctgctatacagctgtatgcagaccctttgaagcttccatcgaggatcagatacaattttctgttcttcaatagccttgctttagaaatgtga

SEQ ID NO: 142944 - DNA, 351 bp, Zea Mays
atgcccaggcacttggtcggtgactctgtgggaaacttgtcactcaaagagctgaagcagctggagagccgccttgagaaagacatctctaagatcagggccaggaagagtgagctgctggctgccgagatcaattacatggccaaaagggagactgagcttcagaatgaccacatgaacctcaggaccaagagccaagctaatgtatggctgacatcaacctgcaggacccaagaacatgccctacaggccaccgaccagaagatcaacctgcaggacaccaagaacatgccctacaggccgctcaagtgccagtcctgctgcccaggattcttctgcccagaccactaa

SEQ ID NO: 142945 - DNA, 2084 bp, Zea Mays
atggctgagggtagctggaccccgactgccgagctacctctgcgacaggacccggcggtggacgacgacctgccgcaggtggtggtccaggagaagcagcatggcggcggtgctgccgctcggactgcgatggcgacggcgacggcgacgcgggacgggtcggtgggttggagcggcaagccgtgccgcagagacaggtccgggggatggttcgccggcttcctcatgctcgcgaaccaggcgctggtgacgttcgcggtcaactgcgtggggaccaacctggtgacgttcatgtcggtggtcatgaggctggacaacgccgacgccgccaacaaggccaacaactgggccggcaccacctacgtcttctccatcgtcggggccctcgtcagcgactcctactggggaagatacaaggcctgcaccatcttccagctcatcttcctcgcggggctggtggagctggccgtagcctgccacgtgttcctcgacaagtcctgccacttcggcggcggcggcggcgggcggcaggagcactgcaggccgccgacgacggcgcagtccctcgtcttctacgtctccatctaccagatcgcgctcgggaacggcgcgtaccagccggcggtcaccacgttcggcgccgaccagttcgacgagaccgacgcgcgggagcgccggtccaaggccgccttcttcggatacttcttcgtcgccaacaacctcggcggcgtcctcgccgtcaccgcgctcgcctacatggaggacgagggccagtgggtcctggccttctggatcgccaccgccgcggcgctgctcggcttcctcctcttcgccgtcgggaccatcaggtacaggcacttccttcccagcggcaacgctgttgtcagcgtctgccaggtggtcgtcgctgccgtcaggaaccggcgcgtcagagctacggttcgagcgcaggatatgtacgaccccgataccgatggagatcgcggcaagaagggggtcaggaagatggtgcacacaccagagtacaggtgtctggacaaggcagcggtgatcaaagatccagcgtctgcgttccgagcaccggcaggtcaaccacagggccattcctcctccaagcccaacccatggaggctctgcacactgacccaagtggaagaactgaagtgcatcctgaggctagtcccgatctggctctgcagcatcctctactccacctcctactcgcagatgtcgtcggtgttcatcgagcaggcgcagaccatggacgactccctgtcgaagctgacgatccctcccgccggcatggacgtcttcgagatactgggcgtcacggccttcgtgttcatctaccgcttctgcatcgtcagggtcatggccaaaatatcgcacgagccgacggagctccagaggatgggcaccgggctcgtgatctcggccgcggccatggtcgcgtccggcgtggtggagcagcagaggctggcgcgcgccacggccggcgtcgacgcgtccagctctctcagcatcctctggcagatcccgcagtacctgctgatcggagcgtccgaggtgttcatgtacgtcaccatgacagagttcttcaacgaccagctcccggaaggcctgaggagcctcgggagcgccatgagcgtggcctccatgtcggccgggagcttcgcgagcagcctcctcgtcactctggtgatggccatcacctgtagaggcggccggcctgggtggatacctcaggatctcaacaagggccatgtggactggttcttctacctcatagcagcccttaacgccgtggacctgctggcgtttgtggtgtttgccaagaggtatagaccggctccggtgatcatacatggagaagatgaaaccggtggtgtcgagaaggcccaggatgcggaggaatgcatttgaatgcatatctcaaacattccatgtgtgggcctgtttagatatactccttatacatgtgttattatagcgtggattgatatggaatttaaaactaaattccataccaatccattctaaggcacatagatgaagctagatacataagcattcaaacgaacctt

SEQ ID NO: 142946 - DNA, 870 bp, Zea Mays
atggcggcggcggcgctgtgggcaccggcggctcgccgccaggtcctcgtcgcacccacccttctccgcatccggcgttacctctccacaaaaccacccccaccgcaccaccccaacactctcgccaccgagcttctccgcctcctctccgccgcaccctcctggacgcccgaccttgccggcgccgtctcttcctccctttccactgcctccgcctccgccggcgatgccgttataaccgtcctacggtccctcaagaacccctctctcgccgctcccttcttccttgcctcctcctccgcctccccgcacccgctccccgccgacgcatacaacgccgtcctcccgttcctcttccacgacctcgcagccatggaagaagttctcgaggaaatgagcgtccttgggtacggcgttcccaaccccacctgcgccgaccttgtcgcggcactagtgcgcacccaccgccttgacgacgccgagcgcatgattgggacaatgaggcggctcaagttccgcccagcgttctcggcgtacaccgtgctgatcggcgcaatggcggaggccaggcggcctgaacgcgcgctggaactgctgcggcagatgcaggaagtcgggtacgaggtgggcgtgccgctgttcacgacgctggtgcgggctttggcccgtgaggggcgcgttgagggagccctggcactagtggacgaggtgaaggggaactgcctcgagcctgacattgtgctgtacaatgtgtgtattgattgtttcgggaaggctgggaatgtggacatggcctggaagttcttccatgagttgaagtcgcaagggttcaagccagatgatgtatcgtacacgagcatgatttgggtg

SEQ ID NO: 142947 - DNA, 549 bp, Zea Mays
gacagcgaggatattatagctagtggtgcgggcgatgatgcaatctgcttttttactgaggagaagggtagcatggttgaaaagccctcatacagattaatattaaagaaagagaaggcacatgtcatggacataaactgtgtgcgatggtgtcctcaggacccaaggttattggcatctgcgagcgacgacggcacggtgaaattgtgggaactgagagggaatgtgcttgattgagttctgttgtaatcactgtagcgtgcgttgagataatagagcagattaggtatcacctttggatttctgttctactgagctcggctctctgtagttcatacttgtatatcgagagggtattttatgatggtcttttacaagatttaccgtgcaaactatgaaccgtgccatcctctcagagacatggtattgatcgtgtatacattatggaagggacagccgaacatgtccaaccattttttaaagttcaattcatgtacaatgatgagtgatgaataatgaataaagatttgcagcttcttgtatgcggaa

SEQ ID NO: 142948 - DNA, 981 bp, Zea Mays
gccatggacgtcggcgcggagctgcgcgaggcccaccgcctgacgggccacgccgaccgcgtgtgggcgctcgcttggaaccccgccccgggccccggctccagccccgttctcgcctcctgcagcggcgacaagaccgtccggatctggaagcgcgcccctgacggcgcctggcagtgctcggatgtgctggaagacacgcacaaccgcacggtgaggtcctgcgcctggtcccccaacgggaagctgctcgccaccgcgagcttcgacgccaccacggcagtgtgggagtacaacggcgccgactttgagtgcgtcgccacgctggaggggcacgacaacgaggtgaagagcgtgtcatggagcccgtctgggtcactgctcgccacatgcagccgggacaagatggtgtggatatgggaggtgctgccagggaacgagttcgagtgtgtctcggtgctgccgggccacacgcaggacgtcaagatggtgcagtggcacccaattcttgacattttggtctccgtcagctatgataattccatcagggtctgggctggtgatggagacgatgagtggcactgtgtgcagacactaactgaagccaataactgtggtcattcatcaacagtatgggcattatcctttaaccttaaaggtgacaggatggtcacatgcagtgatgaccaaacgttgaaaatatgggacacaagtgctgatttgtctcaaccaaaaactggcgaagtccacaagaagctccaatctggctcatgcacaagtccatctgattttgctgcggatgccaggctgacctttaacaacgctatggcttataatccttgggggcatgctgtgcacgacatgaccattcagttgaacaagatgtttgagagtcgatggaggccaaatgagaagaaactagcttttgctgccactgagaaatttgaagaggaagacaatacctcctatggactgcagtga

SEQ ID NO: 142949 - DNA, 1085 bp, Zea Mays
ggagatcccatgattaaagcaagtatgaagccctactgcgtggccatcatcatacaactgatctacactggcatgttcgtgatatccaaggctgctttaaactagggactacgtgttcatcttctatcgccaggaagttggctccctcatcttgctgcctacagctcttctacaaaaggtatgtggcaatcatctttgtatcgccagcaggcagcagtaaactgttcgattaattcagatctgtttacctgtggaaattgcctttcaggattacggtaggggtgaacctataccacgtgagcctcaagttcaccactgcaacggtggcatctgcggcagacagctcgctcccggccgtcaccttcttcctggcggtgcttttgaggatggagagagtgaagctgaggagcgcttcaggcatagccaaggtcgccggcgtagcgctctgcctggcgggagtcttcaccatcgccttgtacaccggcccgtccgtgagccctatcaaccaccaccgtgccttcgcctctcaagacccagcaccgaaacctgttgtagttcccagggggtatggatcaaacggacgttgctcatggtggtcaatgatgctgcttgagacttccatgttattgtgttctgatacttgagacttttattatgactatgtatgagatattgtctcttattagtactggatgatgagatgtgccttattatgactatggatgagacttttgtgatgtaattgattagactatggatgagacttttgtgatgtaattgatgagactatggatttaaatattgttatgtgattgtgtgtgagatgttttatgtgaaaaatatgttgtgctatatagctgttgatatatttattatgttgtggaatgtggagtaaaataaaaataaacagcaattgtaatgctggtcaaattaacttcctagaggcttattaagccgtaggaagttagccagctacctttctaggggctacagtcagccgtagtaagttagtcgtaggaagttagtcagctgacggcgctgacggcgtgaagctactaacttccgagaatctactaacttccgag

SEQ ID NO: 142950 - DNA, 895 bp, Zea Mays
ccagttcagggggatgctaactcaaagcgcagcctcgtgccctcctcttacatctgaagcaagaactccgcgctcggtgcggcaaccatgtgtggctgctggtacgactgctgcggcaaggtcaaggattggctcatctttctcgccatcgtcattggccttgctattgctgccgccgtcgtcatagtcatcctcatctttggaggccccctccggcatgtgaagatcagcgtcgaggacgcgtcgctcacccggttcgcgctggtgaccacgcccacgacggcgctcgcgtacaacctcacgctggcgctggccatccgcaaccccaactgggccatcggcatcaagcacgacaagccgctggaggccgcgtacagcttcgacggccagccgttcgagcgcgtgcaggtcgcggacaagggcgagaagcagggcgccaggaagacggtggtgtaccacctggcctcgagctcggacgccaggggcgtggcgttgggcaacgccggcgaggccgagttcaggaaggagaacgcgacgggactgttcgaggtggaggtggcggtcaccggcaagttcaagtacacgctgcgcaagaccaagtgcaagatcgaggccacctgccccctcaaactgcagctcgccacgccgggggccgcgacgtcgtcgtccgtcgtgttccagaaggttgactgcgaggtcgccaaatccgacgacaagtactgctagagatgatgatgggtttgcaaatgtcattgatttggagagatgatgtgttgtgttttgctcatgcatgtccccctcttgttggtgctttgttgcagttgagttgaagtgtgtgtgtgtgtttcgcccgtcagattattcgttgttttcaatggccaatgtttgaacgaga

SEQ ID NO: 142951 - DNA, 1005 bp, Zea Mays
ccgctgccagcccgtcccttcaccagcatcccttcctcgccaagaactcgtctcggtctcctctcctgtaccgcaagtccacgcgcttcctcccctctcctctctgcctcttttctccctcctcggtgctcctccaccagaaccctagctgccgtctcccactctcgtcgggcagctctctcagcagcacctgaggccgttgtctctccttgcgcggtctgccccagccctgacccccggagatccggggctgttctcggttctttacgcggaggcggaggttggtttctgatctggggatcggttcgtgcggggatgaatacgaggccggtggtgctcgtcttcctcctgctcgtgctcgtcatcacgtcgcagttcgagtggaagcagcagatcggggaggccgcggacgccgacccggccgctgcccgccgccggcagcagctgcacgccagggaggatgccgtcaaggaaaagattatattatcccaggagaaaaatatccaacagctcaaccagcttatcgagagccttcagcgccagctactgcactgccgtggtagcaataacactgttcatgctgctgccgccgttgccacagaagcgagtgaagtcgagggacatgaggtcattgaagatgagaatagacgatgatccttggcgtacatgcttctacgatgccggtacagctgctaaagagcagaacagtcgtctgaatgcttgaattcactgtattgtatatttgatactccgccgactagtggattcccccgaccctgtaagcctgtagagaattgtaattttttataatgtgatttatttaggtcgcggctactaattcacctggaaagttaccttgccattctttcttctgatgatggcgctccatcgatgcttgattgctccctcaatggctgaattgtatgcagtctctgatttttgtatttgacctgtgaaggcgttcagatgaaaagttggctgatgaactgttcagttcaggtatgc

SEQ ID NO: 142952 - DNA, 162 bp, Zea Mays
catctcccgcagcggttccccctaaatactccccttataccccactaccactataaaatatcattttctatatcaactatcaattttttatctactaatatcattttctatatcaactatcaattttttatctactaacaattactcgtggatccacagcac

SEQ ID NO: 142953 - DNA, 428 bp, Zea Mays
tttttgtaaaaagatgacgcaggacgaccgttgaaactgatgctttaagtatagtagagatatagatgaccaaatgggtcgtgtctggcgagccggcccgaggcacgacccatttaatagtgtctgagccaatccggcacgagcgacgtgcggcgcttgggccgtagcctcggctcgacacgattattttttattttacaaaaaatcatatatatacatatgtacaatttatattaaatattataaacacctgagcatgatgttttttactggttagacagctttgcctaattctctcacccttcttccatcagagtgtgggtttaaaccctacctcctgcaccgctttttaatattttatgctgagttgatttggaagaaatgttttacgctgagttgatttggaagaaatataggaacttttttgt

SEQ ID NO: 142954 - DNA, 1063 bp, Zea Mays
atggccagcctccaagtcactcctacttcggcgttcactgagtggaacgagctgaagttcgaaggcctgtacctgttccacacgcccctgggctcaggcgccaaccaagctcgggtcatagacaacaaggcgccgattggcatcggtgccaccgtagttaacaactggacagtgtatgacgggccagggccgaacgcaaagctggttgcccgtgcacagggcttgcatatccaagccggcaactgggtcaactccttcagcctagtgttcgtggatcaaaggttcagtgggtccacgcttgaagtgaccgggatagtagttgaatccggggagtgggctattgttgggggcaccgagccccagcgtctgaagagcatcaccgttgctactggcatcgccgtgacctcgattgccttctcctacgtcgactccgccggccaaacccaatctgctggtcgctggggcggttccggtggagaaactgagccggtgatccagctcggcgactccgaggtgctcacggagctgtccgggacgatcggcaacgtcgacggccacaccgtcataacctccatcaagttcgtcacaagcctcaagacctacggccctttcggagcatggggggacgggagtgacactccgttcgcgatccccgtgcagcaagggagtgccatcgttggcttcttcgcacgagctggggtctacctcgacgcccttggcgtttacgatgcaaacatacttgatgtgtttgtctctagggtgcggcaaacatttgatacaagggaagaagcctacctcttttaccttgactatgcaaagttggctggttttagtgtcaggacaaagaggtgtaattgcaactgctggtgtggtgtgattgcaaccccgcattaggtgtgattgcaactgctgtataattctacccaaatatctgttaaaaaatgtaaacaaaatgattgcaactgctggtgtgttgtaattgcaactactggtgtggtgtggatgcaactgctgagttgctctgatgtgattgcaagtactgaataactctgaaaattttgtt

SEQ ID NO: 142955 - DNA, 1396 bp, Zea Mays
cattgactgacctcgtccccaacccaaccctggtgaagctgtgcgtaggatcaatcaatctcaatctcaccttgggtagagaccgcgcgcagccccagccccagcctcatggccgacggggtgttctataaatagagttgcttgtcccctaccttcggacgcacaacacaagagctactactacagctcctcatctcaagtgtgtagacgagacagagagacactgagagagcgccatggccagcctccaagtcactcctacttcggcgttcactgagtggaacgagctgaagttcgaaggcctgtacctgttccacacgcccctgggctcaggcgccaaccaagctcgggtcatagacaacaaggcgccgattggcatcggtgccaccgtagttaacaactggacagtgtatgacgggccagggccgaacgcaaagctggttgcccgtgcacagggcttgcatatccaagccggcaactgggtcaactccttcagcctagtgttcgtggatcaaaggttcagtgggtccacgcttgaagtgaccgggatagtagttgaatccggggagtgggctattgttgggggcaccggtcagtttgccatggcaaacggtgtcatcttcaagaagttccatgagcagagaagcgaagggaacatcatacaactcaccatccatgctttctgtccggtgctcggaccgagaaagcgctcggccgcaaaagttggaccgtggggtgggagcggcgggtctccggtggacatcacggcagagccccagcgtctgaagagcatcaccgttgctactggcatcgccgtgacctcgattgccttctcctacgtcgactccgccggccaaacccaatctgctggtcgctggggcggttccggtggagaaactgagccggtgatccagctcggcgactccgaggtgctcacggagctgtccgggacgatcggcaacgtcgacggccacaccgtcataacctccatcaagttcgtcacaagcctcaagacctacggccctttcggagcatggggggacgggagtgacactccgttcgcgatccccgtgcagcaagggagtgccatcgttggcttcttcgcacgagctggggtctacctcgacgcccttggcgtttacgtgcgatccctgtgatgagactctcacgagaggggcagctagctgctctgctagctccaccggctttcatcgcgtcaccctccgttttatttcctactgctacttgttgtgtcttgaataatttcgataaataaaggactccgccagagattggcacttgaatcgatccataaatgcttgtgtgaattagtgcttcaagtttccaactccattaattgtccattagatttacaacactgtgtccaaccgagcta

SEQ ID NO: 142956 - DNA, 99 bp, Zea Mays
gtttgtttcgtgatgagggatgaactgaatatggtcaactttctggtcatattaccacactcagaattatatctttaattcaataagataacaacattc

SEQ ID NO: 142957 - DNA, 1555 bp, Zea Mays
gaaaaggaaacagaaaaaaaaaatcacaggagaaaccgatttcccccttttttctttattttcttcgtcctcttcgtctcgactcgccgcccagtcacctcaaatcccttcgatccaatctccaaaccctaggcaatccaacatcaaagtattagctgcccccttcgtcaaaccgcggcggcgcggccatggcccacggcggcggcgccgggaaggcgaaggtgacgccgaacctggcggtggacggcgagggcacgcgcacgctcaaccgcactgtgctgcagcgcctcgacccggccgttgaggatattctcatcaccgcggctcacgtcacgctgtacgactttgacaccgatgtcaaccagtggagacggaaggacgtggaggggtcgctcttcgtcgtcaagaggaatgctcaacctagattccagttcattgtcatgaaccgcaggaatacagataatctagttgaagatctcttgggagattttgaataccaactccaagctccttatattatgtaccgaaatgctgctcaagaagttataggaatttggttttacaactctcaggagtgtcaagaagttgcaaatctttttagcaggattctgaatgctttctcgaaggtgccaccaaagccgaagattccccctgttcaaagtgaatttgaagaggtggaagcagcacctgtgttggttgatggccctctagaaccgcaaacgtcaaatatcatgtcaactactactcacattcaagaggatcctttatctgcatttttcagtgcagctgcaaatgctggtggcaactctgctgtagctgttgcaaggcaaccaattcaactttttggtgctactccggtggctacacatgcagctactagtatcactacaatacaatcgccaggcttgcattatttgcttccttcacaagcctcatcggtttctgggatgcctgctgatgctcatggttctataggaaggtccacaaaccttgtaaatccatcacttttctcaccattgacgtcttcacagacaacaatggtgtgcactaattctgtagtagcaattgctccacctcaacatcctcagactgctcagcagccgcaaagtgctcccttgcttcagccttttctattacctacggcttcaccatctccaccatatgggactccattacttcaaccatttccgccacctaatccatcgccatctcttgcgtctgcaccagtcttgagcccagcactgtctagagacaaagtccgagatgcattactgagacttgtggagaacgatgaattcatagatttagtctacggcgagatcatgaacagacagtaatggattttcaaggtacagtcctctccatcaggctagcttgtgcttggactctgtcattatctgttgtctaggctatttcaagttatcctgtaaattcattgatgaaatccttcggtttgtggagcttgtgctattaatgtacttttgacatttacaaaatctgtgctgtgttcgtggtgcagaaaagttttgttctgagtattatcttgaaacttttg

SEQ ID NO: 142958 - DNA, 1146 bp, Zea Mays
gaaaaggaaacagaaaaaaaaaatcacaggagaaaccgatttcccccttttttctttattttcttcgtcctcttcgtctcgactcgccgcccagtcacctcaaatcccttcgatccaatctccaaaccctaggcaatccaacatcaaagtattagctgcccccttcgtcaaaccgcggcggcgcggccatggcccacggcggcggcgccgggaaggcgaaggtgacgccgaacctggcggtggacggcgagggcacgcgcacgctcaaccgcactgtgctgcagcgcctcgacccggccgttgaggatattctcatcaccgcggctcacgtcacgctgtacgactttgacaccgatgtcaaccagtggagacggaaggacgtggaggggtcgctcttcgtcgtcaagaggtgctcgatcggcgttggggctctgagggttggggctgttggggtggtgcgtcggcggactacagaaggtgacaacgcgcggcggcttggcggagtgacatcggcgtggccgcgtggctgacccttcagctttctccttggtgctggcgatctatgctgctctgctaggtctttgaaggaaactttgcttggttggtaccaggcgagcggcgacggcttttcgacgtcgtttctccttcttgaaggcgcgacccagaagacctctagtttgtgtgtttgtcggcgttgtggaggctcttcgtcactctgcttggctcggtggtgtcggggccattgtcgctttaggcgtctgcttgctctcggagttcggcgttgtggatcttttgctcgtggtgaagaatcggagctgcctcatgtggggtgtgctgaggcttggcaacgatggcgcgccgcggtcttattccttgcgtcggtgtctagatgtaggcatcgtcgagttgctttggcagtgtgtggctcgtcttgggaagtcggagctgctcgtcccttgtatttgagcttggcaacgatgactctagatgtgtttgtgtgtgggaggttgcgttgtctaggttgcttgttagggccttcgccggtttttctactgtgcgctctgtgtaggttttgggcccggttttccttaaaactggatcaattccattcttcttaattgagaggcagagctcctgcctttacgt

SEQ ID NO: 142959 - DNA, 168 bp, Zea Mays
atggcacgcggctacgatttcaccgcgccctgctcctccaccggattgcactccggctctcccatggcgctcgagcgctctgcgctctgcccgccgtcgcaggccgcggcgcccctgctcctcctcccgaagcttttccccatggcgctcggcctctcggccacctag

SEQ ID NO: 142960 - DNA, 253 bp, Zea Mays
cgaccgaactgactcgatattcagcattactagctacaagctacacctacatacatgaaaaggggaaatgcggaaattttggggtgaaaaaactcatcaacttcacaccccacgaggtgtatatatttttctctccctcgaaaaccgagatctgaacatgaccattaagggggtgtttggttacaccccgctaaaatttagcctctgtcccatcgaatgtttgaaccttcgttccgggtattaaatgtagtcg

SEQ ID NO: 142961 - DNA, 149 bp, Zea Mays
tatttgtctgtttatgatatttctattcatattttacgcaaaccagtgtttattcagttcatggctccacttccatcgattttatgcattatcttgtttacttaatccagtgtgtattgggttcctaccatttatgccatatgtataag

SEQ ID NO: 142962 - DNA, 1183 bp, Zea Mays
ttttgttgacttgttgctacttgctagttatacaaatagattttaattatgtgcctttaaaaagcatggcttgacaaaaacattagcctatcaactaaaatccttatacatgttatctgcagacctgttgtcaaaagttgaagttgaaaagaagaaattgcttgagaagtacgaacatcatagtaagtagtaggaagacttgccaaaatttgtgcgatggactcttgtttacttgactatcatcgtcattctttcaaccagtggaggaggagaccaacacattatcggaacttgacgaaacaatctcagagaaggtaacacatgcggaacattctgtcagaagggtgaaccaggatggcaagtcatttatcgtctttcgcaagtctactggcttgtttcttgattgtggatctgatgatgattttgaccttgatgagtggcgctgctaataataattcatataacagataaatggaagcccttagttctttcttggcctttcctcttttttttccccttacctggcggactttagtagcatacaattttattgttactatagtctagtagcgcattgtattagccttcttccagattagtttgttcgcaatcctgaatttggtatcgagctggctggatacgtacagatgtattctgttatttttccactttgaaagcagatattcaaaaggatcatcgatctgcaattattatagtttgctcaagaaactattattattcaatgacatcattgtaagaaacaaaattgatattgacgtctgtctgatcagcccattctaagggcatgtttgagcacgaatggtctatgcattttacaggaaattgttcattttttcaaacacacacacgcgcgcgcgcaagaacaggggaaaaaatctccattacaaaagtaggcctagacatatagtaatattcagtatctttagcacccaagctctcctttgttaaatgcttagtacagtagtccgaattccatccatacagcgccatcagctgattgttcaatgccgaaaaccagggagctacgtgtggtccaaactaggatatgttcacagctaaaagcatttaaaaaacagcctaaaagcatttaaaaaacactaacagccgaaaagtattaaaagcagactttaatcagatcgtaacatcatgttcacagctcaat

SEQ ID NO: 142963 - DNA, 1453 bp, Zea Mays
attcccaccttcttccttgcccccagcgtccagcgacggcggcggcgacgacgactcatcgcagcgggggaggacggatggccgcgtcgtgcggcactccgagtccggctaagcggccccgtcactctgacgtcgcctcctccggcggcgactctgattctgactctgacggggacctcgtcagtgacctcagggagatcgtgtgcctgctgcggcttatcaagggtggggccaacaaggacgggcagaagatctgtgagcaggtcattgccagtgtggcagcagatattcagactatgctagaagaaacccaactgaaatttgaggaggaaagacagaattcgttaaaagtactgtctaacacttccaaagagcagtgtgagagttcactgaacgaagagtacagcaagtttcaggaaacatatgatacgttctgtaaagaaaaggatgctcacatgcagactttcagagacctgttgtcaaaagttgaagttgaaaagaagaaattgcttgagaagtacgaacatcatatggaggaggagaccaacacattatcggaacttgacgaaacaatctcagagaaggtaacacatgcggaacattctgtcagaagggtgaaccaggatggcaagtcatttatcgtctttcgcaagtctactggcttgtttcttgattgtggatctgatgatgattttgaccttgatgagtggcgctgctaataataattcatataacagataaatggaagcccttagttctttcttggcctttcctcttttttttccccttacctggcggactttagtagcatacaattttattgttactatagtctagtagcgcattgtattagccttcttccagattagtttgttcgcaatcctgaatttggtatcgagctggctggatacgtacagatgtattctgttatttttccactttgaaagcagatattcaaaaggatcatcgatctgcaattattatagtttgctcaagaaactattattattcaatgacatcattgtaagaaacaaaattgatattgacgtctgtctgatcagcccattctaagggcatgtttgagcacgaatggtctatgcattttacaggaaattgttcattttttcaaacacacacacgcgcgcgcgcaagaacaggggaaaaaatctccattacaaaagtaggcctagacatatagtaatattcagtatctttagcacccaagctctcctttgttaaatgcttagtacagtagtccgaattccatccatacagcgccatcagctgattgttcaatgccgaaaaccagggagctacgtgtggtccaaactaggatatgttcacagctaaaagcatttaaaaaacagcctaaaagcatttaaaaaacactaacagccgaaaagtattaaaagcagactttaatcagatcgtaacatcatgttcacagctcaat

SEQ ID NO: 142964 - DNA, 1450 bp, Zea Mays
attcccaccttcttccttgcccccagcgtccagcgacggcggcggcgacgacgactcatcgcagcgggggaggacggatggccgcgtcgtgcggcactccgagtccggctaagcggccccgtcactctgacgtcgcctcctccggcggcgactctgattctgactctgacggggacctcgtcagtgacctcagggagatcgtgtgcctgctgcggcttatcaagggtggggccaacaaggacgggcagaagatctgtgagcaggtcattgccagtgtggcagcagatattcagactatgctagaagaaacccaactgaaatttgaggaggaaagacagaattcgttaaaagtactgtctaacacttccaaagagtgtgagagttcactgaacgaagagtacagcaagtttcaggaaacatatgatacgttctgtaaagaaaaggatgctcacatgcagactttcagagacctgttgtcaaaagttgaagttgaaaagaagaaattgcttgagaagtacgaacatcatatggaggaggagaccaacacattatcggaacttgacgaaacaatctcagagaaggtaacacatgcggaacattctgtcagaagggtgaaccaggatggcaagtcatttatcgtctttcgcaagtctactggcttgtttcttgattgtggatctgatgatgattttgaccttgatgagtggcgctgctaataataattcatataacagataaatggaagcccttagttctttcttggcctttcctcttttttttccccttacctggcggactttagtagcatacaattttattgttactatagtctagtagcgcattgtattagccttcttccagattagtttgttcgcaatcctgaatttggtatcgagctggctggatacgtacagatgtattctgttatttttccactttgaaagcagatattcaaaaggatcatcgatctgcaattattatagtttgctcaagaaactattattattcaatgacatcattgtaagaaacaaaattgatattgacgtctgtctgatcagcccattctaagggcatgtttgagcacgaatggtctatgcattttacaggaaattgttcattttttcaaacacacacacgcgcgcgcgcaagaacaggggaaaaaatctccattacaaaagtaggcctagacatatagtaatattcagtatctttagcacccaagctctcctttgttaaatgcttagtacagtagtccgaattccatccatacagcgccatcagctgattgttcaatgccgaaaaccagggagctacgtgtggtccaaactaggatatgttcacagctaaaagcatttaaaaaacagcctaaaagcatttaaaaaacactaacagccgaaaagtattaaaagcagactttaatcagatcgtaacatcatgttcacagctcaat

SEQ ID NO: 142965 - DNA, 879 bp, Zea Mays
attcccaccttcttccttgcccccagcgtccagcgacggcggcggcgacgacgactcatcgcagcgggggaggacggatggccgcgtcgtgcggcactccgagtccggctaagcggccccgtcactctgacgtcgcctcctccggcggcgactctgattctgactctgacggggacctcgtcagtgacctcagggagatcgtgtgcctgctgcggcttatcaagggtggggccaacaaggacgggcagaagatctgtgagcaggtcattgccaggtgagatgcaaacctgtaggaatccgaatctccttgcgactgcaaacaattgggctcatcgcataggtattcgttaatgtcaatgttttgttgcatgatgctgatgacttacgattgcaccgaccattggcctgtatgattacattcgtcagtttttgttgcgtttacatattgctggtgaaatgttgtcctatctgccgtctgcagtcaatgcaattgtgctaccatttaggcttcaatgcagttttggcaagggaactcgtaatggcccgcgtttttttgtagtgaatggatggaattaagacaatatttttgataattgtgctgttctgtgtatggagctttatgtttcatggattaacctttggtgttttgttgatgttgctgtgccatatagcttgtggtctgaatttcttcctaaagtagtattactcttcttgcaatggaggtccggttcggccctcgtcccaataatatgatagttgtagtcgcataattgtaagagtgagtttatccatgtgacttgtcgaatttttctctgctgagtaggctaaatgcatggtctgatgaaatctggaggtcctattccttcatctgtatcacta

SEQ ID NO: 142966 - DNA, 706 bp, Zea Mays
attcccaccttcttccttgcccccagcgtccagcgacggcggcggcgacgacgactcatcgcagcgggggaggacggatggccgcgtcgtgcggcactccgagtccggctaagcggccccgtcactctgacgtcgcctcctccggcggcgactctgattctgactctgacggggacctcgtcaggtacggccggcctcacctcagcgcctcccctcgctcacggactcgctctagaacattcctctttcgagttggattgcgagcgatccttttcttcttggtttcccggcattatccgagatgttcaattccgtggttgcggcggcagtgacctcagggagatcgtgtgcctgctgcggcttatcaagggtggggccaacaaggacgggcagaagatctgtgagcaggtcattgccaggtgagatgcaaacctgtaggaatccgaatctccttgcgactgcaaacaattgggctcatcgcataggtattcgttaatgtcaatgttttgttgcatgatgctgatgacttacgattgcaccgaccattggcctgtatgattacattcgtcagtttttgttgcgtttacatattgctggtgaaatgttgtcctatctgccgtctgcagtcaatgcaattgtgctaccatttaggcttcaatgcagttttggcaagggaactcgtaatggcccgcgtttttttgtagtg

SEQ ID NO: 142967 - DNA, 1544 bp, Zea Mays
atggatttcactgtaacgacgcatatgcatgcagggaggcatctcgccgagatatgcaagagcgagtaccccaagttcgtgaggatttgcctgtggatcctcgcggaggtcgcggtgatcgccgccgatatcccggaagttatagggacagccttcgctttcaacctcttgttccacatccccgtgtgggtgggggtcctcatcaccggctccagcactcttctgctcctgggcctacagagatacggggtgcggaagctggagttcctgatctcgatgctggtgttcgtcatggcggcgtgcttcttcggggagctgagcttcgtgaagccgccggcggtggacgtggtcaaggggctcttcatccccaggctcaagggcgacggcgccaccgcggacgccattgcgctcctcggagctctcgtcatgccgcacaacctgttcctgcactccgcgctggtgctgtcgaggaagacgccgtcgtcggtgagggggatcaaggacgcgtgccggttcttcctctacgagagcggcttcgcgctgttcgtggcgctgctcatcaacatcgccgtcatctccgtctccggcaccgtctgcttctccggcaacctgtcgcccgaggacgccggcaagtgcagcgacctctcgctcgactcttcctccttcctcctcaagaacgtgctgggcaggtccagttcgatcgtgtacggcgtggcgctcttggcgtctggccagagctccaccataacaggcacctactccggccagtacatcatgcagggttttctggacatcaggatgaagaagtggctgaggaacctgatgacacgctgcatcgccatcgcgcccagcctagtcgtctccatcatcggcggctccagtggcgccggccgtctcatcatcatcgcttcgatgatcctgtccttcgagctgccgttcgctctcatcccgctcctcaagttcagcagcagcagcagcaagatggggccccacaagaactccatctatatcatcgtgttctcgtggctgctggggctgatgatcatcggcatcaacatgtacttcctgagcaccagcttcgtggggtggctcgtccacaactcgctccccaagtacgccaacgtgctcgtcggcctgctcgtcttccccctcatgctcgtctacgtcgtcgccgtcatctacctcaccttcaggaaggacaccgtcgtcaccttcgtcgccgactccgcccagctggccgtggtcgacgccgagaaggccaacaaggcggcggcggccgccggcgacgacgacgacgaccggcccgtgccgttccggcaggacctcgcggacatccctctgccggagtagcgtagcgctacagattaattaaacactctccctgtcttcttcaagtataaatataaatatatatacacatatatagccagttgtacgtatatatacgcacgtacgcgtggtgtttcgtcttttggacgactcaatatatgattgctcgtagccgtagatatgcatggctgctccagcctccaactagtattatt

SEQ ID NO: 142968 - DNA, 460 bp, Zea Mays
atcgctttgtttgtttgtttgtttgttactgacagtatgtgtatacgtttgctatatgttatttgcagttatagggacagccttcgctttcaacctcttgttccacatccccgtgtgggtgggggtcctcatcaccggctccagcactcttctgctcctgggcctacagagatacggggtgcggaagctggagttcctgatctcgatgctggtgttcgtcatggcggcgtgcttcttcggggagctgagcttcgtgaagccgccggcggtggacgtggtcaaggggctcttcatccccaggctcaagggcgacggcgccaccgcggacgccattgcgctcctcggagctctcgtcatgccgtaagctatagctagctagcaatagcattcagggatattagcgctaccactatatatactaaccaggtcaatgacggattaattaacaagccaataataa

SEQ ID NO: 142969 - DNA, 737 bp, Zea Mays
gtggtaatgtggttgtggacatgtcattttgcacaatattattatgtgaacttatgttggttgtttggtatttgacttgatataattgcctgaaattatgatatattgaaatttccctatgttgtttaaaactacgtttaaactttgtttaaaccgtttaaaagttaaaactcacccatgagcgtttcaacgtttagttgttttaataaccttgcccaccacatcatgtctcaattaagtaagacaggtgagtaccacagtccacagtagattggtcagaagctagaagttgtgaaggaaaggggacccacaaggatgacgcgatgggcgggcacggcgggtgtgtcgggggtgcgcccagcatcgcgttcgcctcccgcgccggtggaggggatggcgtggaggaggaggtcgcagttgggggcggatgcggcgtcgagggtaggggaggggaggcggaggaagaggaggcgggagcggaggtcgtcgatctcccgcttgagctcctcctccgtctcgctggcctcctcgtagcactccttgcaggtcccggcgtcctcctcgtcgtacccttccttgcacgactggcaccacatcttcggagctcctccaaacgccggccgacctagccgccgcactacgatggctgtaatttcggagcggtggcggcggcgcgggtggtgccttcgagggctgtgagattgtgggaagagccgaagaggggtccaagtgagctt

SEQ ID NO: 142970 - DNA, 1384 bp, Zea Mays
cacatcagcggtgccgcctcatcttccttccctctcgtcatggcgcaactcccttgccccgccgccgccgccgccgctaatgtagcggccgggaaagaagagactgccacctgggaggacgcgctggacctggatgactccgacatctgcttcgttccccctcccctcccctactcattcgacgccaccgcctcccagccccagcaggacaaacccccgcactctttccaccaccagccccaccgcatccccggccccactgccgccgtccaggacacgattcttccccgctccgccccccgtccgcctctctcatcgagacgcggggacgccgacttcctgctgcccccgtggctctgcgctctccagttccttgggaaggaccgcgcgtgggaacggccgggtatcaggacgattaaggacaacaaggaattgattcgagcacctttggtggctggggtggtgacgttgtgcaggccaaacgggctcggagatctcttcttggttctaaaggatccaaccgactcaatcggtgcttcagttcacaagaaagttcttttggaggagaataatggccatgatatctcaattgggtgtgctgttgtttttattaaggtagctgttttccgtccgtctgacaagttgtgctacctcaatgttaccaaaggaaaagtgatcaaggtttttagtaaaaattgtgctgccccagctaagcaagtgatttcaccaaatacttctgaaagaagtcaaggcgaagattctgccagcaatacaatgatgagaattttaggtcgtgaagacatgatgcccagtaacgagatgacagttactgaggtttctcatgaacacagtgcaacacctgattcaactaattgcacttcaacgtgggatatttatggtaggtttagtttgggaagtaacaaggaagataaattgctggtaggagatccgcataacaagcatacatcaagctgcagtactgatgggcatccccagcaaaatttgagtattccaaacactataggttgcttctcaaccccgaaagaaaatgttaataccagcagcggatcacatctcaaacgcaaaaaggttgtatcagaatggacagatgagcagctttctgaactgtttgctgactactagcattgtagtatatatctgataaacgagttgttagatttctagaagtcaatgtattgcagttatattactgatgtgagctttgtaagaacttgacaagttttgtacagttgcacctatagcatctagagctgtgtatggttgttgtccagctcacttttctgaaacggttgtcatgccggtctttcattgtaacaattttatgaatctgccttctgataattgaactaaagataattgtgtc

SEQ ID NO: 142971 - DNA, 1389 bp, Zea Mays
cacatcagcggtgccgcctcatcttccttccctctcgtcatggcgcaactcccttgccccgccgccgccgccgccgctaatgtagcggccgggaaagaagagactgccacctgggaggacgcgctggacctggatgactccgacatctgcttcgttccccctcccctcccctactcattcgacgccaccgcctcccagccccagcaggacaaacccccgcactctttccaccaccagccccaccgcatccccggccccactgccgccgtccaggacacgattcttccccgctccgccccccgtccgcctctctcatcgagacgcggggacgccgacttcctgctgcccccgtggctctgcgctctccagttccttgggaaggaccgcgcgtgggaacggccgggtatcaggacgattaaggacaacaaggaattgattcgagcacctttggtggctggggtggtgacgttgtgcaggccaaacgggctcggagatctcttcttggttctaaaggatccaaccgactcaatcggtgcttcagttcacaagaaagttcttttggaggagaataatggccatgatatctcaattgggtgtgctgttgtttttattaagtccaggtagctgttttccgtccgtctgacaagttgtgctacctcaatgttaccaaaggaaaagtgatcaaggtttttagtaaaaattgtgctgccccagctaagcaagtgatttcaccaaatacttctgaaagaagtcaaggcgaagattctgccagcaatacaatgatgagaattttaggtcgtgaagacatgatgcccagtaacgagatgacagttactgaggtttctcatgaacacagtgcaacacctgattcaactaattgcacttcaacgtgggatatttatggtaggtttagtttgggaagtaacaaggaagataaattgctggtaggagatccgcataacaagcatacatcaagctgcagtactgatgggcatccccagcaaaatttgagtattccaaacactataggttgcttctcaaccccgaaagaaaatgttaataccagcagcggatcacatctcaaacgcaaaaaggttgtatcagaatggacagatgagcagctttctgaactgtttgctgactactagcattgtagtatatatctgataaacgagttgttagatttctagaagtcaatgtattgcagttatattactgatgtgagctttgtaagaacttgacaagttttgtacagttgcacctatagcatctagagctgtgtatggttgttgtccagctcacttttctgaaacggttgtcatgccggtctttcattgtaacaattttatgaatctgccttctgataattgaactaaagataattgtgtc

SEQ ID NO: 142972 - DNA, 802 bp, Zea Mays
atatcctacataaagagtatgaataaatcatggattataggtgaggctagggagataaaggtttataaacaaggggtgaatagtttcctagcttttatgtttagacattcagcagtaggaaacaagatactatgcccttgtaggaagtgtgttaactcattttggagagaggccagtgaagtgcgagaacacttgatatggagaagcttcaatctcttttgtgaatcatggtaacaacgatgatgagtcgtttatgagcatcgtacagaagatggtgcaataactgatttgttaaaggatttatcatgtggtttagatgatggaggggatatggaggatgatgggtcttttgagcaacctaatgaagacacatcaggcatccataagatagcaaaagacaatagtcaagaattatatctgggttgccaaaactactcaaagctacgtttcctagtttgtttgcttcacatcaaacttcttggaggatggacagatagaagttttgatttgttggtagatttacttgtagatgcactacctaagggttcagcacttcctagaaactttcatgaagcaaagaaagtggtcaaatctgtaggagttgggtacactacaattcatgcatgtgaaaatgattgcattctattttggaaggagcacgaaaaatattattcttgctcagtatgtagtgtctcacgttggaaattagaaaaaaagagtctagatggtgttgggggccttcggcttccgaaggtcctcaaaaacatgatttaacaatgttttccaagtgaaatgtgtaagc

SEQ ID NO: 142973 - DNA, 827 bp, Zea Mays
gattctcccattatattctttggatccttgcagcatgcagcccatatttgatttcaacggctaattgggttattggtcagcttgcgatatgcctaccagaggacatgagttctagtatttatcagtccttaatgaaggcgttgaccatggagtatgtggaggacataacttgttatccggtttgtgcctctgcttctggtgctattgcagaactcatcgagaatagctatgttccacctgactggctcattctcctgcaagtggttctgaaaagaataagtactggagatgaaaatgagtctgctcttctgtccaagcttctgggcacaatagttgagggtggacaggaaaaagttctgtctcatattcctgaaattgtatccaacattgctagtactgtaatggagctcctgccccttgtcccagatccttggcctcaggtagtagtgcatctttcttctgtgtggtcaatattttggtactttgtcatgatgaccggcgggaggaacaccgggcgtgtaggagtgatcaagaacagggagaagcacaagggcagcttcgagaccatccacatgctgcttagagctttttgctatgtctagttttctcctatttgttgtataggaaaacatagaatggaattcaaatttggtggccgcaaaatgtggagacttgaattcatataaagttaggcttaacattagtgcaaacagctgtattttagtttagatttagagtacacttatgtatgtgttgtttgacaatgcttatttatgatatattgaatgatacttatttatattatattaattataatgttgttcaat

SEQ ID NO: 142974 - DNA, 1729 bp, Zea Mays
gtgtgatttaatatggtgtaatgtttctcatcctaatgacaccccaaacatacattcttcttccacggctgggtagccaaacaatcccacaacagtaaaattcttctaccaagtgaagaaccatggagaaaatgccttcctaatcattgttcccgctttgcaactaacatttccatttcccgccacactctcccgcgcagcacccattcttctttccctccacttgccgctccagttgcagttggtcgaaaaaagtggaaaggaaaggggcaaaatatcctagggttctgcctccatggacatcgagacccacgccgccgccctggcccgcgacgagctgcggcggctcctcgccgccaccctcagtcccgacaaggcgtcggtggacaccgccgcggcggggctcgacgcgctctcttccgacccacgcttccccctcgccatcctcgctgtcgctgcaggggacgatgatcacgggatgagagtcgctgcagcgacatacttgaaaaattttacccgccgcaatttggaaactcgtctgtgttcatctgaggtttacaaggagttccgtgaccaacttgcccaggctttgcttcgagtggagcctgcaattcttcgagtgctgattgaagttttccgccaagttgttgaaaaagattttgtcaaggataacttgtggcctgagcttatccctcagttgaaactagtgatccagagcagcaacctaattagtccaggccagcatcctgagtggaatactattaatgcactcacagtacttcaatctgttgtaagacccttccagtatttcttgaatccaaaagttgtgaaagagtctgttccacaacagttggagcaaattgcagcagagattcttgtaccattgcaagtgacattccatcacttctctgacaaggttcttttgtcacctgatgggactaacttggaatatgagcagctcctactcatcacatgcaaatgcatgtatttcactgtgaggtcatacatgccatctagggtgaaacaaattttgccttccttttgcaaagacatgttccgtatactagattctttgaactttaatagtcttattgaagatggatctaccatgaagctcaagattgcaaagagatgtctcattatattttgcgcacttgttacacgtcaccggaaacatacagataactagatgccacatattgtcaactgtgcaataaaaatatcaaaacaaagcatccatttaagtaaactcgactctctccccaatcggattgtttcattggcatttgatgtgatttctcgagttttggaaacaggaccgggatggtgactagtttcaccacatttttcttcacttcttgattcagcaatttttccagcattagcattgaatgagaaggatatagaagaatgggaggaggatactgatgagtatatgcaaaagaatcttccttctgaacttgatgacatttctggatggactgaggatttgttcactgccagaaaaagtgcaatcaatttacttggtgttatagcgctatcaaaggttgtgattccttttttattatagtttgttgaacacacatagtactgacttcaggctgagcaaaacattttaagggattgttttgctatattgtattccatgactttgtcattctatatcaagtgatttcaatggctgcatgcagtctttcatatttgaacacacttgctatttttcacagaa

SEQ ID NO: 142975 - DNA, 330 bp, Zea Mays
atggccgacgtcgccctgctcaggtccaaccagctccccttcctgttgttgtgtccagccgatgcccctccctccatcttcctctctgcagcaaccctaccacggttgtgcccctgcttccatggtgagctcgccccagccccaacgtcggacgtgccgtcgccctcacgtccagctcctccatccccctggttccctcctagctccgaccaggtatcagaattcctggattccaaatctgagacggatgttgatgttgactataacagcttgtactcaaagcaggactttctacagggtgaggtgctcgtttcgatgtggctagagtaa

SEQ ID NO: 142976 - DNA, 109 bp, Zea Mays
ctcaacacgacaaagcaagaaaagactagcccttaagaagaggcaaaagcagggctcaacaccactagccagcaaccaaaaacttatcagagcataaagaccaaattag

SEQ ID NO: 142977 - DNA, 252 bp, Zea Mays
tagggtgttctggacaaagaaagcttgtaccttaaaacaggaggatacaagaagctggagtggttgtctgaagacttttgaactgcttgaagcattagtgtagatttggtgctttttttgactgatcaactctggagcagctagagtgatgtagttgtgggcttttaaactgcttcaagctggagtgatgtcgctgtggtgcttttgtgactgatcatctctggagcttttgtgaatgatctagctagctat

SEQ ID NO: 142978 - DNA, 1083 bp, Zea Mays
gtaactcccctttccctcgcctctctgcggcgctgcgcggcacctagcttcctatacgaagcaccggaggcggggtagactagcgggctggccatggcgtcaacggtgctggaggcgacgagggtggcccatgaggacttggagaggctggagcgcctcgcggcgcgcgagctgcaatgggagcccgataacccgcgcgaccgcttttttcagtcccaccgcgtccgccacatgctcgacctcgtcgtctccacctcctgcaagctcacaatgcagagaatacttggaacacattttggaatatctgacatcatttctgtatcgcacagagccattgcaagacgtcgataagattttttttaaagctgaagagtgaatttgaggaacgatgggccaatggagaaatacctggatggggaaataaaggcgcagaaaacgagtctaaaatagatcttgattactacagcacagttgaaacaggtccttaatgctttgttcaacctttgcaaaattaataaaagaagacaggaacaagcagccaaaaatggaatcatccctcacttgatgaaatttgtcatgtcagactcacctctgcggcagtatgccctgcctttgttgtgtacttaaatctgctcgaggatgatgcatgggcatgcacgacattagattctattgctgtttgtttggctcacgataatgatcacagaaaagtggaacaagcactcttgaaaagaggccattcagaatttaatgaagttcttccaagattgcctagaacagttttttggccatatattggacgctttcttgaagataataacgaaatcttctaggctaaatataacaatggctaccaatggtttaacaacattgctcattgcaagacttgaccattcaaatttggtggtcgcaaaagtgtggagacttgaattcatataaagttaggcttaacattagtgcaaacagttgtattttagtttagatttagagtacactaatgtatgcgttgtttgacaatgcttatttatgatatattgaatggtacttatttatatcatattaattataatgttgttcaatata

SEQ ID NO: 142979 - DNA, 1249 bp, Zea Mays
gtaactcccctttccctcgcctctctgcggcgctgcgcggcacctagcttcctatacgaagcaccggaggcggggtagactagcgggctggccatggcgtcaacggtgctggaggcgacgagggtggcccatgaggacttggagaggctggagcgcctcgcggcgcgcgagctgcaatgggagcccgataacccgcgcgaccgcttttttcagtcccaccgcgtccgccacatgctcgacctcgtcgtctccacctcctgcaagctcgaaacttttggtcgttacctcgacttgcatgagctttataacgagttcataaattccaagtttggaacgctaatggaatactcgacttatgttggctgtttctcctagatggacaagatctcacatagtcataaagctaccagatatgtcatgccttttcactaagacaatgcagagaatacttggaacacattttggaatatctgacatcatttctgtatcgcacagagccattgcaagacgtcgataagattttttttaaagctgaagagtgaatttgaggaacgatgggccaatggagaaatacctggatggggaaataaaggcgcagaaaacgagtctaaaatagatcttgattactacagcacagttgaaacaggtccttaatgctttgttcaacctttgcaaaattaataaaagaagacaggaacaagcagccaaaaatggaatcatccctcacttgatgaaatttgtcatgtcagactcacctctgcggcagtatgccctgcctttgttgtgtacttaaatctgctcgaggatgatgcatgggcatgcacgacattagattctattgctgtttgtttggctcacgataatgatcacagaaaagtggaacaagcactcttgaaaagaggccattcagaatttaatgaagttcttccaagattgcctagaacagttttttggccatatattggacgctttcttgaagataataacgaaatcttctaggctaaatataacaatggctaccaatggtttaacaacattgctcattgcaagacttgaccattcaaatttggtggtcgcaaaagtgtggagacttgaattcatataaagttaggcttaacattagtgcaaacagttgtattttagtttagatttagagtacactaatgtatgcgttgtttgacaatgcttatttatgatatattgaatggtacttatttatatcatattaattataatgttgttcaatata

SEQ ID NO: 142980 - DNA, 1070 bp, Zea Mays
atggaggaggatcgtcgatggatgtatgaaggttggaagaaaagaggtgctctatcaagtgagtgggttgccaagactgatgcgtttctcgacagcgcttttgctcggtcagagactggaaccgatgataggtgcccttgtagcaagtgtcgaaatatttatttctttgacaatagtactatgtcgatagatctttgtaagaacggttatatgacaggctatgaggtgtgggtgcaccacggtgaaaatcggtctccgtgttctcacaaggtctatgccagaggctaccacatatctacagaactctgggtgagaactacaatgagagagttttgccttcaatcatccatgaaacactgaaagctgttgttgctcaatacaatgctagtcaagtcagttgatcacacagagagaggctgtgagtagggagattaggaagatactgaccgagagggctagattctccaacattgctcttgatgatgtctccatcacaagcctaagcttcgggagggagtttactcatgccattgaagccaagcaggttgctgcacaagaagcaagctgagcgtgctaagtttattgttgagaaagctgagcaagataagagaagtgcaattattagggctcagctgattggtcaagccatagcgaacaatcctgccttccttgcgctgaggcagatcgaagctgcaagggagatctcacacgcgatttcggcctctgccaacaaggtgtttctggactccaacgacctgctgctcaatctccagcagctgaatgtgtcgagcaggcagaagaaatgatgatgtcacactttatcccctttcttctgagttttggatgtagtttcgccaatcttcctctgatctgatgtgggtctcagaggcaagcaagctggcaggttttgtttaaacgtgactatatagcttgagaaatgatgatcaacaaggaacaaattctgttattttaatttacgatggttggtattatttccttgtcttttagggttattattacagttctattaaagatgtttgcaaaccctcctgagttccgccggctgatgg

SEQ ID NO: 142981 - DNA, 477 bp, Zea Mays
atgatagagcgggagagagagagaggaactcactgtgacagggcgatccagcagcttcatgcagaaggcgcagctgaaacttctgccgaagatattgaggacgtcgtcctctgcgctgtcgtcgacatcatcgtcgggggcagaagcagcagatcggcctgccagaatattttggcggcggcgtgccttctctgcatcggagagggtggtgtcggcctcgatcgcgcggacggcggcgacgagctcgcctcctgccgcaggggccgcgggggctacaggatcgccggagcagtcggggcagctccagatcgcagcttcagacagcgcgggtggattcgagaggcatggggagtgccacggggtggcgcaggtggagcaccgtagcaggtctacctcggacggtgcggccacaccgcagaccatgcagacgccagcatcgtcgcagggaagatcggccgccatagtggtggtgggggc

SEQ ID NO: 142982 - DNA, 1130 bp, Zea Mays
ccaatgggcaatgctccccgaagccgaagcggaacgaaacggtccacacgctggctagcccccgtcccgactccgaaatccgaatccatggccgtcctccgcgcgtcgccgccgccctttctcccccatccgctctcgcgcccctctcagtgcaagcggcgccccacctgccgcgtggtcgcagccacagccagacccagtcctgctccttccaggcccaggagcggcggcgtccatggaggccgccccaagagggggcttcttgcggcaaggagaaggccggcggaggggcgggtgccctgcttgcgggccacggaggcgggggtcggtgcggcaggcgtcgcgaaggaggaagacgagtacctggcgcgggaggccgggtggggcgtgcggcggatggcacgggttggggaggagatgcggcgggtggcgcaggtccaggccgaggccttccacgtccccgtcgcgctcttcaacgacttcttcttcgacttcttcaaagccgaggtgctgtcggcgctcatctacagagtgaggaactcgccgcctgacagatacgcttgtttggtggctgaagaagctgaggcagccgaccagccgtcaaaggcaccatatgagaagatcgtcggggttgtggattgcacggtgcaggacgaagacggcatcctaaagcaccttcgaggcgcggatgaatacctctacgtgtcaggaattgcagtcttgccaccattcaggaggaggaaggtagggaccgcactgctgaaggcctgcgaggcactggggctccaatggaggcacgtgttcatggttctgagggcgtacgaggatgacgacggcgctcgaggcctctactccaaggcagggtacagggtcgtgtcaagggatccagactgggtctcctgggtggggaggaggaggcgagttgtcatggtaaaggagctgccggttcacgatgatcaatgacgccggcacggttttgttgaatatgtgtgtgtgtgtcaccagctaatttgtactgtttcttgtccatattcgcggcatcatgcatgtctttttggacaatagaggagagacagttgcctatcttcccaccaaacacaaaatgaaaattgagaagttacagttgacaa

SEQ ID NO: 142983 - DNA, 2602 bp, Zea Mays
atggatggtgataaggtgaaggaatcagctccggattgtgcgtccggtgcagcagagccaaccaagaagcaggataagaggaaacgtgcctatgctgaatttgatgtggtggacaagaaatctgtatctgctgaatggcagcaagaaatggatgcactgtataaatactacaaggaggtttctggtcatcagctgaacccagaggagctttcatgcaccacaaatgactctattatagcatgcttgctggaggagagcagtctttcttgtgccaagttaacagatggaatctacaagaggatgaagctgcaatatggtgtcactgagtcttcagtgcgcacctcagtactcaacattggtaggagatcttcatatgggatttctgctatggatgtcaatggtctggaggatgagtcggattcaagcctttggtgttgggagacagaagatttggcattattacccttgcatctacgtagtagtttgagcattcgacgcacagctcggaaattaatccataaaaggattctggttctttcgggcaagctggctaccaaagatgccagtaatgcttgtagcaaccagaacagccttatggaaaatgctggggaagcgctagatctagatgagattcgctctatcattgagtcaaaacacaagaatgatgatgacattaaaacggaggcacaagatttccaagccatcaggaaagccgtgaagaaacagcaaatgatggtggggcatattcaaactgagaaaaataagaaagaacgggaacttaggcatatctatgagaaaactgagagagaagcaaaacgcatcgagagagaaaataagcggctaaagaagcatcaggaagaagaagagagggcaaagaaaaagaaggagaaggaagaggctgagttgaaaaggaaggcttcgattcaaaagcaagcaaacctcatggaacgtttttttaaaagaaaggcggatagcaacataggaagttcagatagtcaccacatggagaggactacatgctcaaaatcaacaggaaacattgaagaacttgctgttgcagctacgtcagcaatggattgtacattatgtaaagaaaatcatttgagcatggaggaactccggatgatacatgttgcaaaatggaggacactctttcaacataacagattgcgccattggggtgttaggagaagtcctaagattcagttgtttcttgagctaaggctacaaaagccctctacgcctatagcttctgatagtatgtcaactccaacaaaagaacagtcatccctagagagcacaggaaaccttgatatcaccaagcttctggatgaacttgagataccatctcgttctcagaatagcacatcgtcttcagttttgcttgtgaagaagcttctgcagtttgataatagctctaggccagcatactacggtacctggagaaagaagagttctacagttagcgcaaggcaaccctttcagagggatgaagaactcaattatgatgttgagagtgatgaagaatgggaagaggtggatcctggtgatcctggtgaaagactctctgattatgaggaagatgatgagaaaaccatgaatgaacatgatgccatgattgatgcagaaaaggaaactgagaacagtttcatagtgcctaatgactatctttcagatgatgagggcatgcaatgtgagtctgtatgtgtcagatttgatggaatcagtagcctgctgagcatccctggggttacagttgaggaacttaatgctctactgcaaaggcagaaagctcttcatatcatcacggagcatgctctcaaaatagacagacctctagtcatatgtaacctggatcataggaaacttggcctgctgaatgctgaaggtatcactggaatgctgaagatggagaaaatctgtttgcaagctctttgtatgaagaaataccctggcagccccatcattgatgtgcctgtggttaatacgaccattgaggatggattttgccgatcaaacaaaaagagccctagaacacccgtatcatccaaagccatttcagaatcagacatgcctgaatttgccaaacttgttgcatcatgccctcaagggagagtcaaactggtggagttgttacatgagacatttccatatgtctccaaggcacgacttaagaacaaagttggggagattgctgagtttaccaaaaaccggtggcaggttaagcaggatatcttggatcggtacaatttatctctttctccagataaaggtgaaggcctgaaatgtgcagcatcgtgctgctcccagcagtgccagccacccaatgagtcaggtaatacaggcgaatcttcttctccccagtgctccctgaaatccgaaatggtcaggcaacaactcggcgcacaagggtcatcacatggcagcgcacggcacccgagcaccaagatggcaggcgggcagtaagacttgtagcactgcgcatgtacatttgcctgttaggttataaaatgtactatagtatagtaatgtagtttcagtatgtagaagcctagaaaccagcaagcagcaggggccgaagcctgtttttgtgtagctcagg

SEQ ID NO: 142984 - DNA, 2085 bp, Zea Mays
aaagatgttgcccgcctggcggcgtttctacctcaacagttctcacgttatcaataagatcgcttcgtcagtgaagcgattaccgccaaagttgaagcggcgattaaagaactcaattacgcgccatcagctctggcgcgtagcctcaaactcaatcaaacacataccattggcatgttgatcactgccagtaccaatcctttctattcagaactggtgcgtggcgttgaacgcagctgcttcgaacgcggttatagtctcgtcctttgcaataccgaaggcgatgaacagcggatgaatcgcaatctggaaacgctgatgcaaaaacgcgttgatggcttgctgttactgtgcaccgaaacgcatcaaccttcgcgtgaaatcatgcaacgttatccgacagtgcctactgtgatgatggactgggctccgttcgatggcgacagcgatcttattcaggataactcgttgctgggcggagacttagcaacgcaatatctgatcgataaaggtcatacccgtatcgcctgtattaccggcccgctggataaaactccggcgcgcctgcggttggaaggttatcgggcggcgatgaaacgtgcgggtctcaacattcctgatggctatgaagtcactggtgattttgaatttaacggcgggtttgacgctatgcgccaactgctatcacatccgctgcgtcctcaggccgtctttaccggaaatgacgctatggctgttggcgtttatggatttgcccctatatttccagattattttttcacttaacccattacaagcccgctgccgcagatatttcccgtgggcgagcgataacccagcgcactatgcggatgccattcgttataatgctcgaacgcctctgcaaggttctttgctgccgttaacccgtctggtttgggcatgatactgatgtagtcacgctttatcgttttcacgaagctctctgctattccgttactctccggactccgcaccgccgtgttcttcggttcaagtcccaacatccgggcgaactggcgtgtttcattagcccggtagcatgaaccattatccgtcagccactccactggagacgacggaagatcgttgccgaagcggcgttccaccgctcccagcatgacgtcctgtactgtttcactgttgaagccgccggtagtgaccgcccagtgcagtgcctcacgatcacagcagtccagcgcgaacgtgacacgcagtctctctccgttatcacagcagaactcgaacccgtcagagcaccatcgctgattgctttctttcacggccactctgcctgtatgtgcccgtttcgatggcggtacagcaggttttcgctcaagcaacagcgcattctggcgcatgatccggtaaacacgtttggcattgatcgcaggcataccatcaagttctgcctgtctgcgaagcagcgcccatacccgacgataaccatacgttggcagctctccgataacatggtgtatacggagaagcacatccgtatcatcagtgtgacgactgcggcggccatccatccagtcatcggttcgtctgagaatgacgtgcaactgcgcacgcgacacccggagacaacggctgactaagcttactccccatccccgggcaataagggcgcgtgcgctatccacttttttgcccgtccatattcaacggcttctttgaggagttcattttccatcgttttcttgccgagcaggcgctggagttctttaatctgcttcatggcggcagcaagttcagaggcaggaacaacctgttctccggcggcgacagcagtaagacttccctcctggtattgcttacgccagagaaataactggctggctgctacaccatgttgccgggcaacgagggagaccgtcatcccccggttcaaagctctgctgaacaattgcgatcttttcctgtgaggtacgccgtctgcgtttctccggccctaagacatcaatcatctgttctccaatgactagtctaaaaactagtattaagactatcacttatttaagtgatattgggttgtctggagattcagggggccagtctagtaat

SEQ ID NO: 142985 - DNA, 393 bp, Zea Mays
atgggttgtaggggttgggccactgtccacccacactgggactggagctgggggcaccaggagctgccctggagcagcggcggcgcgggcctgggcagcacgcgcgagggcgtccatcgcagcacgctcctgggcggctgcagccgcctcgcgttcagcttcacgagcgctcgcaagggcgagatcgcgggcgtggaggcgggcagccttttcctgctgggcgcgctctgcctcggcagcagcgagcgcgctagggtgggcgtcagccacatgaggatgggttgggggagaatggtcaccagccatgagcagcgcgcaggcgtcagcagcctcgggtgcaacaccgggaggtgcgctgagagggagtggaagcagcaccaggaggcgcgctag

SEQ ID NO: 142986 - DNA, 93 bp, Zea Mays
tgcgatatttgtgtgtcactgcattaagagaagagaaatgccaaaatatcctaatctcgcgttatgtcgggagatttatcctaatctcggatg

SEQ ID NO: 142987 - DNA, 1448 bp, Zea Mays
ctcctccctccgtctgaaagctcgaaattcctcttcttttttttctctctctctctctcactggctttctttcatggcttccaagaaggcgtccgatctactactactactcaatgctgccaccactggttctatccgtacggtcgtgcgccagctgttctcccggctggtcttttcgctgcagatggagtgctccctgtccatggagatagtttccttctggctgtggctggaaggcaatggccaccccgatttcctcgcgagggtagagtcgcttgacaaccaccgtctccgggggatcgccttcgccgggaagatgttcatcgaaggtctgcgccgtaggtccagcggcggccacttgaacagccgcggatctgtggaggaggaggaggaggaagaagaaggctatttccaggaagaagccatggaaggtatcgtcttctacctcaacaacttctgctacgaggctctggaagacattctagagatagcggaggccaaggaacgtgtcgtctaccaccgtgcccgtggcaaccaagttcagcagcagcagcagcagagcagcaagggtaaagctcccatgatgatgagcacgaaggatctcttgtctaagatcaaggcctcctttactactgctgctcggagcagccatgaagaaggctcgacgagttctagaagcatgccatcgcccaagaaacaggtcctcagagacatagagaacccaatcgaccagtgcctgtcaacgacgacgtaccctttggcgacccttttcgattccctgaagctgagggacgatgatccagaagccgatccagctatcatcaaggtgccgcgacgacgacagcccagtattgtaccacgtgacgagagaactctcttcgtgactttctccaacggataccccttcaccgcggatgaactgtacgaattctttatggggaactttggaggtgttgaagtcatatgcgtggaggatccaatcgaacccagaccaccgctctatgcgcacatcacatttttcacgcaggagacgatcctccacatcctccgtgggagcgcaagggtgaagttcgtgatacgagggaagcatctgtgggctcgccagttcgttccaaagcggaagaaagttcggaactgatctagctagtacgtgtctgcctgtatgttggatcggagctcatgcaaatgcaaataaaaataagatattggaataaaaccaccatccccagctacctctttctccttataatataataacccctacatatatggaagcttacccggccggcatggttaataatgtttgtgtgatgatgtgagagcatcgacgacaatgttgtcttatgtaatgctacctggtggtatacacatgcctggtggtatacacatgtacctgactatacctgaggatgtttaacttcaaaccatttctgttgtgtgcatgctcc

SEQ ID NO: 142988 - DNA, 1089 bp, Zea Mays
ctcctccctccgtctgaaagctcgaaattcctcttcttttttttctctctctctctctcactggctttctttcatggcttccaagaaggcgtccgatctactactactactcaatgctgccaccactggttctatccgtacggtcgtgcgccagctgttctcccggctggtcttttcgctgcagatggagtgctccctgtccatggagatagtttccttctggctgtggctggaaggcaatggccaccccgatttcctcgcgagggtagagtcgcttgacaaccaccgtctccgggggatcgccttcgccgggaagatgttcatcgaaggtctgcgccgtaggtccagcggcggccacttgaacagccgcggatctgtggaggaggaggaggaggaagaagaaggctatttccaggaagaagccatggaaggtatcgtcttctacctcaacaacttctgctacgaggctctggaagacattctagagatagcggaggccaaggaacgtgtcgtctaccaccgtgcccgtggcaaccaagttcagcagcagcagcagcagagcagcaagggtaaagctcccatgatgatgagcacgaaggatctcttgtctaagatcaaggcctcctttactactgctgctcggagcagccatgaagaaggctcgacgagttctagaagcatgccatcgcccaagaaacaggtcctcagagacatagagaacccaatcgaccagtgcctgtcaacgacgacgtaccctttggcgacccttttcgattccctgaagctgagggacgatgatccagaagccgatccagctatcatcaaggtgccgcgacgacgacagcccagtattgtaccacgtgacgagagaactctcttcgtgactttctccaacggataccccttcaccgcggatgaactgtacgaattctttatggggtaaagtcgtctattcttgtcatgctattaaaattacttaattgcagatatgtaaacaatggtgggtctcttatgtatgctgttgctgttggtaaacgaaatgtttcctgggacgtcgttggattggttaataatatttggattttacaa

SEQ ID NO: 142989 - DNA, 360 bp, Zea Mays
atgggagagcccaggagcgcgacacagggggttcggcagggcgcttgctgggagatggagatgcggccgagcgccatgggcgagcttgagggagatggggacgaagtcgaacggggagtagggacggccgagtgccatgggaaccagggcaaggtcacagcgcagggccaagctctaccatgggcgaagatggggaagaagaaagggtgctcgcggccatggcaagcagaaaccagggcggcggcgcgcgttcgcggcaagcagaggggcgcggtagaggggattggagctggagggagatccggccagcgaggccgcgaggagcttgaggcgcgccatgggtgccgcgcggtcggctga

SEQ ID NO: 142990 - DNA, 222 bp, Zea Mays
atgtcgggcgtcgagcgcgcgccagccgccaaggaggaggccctccgcgggtgcggggcggaaggtggagggggcacgaagcgggtccccgcgccggcgttggcgaggaacccagcatcgggagctccgaacccccacatggaggtggtggtcgcggtagcggcggcggcaccgcgggcccgtgaggccgtgacgatgcgattgtacacgaagggcgattag

SEQ ID NO: 142991 - DNA, 107 bp, Zea Mays
atgtttattagagtcatgcttcatacaattatagcattctttgtcctttttcatcaatgttgtagcaattatgttttatttgttttgttatgaaaacaacataattg

SEQ ID NO: 142992 - DNA, 1631 bp, Zea Mays
cgccgccgccacgtcagagccaggtaagccctagacgcaactagccgttgcggccatgtcacagctcggtggcgccgagctgtgtcagctcggcgccatagcctatggcgccgagctaagggtccaaaactgcatttaaaatttttttaggtctaaacgtgaatttacttcagtttaggggctaaaatacaaaaaattcggcctcctcggttttcgcccatgccctcctgccgaactctaaaccctccagcagcattcgttcacgatgcaccccgcgccgccaatcgcttccaatgccaacacgtcgacaactcccgacagctctccgagcaaccaagacgctgcacccagtgacgcccgttgtcaccgcggaccgtgctgccgacttcgcgggcaccgaccgcttccacgtgatcgacttccatcacgtcgagttctggtgcgccgacgccgcctccgctgccggccgcttctccttcgcgctcggggtaccgcttgccgcgcagtctgacctcaccacggggaacaccgcgcacgcctcccgcctgctacgctcgcgctcggggcctctcgcgttcctcttcaccgccccgtacgcggcgcagcacggcgcagacgacgacgcgacggccgcgtcgtccagctccgtgctgccgtccttctccgcggacgccgcgcgccgcttcgccgccgactacggcctcgcggtgcgcgccgtcgcgatccgtgtctccgacgccgccgaggcgttccgcgccagcgtcgacgcgggcgcgcgcccggccttcgcccccgctgagctcggccacggcttcgtgttcgcggaggtggagctctacggagacgccgtgctccgcttcgtgagctacccggacggcacggacgtgtccttcctccctgggttcgagaacgtcgccagctcgtcagcagagtgtccggactacggactcaaccgcttcgaccacatcgtcggcggcgtgccggacctggctccggtcgccgcgtacatcgccgggttcactggcttccatgaattccacagggtcaacgggaacgaggtgggcacggccgagagctcgctcaacgggctggtgctcgccaacagctcggagcacgtgctcctcacgctcctggagccggtgcagggcaccaagcgccgcagccagatacagacgttcctggaccaccacggcggccctggcgtgcagcacctggcgatggccagcgacgaccttatcggcacgctgagggagatacgtgcgcggtcctccatgggcggcttcgagctcctgccaccaccgccgcccagctactatgacggcgtaaggcggctcgccggggacgtgctgtcggaggcacagattaaggagtgccaagagctcggcgtgcgggtggacaagggtgacaatggaggtgttgtgctccaaatcttcaccaaggctgctggagacaggccaaccttgctcttggagtttatccaaaggatcgggtgcgtggagatagacgagagcgggaggcaataccagaagggtggctgcggcgggtttgccaaggataacgtcattcatctggtgaaatctattgaggactatgacaagacacttgatgcacctgcccgagttgcttcctaa

SEQ ID NO: 142993 - DNA, 600 bp, Zea Mays
cttaatgtgtgctctaaacctattagtttgaaattgacattaaccactaggtggccacccatcattgttttttaccataaggagtctcattttccagttcttactagcgatgtcaccgttgaggttggggatatgtctttccaccttcacaagttccttttactttcaaaaagtgcctttcttgaatgatcaattgaagaaaattctgaccaagaagaatgcatcatcaaactaaatgacaatcctgggggtgccaagtcatttgagctagttgcaaggttctgctatgggtgtgaaaatagagcatcaaaagctactagagtgaacagatgcttttgtgactgatcagctctggagcagctagagtgatgtagttgtgggcttttgaacaatagctagagtgatatgaaacattagtgatgtagttgtgggcttttgaactacttcaagctggagtgatgtcgctgtggtgcttttgtgactgatcatctctggagcttttgtgaatgatctagctagctatctgtaaatgatctagttgtgaatgatattataattgtgatgcttttgtgaatatataattgtggtgcttttgtgttt

SEQ ID NO: 142994 - DNA, 437 bp, Zea Mays
atggcttcggcccgggcgccggagactaattccgccgtcgcacccactacgactccgcagccaacaacttcggcggcaagggcgggacttggggacggaagcgcaagacgcggtacaaaggagcccctgaagtggaaagtcaggttcaaaattgcacttggaattgctgaagggctgctttatctacatgaaggctgccatcgccgcataattcacagggacatcaaggcatctaatatccttctaactgaagactaccaacctcagatgacactagaactcattcagtttgatgccatgtttgatccttatgttaaatgtcggtctccaccaaagatacttgtcatcttgaatcctcgatctggacatggtagatctagcaaagtttttcatggaaaagtggaacccatatttaaggtatgtctagctgagtagaa

SEQ ID NO: 142995 - DNA, 1479 bp, Zea Mays
cagatctcgattgaagctatggatcgcagcaaggacgacctgatcagcaacctcccggactgcgtcatcggcggcgagatcatcacccgcctccccgtcgccgatgccgcccgccttcagatcctctccacccgttggcgcaacatctggcgctcctccccgttgaacctcgatcttcctgtcccaatctactaccacgactacaaggacatcgtgtccacaatcctggcggcgcaccctggccctgctcgccgcctcaaagtcgactggccgtacgacgacggcgagtcgtacagccgctggctccagtcccgcgccgtcaccggtcttcaggagctggagatcgagccacggtactattcctggtgggagggcacggtattccagccgccgccgccagacaagacgagaacactgccagagtggccattattccagttcgctccaacgctgcgcgtcctaaagatcggccaccacacctgcttcccctctgtcggctccatggcggcgctccggtttccacgcctcgaggtcatctcgttctgcggcgtggacatctcggaaggcgcgctccacggcatactcgccggctgccccgtgctcagaaccctagtcctcgacgactgcaccggcttcgccacagtccggatcaactcacccaccattacaagttttgccatctcaccttcgcattcatccagaggcttcgactacgaccacgaagaaccgagggtgtgggtgacgacgtcgcaggtcatcatcgaggacgcccctatcctagagaagctggtcctcttccgccgcttattggatgataccgctgaacctttccagttccagctactagtgctcagcgctccgagagtcaaggtcctgggatccctctcctccgccatccgcaagttggagattggtggcaccgttcttcaacgcaccgttatcatggagaagcccttgcagatgcgaaccgtcaaggttttggctctggaagatgcagattccatcgacgtcgtcagcaactacctcaagtgctttccatgcttggaaaagctatacatccgggcatcgtcacaaggatacagaagtgctgctgcaagctatgataaacaaaatcccatcgagtgccttgagcatcaccttaaaatggtgacactagatggatacacaggaatacgaccgcacgtcaagttcgcccagttctttgttcgaaatgccaggtcgctagagctgatgaagttcagaatctttagaaactacccatgtcatcaacctgggagaaccaaggaatggaatgaggaggaccagcgaaggcaactgcaacaagccaggagcatggcttcccgacatctcaagttttgtttcgtacgtggtgctagatgttgtcgtcatgatgtttattgtggtcacgatttcgaggatatgtcagagtacatgcatagttcctcaagaggtgacccgtttgatcaatggtttgaatga

SEQ ID NO: 142996 - DNA, 1773 bp, Zea Mays
aacgatacccaaaatcctacgcagagacatgagtggcggcggcggcggcggcggggaggaccggatcagcatcctcccggacggcgttatcggcgagatcgtcacccgccttcccaccgccgatgccgtccgcgttcaggtcctctctcgccgttggcggcacatatggatctcctgtccgttgaacctcgatctcggttccccaaactactacaccgactacaagcgcgtcgtgtccggaatcctcgcggcccaccctggcccctgccgccgcctcaaagttgactggccgtacgacgacggcgagtcgtacaaccactggctccagtctcccgccttggtcggtcttcaggagctcgggatcgagccagagtactcttccttgtggctagacaagaaaacactgccgcggggagacaacacgagagcactgccagagcgggcattattccagttcgctcccacgctgcgcctcctaaggattggctaccataccttcccctctgtcggtgccgtggcggcgctccggttgccacacctcgagctcatctcgttctgctgcgtggacatctcggaagccacgctccactggatgctcgccgcctgccctgtgctcagaaccctcgtcctcgacggctgcacaggcttcgccacagtccggatcaactcacccaccattacaagctttgccatctcacctgcggattcatccataacgaacgactacgacccgtacttcttggactacgactacgaaaatccgacggtgagggtgacgacgtggcaagtcatcatcgaggatgcccctctcctagagaagctggtcctctgccgccgctcggctgctgttgaatctttccagctactagtggtcagcgctccaagaataagggtcctgggatccctgtccttcagcatccccaagttggagattggtggcaccgtctttcaacccaccgtgcgccgtgtcaaccgtgtggggcctgacgatgttatcatggagaagcgcttgctgatgcaggccgtcatgctggcgacgactctgcgaaccgtcaagattttggcgctggaagatgcagattccatcgacgtcgtcagcgactacttgaagtgttttccatgcttggaaaagctatacatctcggcatcacaaggatacagaagtgctggaagctatgataaacagaatcccatcgagtgccttgagcgtcatcttaaaatggtagcattagatggatatgacggcatgggaccacatgtcaagtttgcccaattctttgttcgaaatgcccagttgctagagttaatgaagttcagaatctttagaaactaccactgtgaacctgggaaaaccaaggcatggattgaggatcagcaaaggcaactgcaagtcaggagcatgacttcccgacctgtgaagtttaagtttgtacatgattctagatataatcaggatgtttactgtggtgaggatatcagtgacctgtcagagcacatccacgatgacccatttgatcaatggtttgaatcagagaaggaagccccccggcatgctgaaggaaaagaagatgctatagtttggaactccagccaaaggcttgattcatttgatcaaagctgaataagaacctcgtcctgaacttttatttaattcgttatgtttgtgtgctttcagttgataacatcacattttctgttttgatgcttcagtaccacatcatattgttcacttaatatctctcattaaacagctgtctttccacaaacttcata

SEQ ID NO: 142997 - DNA, 1535 bp, Zea Mays
ggaaaccgacgccagttccaacgccgcgcgcggcatcaggccgcgctggcgcgcggggtccttgatatcccgcggcggccggcctgctggtttcccgcggttcctccccttccccgatcggcgccgcgatccctgttcttcctccgcaattcaacaacctcagattattattattattgttgtcgcgacgtcgatcggtctacaatcatctggttcggatcgtgaatcttaaatcgagcaagaactggtttcggatcaatcaaggtagcttccagcgtgctcaaacaagggttccaaggttttgcaagacaagcgtgtgtgtgagagagagacctgcattgtttggtcgccactactaccatgcgcgatggccgcgtcgctgtcctcggcgctgagctccatggaggtgatgctggacgcgctcatgcagcgagggataggcaagccggaagaagccagcagcaagcccaaagaagaggagccgccaccggcgctgcccagccgcccgacggggcgaggcagactcccggcgctgcataggcccggcggcacagcagcggctccgtggatccaccggccatccccggtaccgcagccaacgcaggaagacgatgaggagaaatgtctggtcggtcgggagctggaaagacgggcggccaaggcagaggaggaggtgaagcagaaagacgaggagatgaggcagaaagagcagctcatcgccacgctgcaacggcaggtgcagcactacgaatcccggctctcggaatgcgaggtcaggatgaaatctgtggagaggcagatcacttcgttacagatggctcacagtcacagccagaccgctggcgtaagcgtaaggagagatggatcgacgaggcacatccagggatcatctcgtggaggccttccgccgtcgtctcagccatcgtcagtgaggcgccagcagcgcggttccgagcccgccgctgccgacgagagcgagaggacgacactggcggagccggtagtgaaccagctggccagggagttccagacggggagggaggcgttcgagcacaacgcgcgcgcggtggcggaggccagcaggctgccgacgtcgtcgtccactcctggcagcgccaggtcggtggaggagctcaagacgctcaagagccagttcgccacgtggaaaaaggagtacgaggcccggctgaagaagaccaaggccgagctcaagaggctcgtccacgccgagaagaggaacggcgccggcgaccggcacgcgcaccagcggcggtgcgggtggtggaggatcaaagcgcccaaatgctgcagggcgcccaagtgctgcagcagcttcaagctacccagccccaaatcgtgctgctgctgcttccgccgctgatgcatacatgattcactgcaaatgcatgggttggctcttcgcatgctcagggttggatttgacgccccaaaaatcattggaatatgagaccatagtgagtgaacaagaagagaattactggtgtcttttactcgttgttggtaccgatctagac

SEQ ID NO: 142998 - DNA, 1236 bp, Zea Mays
aaacggggcatctcttgcgtgcccctcattttcaaagtggagccaagggcggccccaggaagggtttccgtgctcaaggacggctccgtagtggtggaggttggaggaatcgaaatcgggcaaggtctgtggaccaaagtgcagcagatgaccgccttcgctctgggaagactgtggcccgatgctgatggcggcggcgaatgtcttcttgggagagtgcgcgttctacaggctgacaccttgaacttggtacaaggtggactcactgctggcagcaccgcttctgaatctagctgcgcagcgaccctccaggcatgcaatacgctgtacgataggttaaagctagtcttggacaggctgcagcagcgatcagagaatgtctcgtgggataccttggtttcgcaggcctatgaagacgatgtcgatttgtccgcgagtgcgtactgggtacctggtcaagcttctaacaagtaccttaactacggagctggtataagcgaggtggagattgatcttcttacgggagcaatcactataataaggggcgatcttgtgtacgactgtgggaagagcttgaaccctgcagtggacttaggacagatcgaaggctcgtttgtacagggaatcggtttcttcgtatacgaagagtacaccacgaacagcgacggcctgatgatcagcaacagcacgtgggactacaagatcccaagcgtggacatcatcccgaggcagttcaacgccgaggtgctgaacaccggataccacaagaaccgtgtgctctcttcaaaagcttccggtgaacctgccttggtccttgcctcgtccgtccactgcgcgctgcgggaagccatccgagcggcgagggtggagtttgcggacagcaccgtgtcatctggacactcgccgctggagttccagatgggtgtccctgcaccgatgacactggtgaaagaactctgcggtctagatattgtggacaggtacttggaaggtctgtctacctgtgaacgtgcggctggtggggcgtagtcttcttctaatctaaactcatgttatctcatacaagggagtggtatcagcctattgtttgcttgtttgtacgtgtatatacaataaaacgtgctcgcggcgtggtggtgtgtgtgtcattgtgtgtgtgagtgtgagcacaatatctatctgaatgctgtcaaccatgtgtccttattaaaactgctggagtggtcatgtttcagt

SEQ ID NO: 142999 - DNA, 260 bp, Zea Mays
attccattcagcaacgtgcgtgtcattacaagaagggttggaggaggcttcggtggaaaggcattcagatcattccaagttgcaacggcagctgcactttgtgcgtacaagttacggcgtcctgttcgaatgtaccttaatcgcaacaccgatatggtcatggttggtggtaggcacccagtgaaagctcattatactgtcggattcaagaacgatgggaacgttacggccttgcatctagatttattgattaacgctgg

SEQ ID NO: 143000 - DNA, 240 bp, Zea Mays
ggtcgtcgtcgagcgcggcggcggcaggcggcggcagcagcagcagctccgtcgtcgtccatggcggcgattgatcgggtggtgttcgcgttgaacgggcagcggtacgaggtgggcggagtggacccgtccacgaggctgctggagttcatccgcacccagacgcccttcacaggccccaagctcggctgcggcgaaggtatgggtgccagtattttctacaatgatcatcatcagtag

SEQ ID NO: 143001 - DNA, 87 bp, Zea Mays
tgttattgatcaaccaaaagcaacatgaggctcaattgtatgtctatgaatttttttgtaatacctatgacatgggtttaataagag

SEQ ID NO: 143002 - DNA, 289 bp, Zea Mays
gcgccgtgagtagagaaatctgggtcaggggagagagagaagcgagggccgccatcatggtcaccgcggctcaattgaaattagtcgcagtatgtggcatggtggtgttcatcgctgcacggggactgtgaacggagttgattcacgcagcgggcgatcatggtcgggcgacgattcttcaacatcgtgcatcggccatcggggaaccacgaggcgtcggggcagcccgccttgactatcgattggagcgcgaggtcacgagtcatctgaagagcaagttggtacctgg

SEQ ID NO: 143003 - DNA, 260 bp, Zea Mays
accagcctcagccaggcccgtgacatacggacaatttccacgttcgtggggaaccaagctctgtgcgtgcatccgaggccgcctcacctcgcgcgtctccctcgagctctccctctagggttttccatcggcaccctcagccgccgctgtcgagctctccctctcctgtctccactcgccctcgagctctccgtctccatctccagtcgtcgtgagctagggtttggcgccctcagtcgccgctatcgagcttcccctct

SEQ ID NO: 143004 - DNA, 856 bp, Zea Mays
gtatctcctttagaatgcatttatttacatgatttttagtatagcaccagatgagtctttttcgttagatgaatgtttgtactgaacaagcaaacctttacatcatttttcattgatgtagcggcatggttacttgtacctttggttgtgttacataaatgcaaatggttgtttcctctgatattcttgcctgtgtccggcatgagacccttacaactgtatctctttgttcaggtaaaaggacagcatggtgagggtcagcgtagtcaatgatgcgctcaagtccatgtacaatgctgaaaagatagggaaacgtcaggtcatgatcagaccggcatccaaggtgatcatcaagttcctgacagtcatgcagcgccatggctacattagcgagttcgagtaccttgatgaccacagaggtgggaagatcgtgatggagctgaatggcaggctgaataaatgtggtgttattagcccacgatttgatgtaggtgttaaggagatcgagggatggacgacgaggcttcttccatctcgccagtttggctacattgtcctaacaacttatgttggaattatggaccatgaggaggcccgccgtaagaatgttggtggcagggttctaggtttcttctactaaaaaggtgttttttgagcgacagatgcgtccaagaactcatctgatcttttgaggtttgttaagactaggtgtctgagcctttgtggtttgttaagactgggatgtgtcatgtatttcagaaattgggatttttatgagatgtacccgcaaaagccttgtctgtttcgattttcagatattggtttcgatttatcggatacaaacagggcctttaat

SEQ ID NO: 143005 - DNA, 423 bp, Zea Mays
caaattataaagcacaaacaaaaggacaggacaccagtacaacataattcacataaataaatatgaaggattattggtccaactcaatatactaccttgtctgcatgtcgaacacaatgtataagaggatccatagtagttgtagagttcccataaggctcatacatggatatagcaggctaaaataggctaatagaaatgtgtgtacaaatagtagtggtgtctaaaatagctaaaactgactatagcgcctgctataggcgactacatagttttctagggacaaaagaattggacacactacaccaaaatatttccccttttttctttatattgggaaacataaataaacaaaaggatgattttttgcttctattgttgatcaagcaagagataaacctcatatttcagataacattcgag

SEQ ID NO: 143006 - DNA, 597 bp, Zea Mays
atgtggaaagcccggcgccagcagctgggagcgaagcagagcggcgtccggcggggagaatgcaagagccgaccgggatccatcggggccaggggcggccgcgagggtggtggatggggtcggcgccggcgggggtggctcggtagtggtggcaacgcaatggtgagtacgaaggcatgccccggcggtgagatggaagcagcgacggggcgcgcaggaccggaggaggaggctggaggtgccagcggcgcgctggccatggaggggagggtcggcggtgcccctgccgcaggggagagagaggctggaggtgcagtgggcccaggcggcacgccggcgaggcctgacgacgctcctacgccgagggggagaggcgccggaggggcaacaaggggcggtggtgctcctgcgccgagggggaggggcaccggagaggcggcaagggacggtggggctcttgcaccaagggggaggggcgctagaggggcggcaagtggcggcggtgcgccggccgttggagaaggagctgccatgggcactggaaagcccggcggcgctccggcgaccagatggacgggagcaagggtggcgcggtaa

SEQ ID NO: 143007 - DNA, 609 bp, Zea Mays
tttccccttggccgccgccccccctctccacctcctcctccctccattgttgcagccaccaaaaccctagccgcccccccccccaatcccctcctccctaggtgctactccgtgccgctcggatcatcgtcttttggtgcgaatctccaatcattttggtggaaggaagaagtgaggaaggaaaaggggagaacccaaggtggtggacttccggatcgttcttagggattttgccctaacttcggtaaaggcacctgatctttgctttgggaaagaagggatgtagcagcacggccaccacacttttaaataaaggaataactgtttattaatgatattaaacaggaagggtcaagtctagggaattattacattctaatctttcatggtagttgaactgtttagtttggtgggctgagatgtctatcttttgtctggtcatgaatgttttttttctaccgttgcattttgattatactatggcaattatctttcttttatatcctgtataaactatatgcttcccttgttatgctactttcaagggaggtgctgccggattttgcagtactttctttctctatgtgttgcatgagtcttgtagaaagg

SEQ ID NO: 143008 - DNA, 194 bp, Zea Mays
cctagctacctcattatgctagaaaatgaaaaaagagcgtgctatacctggctatctcactgtgtgggaaagggaaaaataatcacgctagtgtgaagaaattgacgtcaactgtatttagggagttcctaccgagttgctaaatgtggagagtaaatagagttgaatagcaactaagtaaatttagcaagtct

SEQ ID NO: 143009 - DNA, 1396 bp, Zea Mays
acaattttattatttccaaatggatccctatacgatttcatcacagaaggatttttcataggtgtgcaaatcaaattacagaagctgatgaacgtcatgcatgcacacaagaagatttttttttttttgacgaggtcatttcgtcacagaagaatttttcattttgaagacgttcatcagctggcatctattcagagtcaaatcagaacatcgttcacgttcatctgaactgtgaagttgccaaccgaatcctttcagatgtgttcaccagtctcactcaatcaaaagaaattacagtccaactcccaaaaggtcacgcaggatcataaacaataatggcagtaaccagttttcaaacttccaatccgcctaatatatagagcagcccttgcatcctaatctcacaacacagagcaaaacaatcaccactgcaggtagagcaaaacaatcaccacacatggcaaccggatcatcgctggtgccactgctgctgattgcagtagctgttgcacagattgttgggtcacaagctggtagcatttccatatactggggtcagaatggtggcgagggcacactggccgacacctgcgccaccggcaactacaggttcgtcaacttggcattcctggcagcctttggcaatggccagcctcctgtcctcaacctggcaggccactgtgacccgacaaacggcggctgcgcaagcctcagcggcgacatcaagtcgtgccagagcagcggtgtcaaggtcatgctctccattggcggcggtgcgggcagctactacctttcctcagccgcggacgccaaggatgttgcgacgtacttgtggaacaatttcttggggggtcagtcatcttcccgccccttgggtgatgcagtccttgatggcatagacttcgacatcgaaggcggcacaaaccagcactgggatgatcttgcaaaatacttgaaagggtacagcaactctggcaggagggtgtacctgaccgctgcacctcaatgcccgtttcctgatgcctgggttggtggtgcgctcaacaccggcctgtttgactacgtctgggtgcagttctacaacaaccctccttgccagtacagttcaggcagcaccactgatcttgctgatgcatggaagcagtggctgtcaattccggcgaagcagatctttcttggcctcccggcttcccctcaggcagctgggagtggttttataccagctgatgacctcaagtctcaggtgcttccattgatcaagagctcagggaaatatggagggatcatgctgtggtccaagtattatgatgaccaagatggctacagttcttcagtgaagagtgatgtgtaggttgttttcctgtgatgtgtcacaatatctgtgtgttacttgtgt

SEQ ID NO: 143010 - DNA, 108 bp, Zea Mays
gatttgcctattcaccccccctctaggcgactttcagtactccacaacatttattatgcgaagaaaaacatgtcgcctcatctgaaaccaatgacacgacacaattaa

SEQ ID NO: 143011 - DNA, 1747 bp, Zea Mays
tccttgtttcctcacctctactctcactagaacagaaccctaaacccgcatcccgaacattgacgccggcgatctccgccgccaccgccatgttcgggaccccatccatcactcccgctttcgggaacccctccagcaccccggtttttggcacgccatccgccacccccgcatttggcgcgacgtcgtccaccccggccttcggcaccctctcgtcgacgcctgccttcggcaccccttcgtcgactcccgctttcggtaccccgtcgtctacgccagcgttcgggaccgcttccacgacccctgcgttcggggcatcgtcgtcgacgccagcgttcgggaccacttccacgaccccgccgttcggctcgctgaatttcgggacgccctcgtcgacctcagcattcggcacgccgtcttcggcgccggcgttcggcgcactcaatttcggaacaccctcgtcgacctcggcattcggcacgccctcttcggcgccggcgtttggcgcgactccttcgccctcgccctttgggttccagcagcaggcgacgccgtccccatctccgttcggcttgctaggaggtggcggcgcgcaaatcaccacccagatggcccccgttgcgccgctgccgctctccccgtccgaccgcgacatccaggccattgtggatgcgtacaaagaggaccccggtaatccacgttatgctttcaggcatttgttgttcagcgtgacagaaccttcccaaagggtgaagccagttgctgcctcagatattatgtgggcagaagcaatggggaaacttgaatgcatggatagtgcagacagggagaggctgtggcctcagcttgtgcagggttttaaagacctttcccatcggcttaagcttcaagatgaagtccttgtttcggacactgatagattgagcatgactcactctaatgttaaaaagctgcaaaggcatttccaagctgacacgtatccttggatccagcgattgaagcaacaagagctggctattcagagacgtcttttaaggtttgttagaatagtggaggcattggagaatcggggctaccgctgtcctttaacaaaggaggaagctgacttgtatgaaagattggttgctatattaaagcggctaaaaggacataacgctgatcttgctaagagggtcaatacacttgtttcgacgtcgcgtcttctggctagcagtggtggtgctggtggttccgtttatattcccagttctgcaaaagttgatgagcggagtgttacagagcttcttgaggccttacaacaacaaacagaggcagttgccaagctaggtaatgtgttgaagagggatatcagggacatggagatcatccagtcagaaggtacggatatggctgaagacaatgtggggagaagggcacagaaaatataagattgaagcatggtctttgtcgtagctaagtaataagcgggtgatggaagggatccatcgtcgctagaaggatctgagcctccaacttatttggagtaatgggccagggaaatgatatccctgtgtaactgctgcaggcaagcttgattctgcattctttgggaagctaaccatggtcaatcagtagtggtatgtgtagattgtatgtggaactgaggcagtattcttagaactcagctttctcctcgtgccaactacattttcagtgctgttttgttgctcaccgtgattcgttgagctgttgtaactatagatggcca

SEQ ID NO: 143012 - DNA, 441 bp, Zea Mays
atggcaagaatgagaaaggttccagtgtttatcaacaaacgttgtagtcatgtgattatgctgttgtatatggcttcagtttacctgctgcagaaaggttctcattacttgtattatttgtcaagtgttcctagaaagctctcagagcgactatatcatgggcgtggcagcctcccatcagagtcccgccagcgccgaacccttcgcatcgacagtggccacactagagaagaagccatacccacctgccatggtcgcggaggagggagtttcatgtttgtgaatgccatcggaagggatcaggctctggaatcagggagcaagattgtgtatgttgtctcgcaagtcctcttccacgaacaagttcaggctctagagaagtctggtgattgcgtgggcactttgattctgctctactatggggaagatgacaggaggtga

SEQ ID NO: 143013 - DNA, 368 bp, Zea Mays
atatatatctatttattttgcaaataaataacacgagcacgcgtcgtggccacaaaaacagtctggatcagaatgtggaaatcacaaaaccacctcccttgagaccacaggatacaatatctgagtcacgacagaaacaatgaaccggatactgctatggtctagttatacatttgagccatgtttcgacctcgtctcgacacgttctgctccacttgttgcacaatatagatggaaaccttctcctatgccctcgaaagagaatatccagacgcatactgcataccacattgctccatcgctcgggtgcctaaggttaactggatactattagcagtaagaactcacaattagaagcttagatttgt

SEQ ID NO: 143014 - DNA, 860 bp, Zea Mays
gggcttcttaaaaatagtattcccaaacttgtaattagaatagtagtattataacagctggctctttgttcttttgctatcctctccaattttaacaactctaaacaggcatcaaccgtaaccatggagcaaaacggctcttccattcctctgtgtttcactcccagttgccggctcccggctctacctcgtcggaaatggatcctccaccgtcggacccgacgttgtttgtccaacctcacgagttcgtcgccaacctccatggtgaactccgcagagcaggcagtgggcgactggcacagtagcacgcgtcgcagcttgctcttcgcgcatcttgttgctctcgtatgtcgagcgtcatcagccaacctcgtgtgtgtcgtccatcttgttcctccaaagaaagaaaccgaagaacgatgcgagtagcacaaatgagattgggatggagatgaggtttgtgaagctctcaatgcaggccgtagaggccgccatggacgagaggcggaagtctgctgcaggccttgaggccttcgcggagccggagccgccgacgtcatcctccttgtcatcggaggacaccgacgacgtcatcctcgcggcacggcgatcaactgcagcaacccgagatgctgccaggtcggaggacaccgacgatgtacttcaacgtgaaggagtagtctgggttgggcagcggctccgggacggtggtctccggcgagaacatccggcgcacctgtcctcccagtagccccggcctgctgccatgcctgcccagtgcagcagcaaaccgtcgagcaccttgcatgcggcgcgcggcaagtccggcgtggagtaacgggatgttcttcaacgacatc

SEQ ID NO: 143015 - DNA, 570 bp, Zea Mays
atgacggtgggcgatgaagccaggaggggaacgtcgggcgtgctgaaggaggtgacctggcgcagcagcgagggcgtcggcgccagtgtggacggtgtcggcaaggggagctccagtgaggggtcgaagaccgatgatgaagagggtttcatccccgtcgagctcgctgcgagcaggggcagtgacagttgcgcgatacacggaggagaaagcaccggggaggagggcaaggacgaggccgcctgcgcccaaggtggtgtcggcgacagcgggaagacccacactcgagcctgtggcggcgtgcaggccggcgacggggatgtggccgcccgcgtcgaggcggcaccacaagcacatccaggagacttggtagcgaaagagattgcagagacacattggtataaatttactaaggatggcatcagtcagggccatgaatcaatgctccaagatgcacaagaaatcgatcctgacggcaccgaatctggcggtggaaatgggggtggcggggatttgcgagaaatgggtattggggagggttttgccgccaggctgtcaaaggttttttag

SEQ ID NO: 143016 - DNA, 2958 bp, Zea Mays
cttccattcgcagcagcgggtcacgagaggggtccctacgcccgcctttccaaatcctcgctcgctcgcgacgaccgccggcggcaccgccgaggctgacccgcctctgtccgatgcccccacgcgcgccgccgcgccggcggcctgctcccgccgcgggaggccccggcttcggcgactccgcgcgtgtgctgctcgcgctggccgcgctctacgccgccatgtcgctcctcgcctaccgcgtcatccacatgcgccacgtcgcgccgctcggcgccgacgcgccgcggggaaacttctccgagggacgcgtgctccagcacctccgccgcctcgctgttgacatccctggccgccaggaggggagcccagggttggaggccgccgcgcagtacatcaaaggggagctccagggtctcgccgcgcgtgcgggcccggagtacagaatagaggttgaggaaacacttgttagtggctctttcagcatgatgtttctgcgtcatagagtaacactaggctacaggaatcataaaaatattgtcatgagggtttcatcaaatgtttcagaagatgatgatccatccttgttggtaaatggtcattttgacagcccgcttggatctcctggtgcagcagactgtggttcttgtgttgcatctatgcttgagctatcacgactcctcattgactctgggtgggtccctcctcgaccggtgattttccttttcaatggtgcagaggaactttttcttttgggctcacatggttttattaagacacatagatggaacaggacaatccgtgctttcatcaatattgaagcttctgggagtgggggtacagatttagtttgtcaatctggacctggatcatggccttctcgtgtttatgctcagactgcaaagtatcccatggcaaacagtgttgctcaggatatgtttggaataattccaggtgatacagattatagaatatttgctgaagacattacaaacattccaggacttgatataatttttgttctcggtggttatttctatcatacttcatatgatacattggagaatctacttcctggaagtattcaagcacgtggtgaaaatttattcaaccttgtgaaggcattcacaaatcctatgttgttaaaagagaacgagatatctaataaagctgctaaggatggaattgaagatgtgggggcggtcttttttgattatttgacttggttcatggtattttattctcgtgatatatctctgattcttcacagtctaccgatagccatttttcttcttgtaccgctgttcctgaagttcccaaacattaccttgatgtcatggtttgtaactctcctaggtttcatgagaggaatggtactccatacgtttggtgtaatccttgcaatatttattcctgctctggctgcagcattaagattattattcacaaagaatgcaatgaattggtttgctcacccttatttggcgttcctaatgtttgtccctacttcattgattggtctattgctgccaaggcttacatgggtatttccttataaacatgggctatcggagcaagcacacttttggggtgcttttgggttgtattctttaataactatggtctacacactagctgggctgagtggaggttttctaacatttttcatttccatgtccatgcttcttggacgatttgtctctagaatcattaggaagcagtggagccaacaatcacctaggtcgttggttgcgtatgtgctgcctatgaccccatgtctcctttacggtctttactatggtggattccttatccagttcctgattgaaaagatgggcatgatgggatctcttccaaaaccatatggatattttgtgcctgatgttattgttggagctgtagttggattagtggttggttggtgttttggtcctctatcacctgttgctagtcgttggttgtcgaagacttcaattatccatggcttcctgcaaattacagtggttgctttggctatctcatcccaactgtttccttacagcactggagcaccaaaaagagttgttcttcaacatacttttgttacagatgctaataatatcgtggattcaagctatggtttctctgtggttgattctaactcattggagttccttttcaacaatgcacctgaggccgccaaatggctgaaggataactctgagttgtcctttgaagaaaaatatcggtctgatagaagctcatggttggctttgtatcctgtcccattcttgttctctggaagtttaaaattccaggcacaaactgaagagattaaaaagtactaccagcatttccctcagttagctgttcaggagatctgggataacaatggacagcgaagggtgcatctcaaacttgcacttggttccttatcagaaatttggacctctgtgctcaatattactgggccactatcaaattggtccttcgctgataacatgctcccagctcctcaaactgtaagtggtgggccaccatcatatatttgtcgactcagtggaaagagcgatgtggattggtctttctggttggaggcaaactcttctgaaagtctgagagtcgatgtcgcagtacttgatcagtaccttgttgatagtacaaagaaactcaagagcctcttcccaagttgggcagacttgacagccttcacaacatttttctcaacgtatcatttatgaggaggtcaagtatttgatgttcaacaagtgtaaatcattttctctttgtagccctacgtttcggggctatatgtggttttgtcaccatgatcagctggacctgagccccgaggctggtgtttgtaaaatctttgtaagcgtgccttgatgtattcatgaatcacacaagattgtaagaatctcaagtcagtcataaattttttaccacttagtcattcacgattgacggtatggcatc

SEQ ID NO: 143017 - DNA, 2912 bp, Zea Mays
cttccattcgcagcagcgggtcacgagaggggtccctacgcccgcctttccaaatcctcgctcgctcgcgacgaccgccggcggcaccgccgaggctgacccgcctctgtccgatgcccccacgcgcgccgccgcgccggcggcctgctcccgccgcgggaggccccggcttcggcgactccgcgcgtgtgctgctcgcgctggccgcgctctacgccgccatgtcgctcctcgcctaccgcgtcatccacatgcgccacgtcgcgccgctcggcgccgacgcgccgcggggaaacttctccgagggacgcgtgctccagcacctccgccgcctcgctgttgacatccctggccgccaggaggggagcccagggttggaggccgccgcgcagtacatcaaaggggagctccagggtctcgccgcgcgtgcgggcccggagtacagaatagaggttgaggaaacacttgttagtggctctttcagcatgatgtttctgcgtcatagagtaacactaggctacaggaatcataaaaatattgtcatgagggtttcatcaaatgtttcagaagatgatgatccatccttgttggtaaatggtcattttgacagcccgcttggatctcctggtgcagcagactgtggttcttgtgttgcatctatgcttgagctatcacgactcctcattgactctgggtgggtccctcctcgaccggtgattttccttttcaatggtgcagaggaactttttcttttgggctcacatggttttattaagacacatagatggaacaggacaatccgtgctttcatcaatattgaagcttctgggagtgggggtacagatttagtttgtcaatctggacctggatcatggccttctcgtgtttatgctcagactgcaaagtatcccatggcaaacagtgttgctcaggatatgtttggaataattccaggtgatacagattatagaatatttgctgaagacattacaaacattccaggacttgatataatttttgttctcggtggttatttctatcatacttcatatgatacattggagaatctacttcctggaagtattcaagcacgtggtgaaaatttattcaaccttgtgaaggcattcacaaatcctatgttgttaaaagagaacgagatatctaataaagctgctaaggatggaattgaagatgtgggggcggtcttttttgattatttgacttggttcatggtattttattctcgtgatatatctctgattcttcacagtctaccgatagccatttttcttcttgtaccgctgttcctgaagttcccaaacattaccttgatgtcatggtttgtaactctcctaggtttcatgagaggaatggtactccatacgtttggtgtaatccttgcaatatttattcctgctctggctgcagcattaagattattattcacaaagaatgcaatgaattggtttgctcacccttatttggcgttcctaatgtttgtccctacttcattgattggtctattgctgccaaggcttacatgggggctatcggagcaagcacacttttggggtgcttttgggttgtattctttaataactatggtctacacactagctgggctgagtggaggttttctaacatttttcatttccatgtccatgcttcttggacgatttgtctctagaatcattaggaagcagtggagccaacaatcacctaggtcgttggttgcgtatgtgctgcctatgaccccatgtctcctttacggtctttactatggtggattccttatccagttcctgattgaaaagatgggcatgatgggatctcttccaaaaccatatggatattttgtgcctgatgttattgttggagctgtagttggattagtggttggttggtgttttggtcctctatcacctgttgctagtcgttggttgtcgaagacttcaattatccatggcttcctgcaaattacagtggttgctttggctatctcatcccaactgtttccttacagcactggagcaccaaaaagagttgttcttcaacatacttttgttacagatgctaataatatcgtggattcaagctatggtttctctgtggttgattctaactcattggagttccttttcaacaatgcacctgaggccgccaaatggctgaaggataactctgagttgtcctttgaagaaaaatatcggtctgatagaagctcatggttggctttgtatcctgtcccattcttgttctctggaagtttaaaattccaggcacaaactgaagagattaaaaagtactaccagcatttccctcagttagctgttcaggagatctgggataacaatggacagcgaagggtgcatctcaaacttgcacttggttccttatcagaaatttggacctctgtgctcaatattactgggccactatcaaattggtccttcgctgataacatgctcccagctcctcaaactgtaagtggtgggccaccatcatatatttgtcgactcagtggaaagagcgatgtggattggtctttctggttggaggcaaactcttctgaaagtctgagagtcgatgtcgcagtacttgatcagtaccttgttgatagtacaaagaaactcaagagcctcttcccaagttgggcagacttgacagccttcacaacatttttctcaacgtatcatttatgaggaggtcaagtatttgatgttcaacaagtgtaaatcattttctctttgtagccctacgtttcggggctatatgtggttttgtcaccatgatcagctggacctgagccccgaggctggtgtttgtaaaatctttgtaagcgtgccttgatgtattcatgaatcacacaagattgtaagaatctcaagtcagtcataaattttttaccactt

SEQ ID NO: 143018 - DNA, 1406 bp, Zea Mays
agcttcctctcacgcactccgttttgtggatctgatctcctcttgtcccaaacttttgcttcttcgttcgtcgctccaaaagtttcgaaacggagagaaagaggcttgaaaactgagccggccgatcgagtattgtagggcgtcaagagatcgattgatctgggagagagagaaaagggtaaagaaatacttgctggctgctgctggccatggaaactggatgcttcttccagatgtggaacagtcagcaaagatagatcacaaaaaggttctctggacaccgccaaacaatggcccatcagcaggaacaccaaaaccatggacaagccagcaccagtccttctgctgcccgtgccgaaaccgaggcagacaagaaggaaccgagctcctcgtcgtccaactcatcagaaaacacagatgaggacgatttcttccagatagagggcccaatactaggcagcacactgtcattcgctgacaacgcggcgatctcagacactagaaagcagagcagctcatcctcctcgcatccctcaggttcaggtcatgccgccaccgacccaaagcagtcgccgccggtcctgcaggccatgtccagggcgccggcggacgagtgtccggaccccaagaggatcccgtcgtccattttcgcgaggtcgaaatcgaaatcatcgccggcagactggagcgtgacgtcgaatgagtccctcttcagcatcaacgtcgggaacgcgagcttctccaaggaccacttgttcttgtatggcacgtcaggtgagctggggggcaaccccagtgagccgctgccgccgctgccgccgttgccacggcagagccctagctctagccccatgagaagcgaggtggcagcagcgccgaccagtgctggagtgaagcctgctactaccagggttggcgacgatggcgatggcaatgctgattacaacaacagcttgtcgcaccggtctgatgctagcacgacaagcttcgcgttccccatattggcaggtgacgcgaggtctagtgagtcactgaaagacggccctcctgagctcgcccggcaaagcacgtcgcagctaccacagcaggcagagcctcttgttgagcaggaggcaccgaaagctaaagatggggcgctggaagctgagcaagcccctgcccctgcccctgccccggaaccaacaccggcaccagcaccggaatcgacaccacaaccaccagccgcgacaaaatggtttccttgctgttcttgttgtccgttctgttgctgagggatgctgcagtagcctctctccatggggatctgttgagtttctgaagtagaagaaggctggatgcagcaataggctgaagtcaaccatccatgggatttgctagcaacttggttggttctgatcagaaaatta

SEQ ID NO: 143019 - DNA, 1499 bp, Zea Mays
ggttccgatgaagcgccagaaaagagtccacatgaccacatcggtctctccggttctttaattgcgcgccaatctgttttatatatacggagagagcactcctgttttgttgcaaattctattactagctgcaaaagggcgtgtttgagactagcggaccgaccttgaagttgaagttgaaaaggtcggcctgcgcggcgatggatgtcaagtgccggcgtctggaggggaaggtggccatcgtgacggcgtccacgatggggatcggcctcgccatcgccgagcgcctcggtctggagggcgccgccgtcgtcatctcctcccgcaagcagaagaacgtgaacgaggcggtggaggggctcagggccaagggtatcaccgcggttggtgccgtctgccacgtctccgacgcacagcagcgcaagagcctcatcgagacggccgtcaagagctttgggcacatagatattcttgtctccaatgctgccgcaaatccttctgtagatagcatacttgaaatgaaagagtctgttctcgataagctgtgggatattaacgtcaaggcttctatccttcttattcaggatgctgctcctcacctacggaaggggtcatctgtgattattatttcttcaattgctggttacaatccagaacaaggattgacaatgtatggtgtcacaaagactgctctctttggtctcacgaaggctcttgctggtgagatgggacccgatactcgtgttaactgtatagcccctggttttgttcctacacggtttgctagtttcctcacagaaaatgagaccattaggaaagagcttaacgagaggaccaagcttaagagattgggtactgtggaagacatggctgcggctgcggcttttctggcgtctgacgacgcatcatacattacggctgaaaccattgttgttgctggaggggtgcagtctaggctgtaaatctggctgaagtttatatttacttggttaataatgtgtactagtgccctagagcatcaggcgtggctaataatgtgtactagtgccgctagagcatcaggctaccttctatatatgacaggcaactctaaaagattttctatatcttattcctcttcaataacgtcctttctatcagcatcttctatatgtcgttctccacgcttaaaaaaattcgtattaaggatattttttttcagttttttataaacggggcataagttggctactgttcgtttaaattggattgcagtgtgactactctcccatgataaaatataactgacttttagttgatttaagtcaaatcacactaagtttggtgtagaaaagaccaacaatatttatttttttagataatggagaaaaagttctggctttcccctcaaaggttaggaccaacacaaattgttacatcacactgctctatgaagagacagacctctccacacagccacacactaccacactaaaggtttttgaaaattaataaaacca

SEQ ID NO: 143020 - DNA, 1626 bp, Zea Mays
atgtcgatacatatttgcaagaacaattatatgccaggctatgaggtgtgggtgcaccacggtgaggacccacctcctcgtattgtatcggaagttcagtcacatgaagaggaggactacgataggatggaggagatgcttgacgatgtacgccatgagcttctaaccatcgattcggagaaccccggtcaacccaccgagtttgaggatccagctacacctgagagacgagttgaagggtgcatcgctgaagaattcaaatacaaagagatagcatcgttcacgggcctgtactttgcagaggaacacaatgtcaatgcccatacgttgcggtatcatgtcgacgagccccctattagtgatattgaaatttttcaatggaggggcaaaactgtaggacccagcacaacatactgtttcaccaacgaggaatggaagactgctttactctacatgtataacaacatggaagagatgagtcagtttctcctggaatttgattctcaaaattgcatctctagctgtgaacgtgaccagattcgtcgagagggaaaagatgggggacttaatttcttgtgttggtttcgagattatgtagataaaaatgacaatatacacccggaccttcgacaattatccctaggagcagtaactggcagacgttatggtcggtatgatgtcaatggttttagattccgttccacaaggttcgaagatgatcatcctctagcagccacaacaaactccggagttgtaactagagctgtcgatgatgaagggaaggtgactaattattatggagtcattaatgatataatcgagtacaagttttttggagataaacaactcaaagtggtgttcttcgattgtgattggttttctccaaatactacgcgagaaaatcaatatggcatggtggaagtcaaacacaacgatagattaaaaggccacgacactataatccttgcccaccaatgcgactccccttcgtggtggctgtccctgcccctgcagcagcccttcctctgctctccatggacgccagccatggcagcccccatgctgctgcgtgatggctggaggtggaggttgggtatttttgattctacgattgattccagagagctgagacgtcgtggacgacaatcaacatcgtcgtcttcacagtcgtcccgttcacaaacatccgcccatgagatagagcttgtagtgttgcgtcaacagacacagtaccatcaatcagtcttgagggaacaattggagtaccagaggcaacaatctgaataccagagacaacaagccgagtatcagaagaagagggatgagtattatgcaagcctgcaggcccaaaatcaagctcttctctcgcaactagcccaacaagcgggcgtcccgatgccgacatatgggatgctgcctccggactttgcactgccaatgccaatgttggcgcctccacctccgcctccgcctccgtcacaattccctatgggatttcagacaccacccgcttcagttgccgcacctggagatgggtctggtcaagacgacacaacacattcatgggtgaacaatcttttcaacacgcatagtccagccggaggaggtggcgatggatatgagtga

SEQ ID NO: 143021 - DNA, 1353 bp, Zea Mays
ctagctagtgtcaaggaggaggagcagcagcagagtacgcacgtacagcgccacccacaccacacccatggcaaaggtgcagcaggacaaggcggcgtccggcgggaacggcggcggcgatggggcggcggcgccggctggggagcagctggtgataagggcgccggtgcactgcgatggctgcggcaggaagctgcgccgctcactccagcgcctcgagggtgttggagaggtgaccgtggacagccgggccgacacggtggtcgtgaggggccgcggggcggtggagaacgcggcggaggtcgtgcaggtcgtcgagaggaagaccggggagaaggcggtgctggtcagcccgtcgccgccggagaagctgctgctgccggcgcggtcgtcagcgcccaaggccaagggtggagagaccaacaccaacaaagacatagggaacgagctaccggaactggacatgaaaatggttaccgttcttaagataaacctgcactgcgacgcctgcagcgaggagatcaaaaggcggatacttaagattacaggcgtggaggaagccatgccgcacctcaagtcttcacaggtggcggtgaagggaaaggtggagccggcaacactggtgggcttcatccacaagtgcacggggaggagagccgccatcatcagggcggagccactggatgatgttctcctgccgcaaccaccaaacccgccggcggcgccaccggcgtctaaagccgagagcaagaaagatgagccacctgctgagaatccgccggccaaggtggaggagccaaacgaggagaacagaggagggggagagaaggacaacgcggatgacgacaaccccaagacggagaagccggctagcgacggccacggcgccggcgccgccgaggagcatggagcccatgcaacaaccgaaggtccagaccgtgacaacgacgacgacgccggcgatgggctcgtgctggagaaccataccaaggcggcggtggaccgcctgttcgccgttccgacgccggccggagtcgtgacggtcgttgcgcctgagatggccctcggcagccgcagctactgctacccggcgtatccttgcgcgcagtactactacccctaccagccgcacctgtacccgccgcagccgtacccggcggcgtctgcttatagccctgttgccatgtatggctatccagcaagctatccacccgaagctttcagtgaggagaacccaaatgcatgcaccatcgtgtgacatactagtatatatgtagtataaaagaagccagtacttgtgtgtgtgtgtatatatatatatatatatatatatatatatatatatatatatat

SEQ ID NO: 143022 - DNA, 2735 bp, Zea Mays
gtgctagtgagcgtgcgtcgcgtcgtgcactgcagtagcctcagctcctgtctcgtctagatcgatggaggttgccacgcacatggcaaggtccagcaccgtgtactggtcgctgctcgccgtgttctcttggttggccgccgccggcgcaggccttggcgacggcgggaggtcgccgccgcaggtgtacgtcgtgtacatgggcgccgtgccgccccggacatcccccagcctgctcttggaaagccacctgcgcctcgtcagcacggtactcaagaggggccggagggcagacagcttagtggtgcaccagtacaagcacggcttctctgggttcgcggcgcggctgtccaaggacgaggccgccgcgctgaggcggaagcccggcgtcgtctccgtgttcgccgacccggtgtaccagctgcacaccaccaggtcctgggacttcctgcagcagacgacgacggccgtcaagatcgacgacgccgccggcgccggccctgctagacgcagcggcaacaagaagggtaaggccgccgcacccgccaacgacccgtcgtcgtcgtctccggcggcggacactatcatcgggctgctcgactccggcatctggcccgagtcacccagcttcaacgacgccggctttgggcgcccacccagccggtggaagggagtgtgcatggctggggatgacttcaactcatccaactgcaacaataagctgatcggcgcgagatactacgacctcagcagcgtaagggggccggcaccgagcggcggcgggtcgccgcgggacgacgtgggccacggcacgcacacgtcgtccacggccgccgggagcgcggtgaccggcgcctcgtactacggcctcgccccggggaccgccaaggggggctccgcggcctccagggtcgccatgtaccgggtctgctcccaggcgggctgcgcggggtcggccatcctcgccggcttcgacgacgccatcgccgacggcgtcgacgtcatctccgtctcgctgggcgcgtcgccctacttccgcccggacttctccgcggaccccatcgccatcggctccttccacgccgtcgccaagggggtcacggtcgtgtgctcggcggggaactccggcccgggcgccgccaccgtcgtcaacgcggcgccctggatactcaccgtcgccgccaccaccatcgaccgcgacttcgagtccgacgtcttgctcggtggaaataacagcgccgtcaagggtgtagctataaacttctcgaacctggacagatcccccaagtatccattgatcaccggcgcagcggcgaagtccagctcagtttctgacaccgactcagcaagccactgtgagcccggcacgctggacagcagcaagatacgagggaagatcgtgctgtgccaccactcgcagagcgacacgtcgaagctggtgaaggcggacgagctccagagcgccggggcggcggggtgcatcttggtgatgaacgacaacgagagctcggtggccaccgcctacctcgacttcccggtcaccgaggtcacctccgccgccgccgcggcgatccacaagtacatcgccgccgccagcgaaccggtggcgacgatcacggcggcggccaccgtgacggagtgcaagccggcgcccgtggtggcctacttctcgtcgagggggccgtcggggcagaccgggaacgtgttaaagccggacatcgcagctccgggggtgaacatcctggcgtcgtggatcccggcgtcgtcgctcccgccggggcagaagcagccctcgcagttcaacctcgtgtccgggacgtccatggcctgcccgcacgtcgccggggccgccgctaccgtcaaggcgtggaaccccacgtggagccccgcggcggtccggtcggccatcatgaccacggcgaccacgctgaacaacgagcgcgagcccatgacgacggactccgggtcgccggcgacgccgtacgactacggcgccgggcaggtgcacccggcgggcgcgctggaccccgggctggtgtacgacgccggggaggacgactacctccgcttcctctgcaactacggctacaacgcgtccactgtgaggctcgtcgcctccaccctccccagcgggttcagctgcgcggccaacgttagcaaggacctcatctccgacctcaactacccgtcgatcgccgtgacggggctcctcggcaataaatcggctgcggcgggccgaagccggaccgtgacccgcaccgtcaccaacgtgggggcgcaagaggcggcctcctacacggtcgccgtcagcgcgccgcccggcctggacgtgaaggtcacgcccagtaagctcgagttcaccagaggcgtcaagaagctggccttccaggtgagcttctcccgtagcgggaacgacgacgacgcggcggcggccaagggcgccctttcgggctccataacatggtcagacggaaagcacatggtccgcagcccgtttgtggtcaccagctgaaacatcatggcaatacctgacgcgcaggcacgtcaagaaatgctgtgatctcagatataaagtataggatacgatgttgaaagccactgctagtggcaaactcagaatcatcgaagattctgaaactgggccttccaaaacgccttggtcagaaatgacggttaaacattctaatataatgtcgaaaccttaggctcatgtacaatgggaaatagtaagcatc

SEQ ID NO: 143023 - DNA, 1383 bp, Zea Mays
atggcgccgccgctcagcctccctccgccccaccactccctcccccacctcctccgccaccgccttccgctgcgccgcctcgtcgcggcccacgctctcgccgccgtcgccggccacctgtcgctcccggatccgcgcccccataccatcctcatcgtcgcctactcccgcctcgagcgccctttccccgccgtgctcctcctcttccgctcctgcctccgccgctccctcgcgcccacccgccactccctcccgctcgccatctctgccgccgcctccgcgggcctccgccacctcccgctcgcgctctccctccacgccgtcgcagtttaccgcaacctcctcccgttccagcatgtggccaacgcgctcgtctccctgtacgccaggcacacgcgcctgggcgacgcgcgcagggtgttcgaggaaatgccctccgcccctgacgtcgtctcgtacaacacgctgatgcacgcttacgtgaacaccgggagtgtggccgtcgctcgggaggtgttcgaggggatgcctgtgcgggacgccacgtcctggggcactgtgatcgccggctctgccaaggcggggcagctggaggaagcgatggcactattcgacaggatgctggaagaggggttcaggcctgacgatgtagccctggccgcggtgctttcatgctgtgcgcagctaggggcgctggacaagggccgggaggtgcatgggctcgttaagctgagcaggccccggccgaacgtgttcttgtgcacggggcttgtcgatctctatgccaagtgtgggtgtgttgaggctgctagggagatgtttgaagcatgccaggataggaacgtgtacacatggaacgctctcattgtcgggctggcaatgtatggccacggaacggtggcgctggagtacttccaccgtatggtggctgatggaattcgtccagatggccacgctggccttgtggacttggcaaggcgcatcttccatgacatggagagtgtgcacaatgtgccacgggagctgaaacactatgggtgcatggcggacttgcttggtcgggctggactcattgaggaagccatgaacatggtaaggaagatgcccatggaaggggacaattatgtatggggaggtattcttgctggatgtagaatgcatgggaacgtggaggctgctgagcttgcagctcggcatttgttgcaactgaacccagatgacagtggggtgtattctgccatggctgggatctatgcagctgcaggtaggtgggaggatgtcgtgaggattaggaagttgatggatgaaaggattgtcaggagaaatgttgcatgcagctcaattactacagagctcaaagatggtactattatgctgagctga

SEQ ID NO: 143024 - DNA, 413 bp, Zea Mays
ctgcactaagctgcgatccagagagggacaaaaaaaatgaggagtctagcttctcgtgtcgtttgtttctgcatgatctcctcgttgttcatctctgcatttgcagccagtcgtcagccggcgatctttcaatcggactatgcagacgatccaagtcctgctccgacaccgcaccgacctcatgcggcaccgataccgccaggtgacagtcgtatctggatgaacagccatgacggcggaacgagtacgctgccccgagatgcagcgaccccctctgcgtcaagatgaaatgaatcaacgatacctcagacttggatcccctggtggcctgtctgggagatcttagttttaggcacaaaacgggtgtaaatcactggctaaataatgacaataatatttccagagttaattac

SEQ ID NO: 143025 - DNA, 1431 bp, Zea Mays
gaaaaagtatctctctctcccgcgcgcgcgggtgagccggggaccctcctacgtctcgccaccctgctggtatagcccgccggtcgtccacgccatggccacccaatatgcgcggctctccctgccatgccgcctgccctcgccgctccctccgccggtgccgacgacgacccgccggctgccgcgcgccgcggcggcggcggcgtccacctccccgcggtgcccacgcgtcgggggcgcggcggccacgcgcgcccgcggcccgtgccggcctcgcgcctccgagggcgaagtgcagcagcaggaggcggaagcggaccaggtggtggacagcaacatgctgccctactgcagcatcaaccgcaaggagaagaagagcatcggggagatggagcaggagttcctccaggcgatgcaggccttctactacgaaggcaaggcgatcatgtcgaacgaggagttcgacaacctcaaggaggagctcatgtgggaagggagcagcgtcgtgatgctaagcccagatgagcagaagcttttggaagccgccatggcgtatgtctcgggcaaccccatcatgacggatgatgaattcgatcaactaaagctgagactaaagaaagaaggaagcgacattgtacaggaaggtccaagatgcagcctacggagtcgaaaggtctacagtgacttgactgttgactacttgaagatgttgctcctaaatgttcccgcagctgttgtagctctggcactattcttctttttggatgatttcacgggatttgaaatcacatatcttcttgagttgccggagcctttcagtttcatcttcacatggttcgccgcactgcctttaatattttgggtagcgcaggcgatcactaatgtcatagtgaaggacttcctgatcttgaagggtccgtgtccaaactgcgggaatgaaaacctctccttcttcggtaccatactgtcagtgcctagcggtggctcaaaaaacagcgtgaaatgtgcaagttgtggcactgagttggagtacgactcttcaacccgattgatcacactcccagaaccggctgaggctaaataagtgatggcgtggtttcgatttcgctagcaggaaagacggcccggccggcccgcagattcttgatcgacgacagtacgaagcaagactgttcttggatcgggtggcaatcgtggagtgatgtatgtttgctgtgctagtctgtgtgtatatatatttgaacaagtttagacacctgtattatatagatctaatgaaatgggtatatgtatgtgcatagagtgtacaaagaaaaatttaataagccgagttattgtatgttttttctcctcctatatattgctgttacctagtcggctactacaaacaatgagggataaacaagcaaataaacaacgatttctcgatgg

SEQ ID NO: 143026 - DNA, 174 bp, Zea Mays
ctatatatactattcctaagagcatcttcaagagactctttattttttgctctctatttgactatttatttacgttttcaaaaagattacactctatatctgcatttcagtccaacagattatatatctagtttggctagtcaggtggctagctaaatttacctagtgagagag

SEQ ID NO: 143027 - DNA, 799 bp, Zea Mays
acagccgtgccgcaacacacagcagcaggccagccggaaggaacagccacgcaccgatcgacgacggcgcccagctagctagctctcgctccatcgctctcattagccagcgaccacatacatatggccaccgtggacgccacgacgccgacggagtccggcggcaagcagcaggcgccgtcccttccggcgtgcagaagcttctccggcgccaacccggcccttcgggtgctcctgttcgcggtgacgctcgcggggctggtcctgctggccaccgccaagcagacggtgcgcgtgccaatcccgcagttcccggggctcctcctctcccgacccgccaagttcacggactcgccggcgctcatatatctgctggtggctctcgtcgtgacgtgcttctacagcttgctgacggccctcgcctcgcttaagctcgtctccggctcgtttcccgccaccaggactctcttcctgcttgttctgctcgatgtgttatacgcagctatcatggcttcggcgaccggttcaggaggtggtgtagcgtggatcggcctcaagggcaactcgcacaccaactggaacaagatctgcaacatctacggcaagttctgtcgtcacatcggcagctccgttttcctaggcctcgtcgcctccatcatcctcgtcctgcttgccatcctcaacgcccactccttgtaccgccgcagtcgctagctacctcagtacatctgccgttgttgcatgtcatattttatatatatatatatatatatatatatatatatatatacggcgctgc

SEQ ID NO: 143028 - DNA, 556 bp, Zea Mays
acagccgtgccgcaacacacagcagcaggccagccggaaggaacagccacgcaccgatcgacgacggcgcccagctagctagctctcgctccatcgctctcattagccagcgaccacatacatatggccaccgtggacgccacgacgccgacggagtccggcggcaagcagcaggcgccgtcccttccggcgtgcagaagcttctccggcgccaacccggcccttcgggtgctcctgttcgcggtgacgctcgcggggctggtcctgctggccaccgccaagcagacggtgcgcgtgccaatcccgcagttcccggggctcctcctctcccgacccgccaagttcacggactcgccggcgctcatatatctgctggtggctctcgtcgtgacgtgcttctacagcttgctgacggccctcgcctcgcttaagctcgtctccggctcgtttcccgccaccaggactctcttcctgcttgttctgctcgatgtggtgagcgccttctttgttatattcaaattaattgataaacttgaagaatatattccattcacac

SEQ ID NO: 143029 - DNA, 1499 bp, Zea Mays
gtccgctccaaactcccattcactcctcgcgcctcgagatcccatccaaatcccgatcagtcgccgcccaagcctagcagatccgccggcgagcgcgcgggggcaatgggtgtcgtctcggcagcggcggacgcgattgtcgcggttttctccctcaccatcgtcgtcgcggcgccgctactcgacgcgcagtccgtcctcccgcataccctctacccggcgccgctcctggaactcaagcgctggtacgccgccgagtttggcgactacctcgtggcccagtcccccggcttcttccgtggccttgtttgcctcgagctcgccttccaatggccgctcgccgtcgccacactctacggcatcctcacccgccgccgctgggctgccaccacctccctcatggccggcgttggcaccctcacctccatggtaaagccgtgtttcccttctcccttgtagtggagtcacgattgtaatgcattatgcatgcatgtctggaatttcgtgagaccagtgtctcaccgctgcagctctgcccctgtgccccagatccaaaacactaccatggtggatgcacaattgtacacttaaaagtcagttcagttgatgtggaatccaaacatagtttctcatgtgcttattttgttatgattggctgattgttcaaatgaaatcgtgctggaaaaggttttgtagacccatgggattcagagttacttccatattgtcttggcataccaattgcatttcctgttggtgatgattcccagaatgtcaagctattgccaacatttttagttttgttctctgaaccatggttccttttgacctcaaatgtgctatggataggtgacgttgttcaggttaaatctcaaccgcactgtctcgtattaaatgataggagggaaaaaaatttcttgtcacaatatcagatatcaaatcatcgcaaaaattgagtactgactacctgttatgctagattctgcaattcttggtgagatgttaggttcaggcaaatcaacaccaaagttgcttcagatgtatgttccttatgctgtttttgctgtcattgctattctacgtggactttgctcatgctctggacgcactactgctggttcatcacttgggccttctgcccggaagaagagggtctagatcagcagtgacacttggagaattttcggtttgagacagtggcgccagagcactaatgctggtcagaagacgattatctggatcaggtttctatccctggtatttagcacggatgttgaaaaatccagatagtgttagtggctgtttctctaggatttggtgttcgttttccctgaaatgtgatattcatcttgcctttatttccattttaccctttgattatatgtcttgctaactaagacattgttttgtttactggatgagctgattcaactctggcattgttctggcgaataagtttcataaatccttgtcttggtaaaatataaaataaaaatcaa

SEQ ID NO: 143030 - DNA, 956 bp, Zea Mays
gtccgctccaaactcccattcactcctcgcgcctcgagatcccatccaaatcccgatcagtcgccgcccaagcctagcagatccgccggcgagcgcgcgggggcaatgggtgtcgtctcggcagcggcggacgcgattgtcgcggttttctccctcaccatcgtcgtcgcggcgccgctactcgacgcgcagtccgtcctcccgcataccctctacccggcgccgctcctggaactcaagcgctggtacgccgccgagtttggcgactacctcgtggcccagtcccccggcttcttccgtggccttgtttgcctcgagctcgccttccaatggccgctcgccgtcgccacactctacggcatcctcacccgccgccgctgggctgccaccacctccctcatggccggcgttggcaccctcacctccatgtctgcaattcttggtgagatgttaggttcaggcaaatcaacaccaaagttgcttcagatgtatgttccttatgctgtttttgctgtcattgctattctacgtggactttgctcatgctctggacgcactactgctggttcatcacttgggccttctgcccggaagaagagggtctagatcagtgacacttggagaattttcggtttgagacagtggcgccagagcactaatgctggtcagaagacgattatctggatcaggtttctatccctggtatttagcacggatgttgaaaaatccagatagtgttagtggctgtttctctaggatttggtgttcgttttccctgaaatgtgatattcatcttgcctttatttccattttaccctttgattatatgtcttgctaactaagacattgttttgtttactggatgagctgattcaactctggcattgttctggcgaataagtttcataaatccttgtcttggtagtcccaattgcagaaaattctaggttttttgg

SEQ ID NO: 143031 - DNA, 972 bp, Zea Mays
aagaaaaaaagaaaaagcagaaaaagtttcacttgttgctgtccgctccaaactcccattcactcctcgcgcctcgagatcccatccaaatcccgatcagtcgccgcccaagcctagcagatccgccggcgagcgcgcgggggcaatgggtgtcgtctcggcagcggcggacgcgattgtcgcggttttctccctcaccatcgtcgtcgcggcgccgctactcgacgcgcagtccgtcctcccgcataccctctacccggcgccgctcctggaactcaagcgctggtacgccgccgagtttggcgactacctcgtggcccagtcccccggcttcttccgtggccttgtttgcctcgagctcgccttccaatggccgctcgccgtcgccacactctacggcatcctcacccgccgccgctgggctgccaccacctccctcatggccggcgttggcaccctcacctccatgtctgcaattcttggtgagatgttaggttcaggcaaatcaacaccaaagttgcttcagatgtatgttccttatgctgtttttgctgtcattgctattctacgtggactttgctcatgctctggacgcactactgctggttcatcacttgggccttctgcccggaagaagagggtctagatcagcagtgacacttggagaattttcggtttgagacagtggcgccagagcactaatgctggtcagaagacgattatctggatcaggtttctatccctggtatttagcacggatgttgaaaaatccagatagtgttagtggctgtttctctaggatttggtgttcgttttccctgaaatgtgatattcatcttgcctttatttccattttaccctttgattatatgtcttgctaactaagacattgttttgtttactggatgagctgattcaactctggcattgttctggcgaataagtttcataaatccttgtcttggtagtccc

SEQ ID NO: 143032 - DNA, 769 bp, Zea Mays
gtccgctccaaactcccattcactcctcgcgcctcgagatcccatccaaatcccgatcagtcgccgcccaagcctagcagatccgccggcgagcgcgcgggggcaatgggtgtcgtctcggcagcggcggacgcgattgtcgcggttttctccctcaccatcgtcgtcgcggcgccgctactcgacgcgcagtccgtcctcccgcataccctctacccggcgccgctcctggaactcaagcgctggtacgccgccgagtttggcgactacctcgtggcccagtcccccggcttcttccgtggccttgtttgcctcgagctcgccttccaatggccgctcgccgtcgccacactctacggcatcctcacccgccgccgctgggctgccaccacctccctcatggccggcgttggcaccctcacctccatgtctgcaattcttgagggtctagatcagtgacacttggagaattttcggtttgagacagtggcgccagagcactaatgctggtcagaagacgattatctggatcaggtttctatccctggtatttagcacggatgttgaaaaatccagatagtgttagtggctgtttctctaggatttggtgttcgttttccctgaaatgtgatattcatcttgcctttatttccattttaccctttgattatatgtcttgctaactaagacattgttttgtttactggatgagctgattcaactctggcattgttctggcgaataagtttcataaatccttgtcttggta

SEQ ID NO: 143033 - DNA, 4247 bp, Zea Mays
atcaacggggagactgactggtatagtgtccttcaagtagaaacaactgcagatgacatattactcaaaaaacagtaccgcaaacttgctctcttactccatccagataagaacaagtttgtgggtgctgaagctgcctttaagctaattggagaagctcacatgatactgacagacaaagtaaaacgttcacgtcatgactcaaaaaggaacccagttattccaaaatctgcaccaaagaagcgtggacgaccatcaaaggaaactgattatgttgctaagagggccaataaggaaaatactgatgctgtatattcaactttctggaccatttgcaccacttgtggaaccaaataccagtacccatatagtttgttgatgaaagttctcttgtgccaggtctgctcaaagagtttctttgcttatgatttgtctaagaaaccgtttgtcagagtggatgcatcaaatccatggagtggaattgggatgcgacacaaaatgtttcccaaccaacaacacaattaccagagtgttcctactcagcaaaatcctgtcactggtcgtcaaactcctgtccccgaccagaaacagcaacctcggaatgtctctggtaagcaaactccaggcattaaccagcaacaacgatcacagaaattccctttcagttcaaggccaaagaatgtggtaaattctcatccatggggtggatttggtaggcaacaggaaatgtgtcctctgagtcaacccacacatgtatctgaccaaaaaccctactatcaaagggcccctggccagcaaaaccctgtcaatggtcatcaaactcttgtcactgaccatcaacagcattctctgaatacccagcaacaatctacaaaccccccttgcaatccaggatcaaagaatgtagtgaattctcaaggggcagccttccagaatagtaatgcaactgcaaacagtaaccttacggatgaagctggggcttgtaatagagaaaagattacaaggccatcattcaatgatgaagatagaactaaatcacaggttgcaaattctgataaagttcatctagtaaacaagcaaatgaagggaaacaaggtagctacaggatccagtcatcctgttgccataaatggtagccaagttgctaggaaagatgttcttactgccgcatgtgcagataaaacatctgggcagcatccttgtatagcaagccagcagagaaatagtgtcattgttgaagatgggtctgatggttgtggaaaggttagtgatcatcttcctaactcttcgacaaagaaaaggataagaaaagaccattcttcctatactgctggcaaaagtgatcatacaacagaaaatgaagttgctgaagcaaacagccaacacaaatatagtattccaagcaaagagaagataacaaatgaaaaagaagtgatcagtggattaaatcttgatgtgttgcaaggaacaaaaagaaaacaacaaacaagttctggaagtggaagtgatgctgctgctaaatctgtaaaccatagtattccctgcaatgttacagtttcatgtccagatccagacttctacgactttgagaaaaatagggatgcagatcgattcacagttgatcagatatgggcagtttatgatgatcttgaaggcatgccaagatactatgctcgaattaagcaggtctactctccaaacttcatgttgcagttcacatggctagagtatgatcctttgtgtgatgctgagaaggaatggtcttctaaggagctgcctgttgcttgtggaaatttcagagttggaagaacactcttgactgaagacactaagatgttttctcatgttgtctcttggacaaaaggaaggaagaggaacagatatgagatttatcctaagaaaggcgaagtctgggcacttttcaggggatgggacatcaactgggtttcagattccgacgatcataggcaccatgattatgatattgttgaaatcacctcagactttgctatgggtttaggcacttatgtgattcccttggtaaagatcaaaggttttgtcagcttatttgttcgatcaagcagtgaagcaccatttctgatacctagtggcaacacccttagtttctcgcacagcatccctttccacaggttggtggaaaatggcaggcaacatatcccaaccggtgctcttgagctggacactgcatcactaccttctgatttggagaaagcgtttactcctgtgaacctcgacaacagttttatgagcaccggaagtggtagcactccatgcaatgtttcatctactagctcctgcgaagtgccggttggaaagaccgaacagactcaggatggtactggtacaggtgtgaaggatggagtcgagaagctgaatcagaatacaaaggtcgaacaagacaacggctcagaagcttcaacgattgatgactgtggcgatgggtggaacgacagctctccgccaggatctccagctgggtttcattaccctgacacggagttttgcagcttcactagcctgagatcattcgacaagttcaagaaagggcaagtttgggcactgtactgcgacaccgacaagttcccaaagtactacggtttggtaaagagcgtcgattcagaagactgcacagtccacataaggtggctggagcactgtccgcgcgaacaagtggaggagcacctggcacaagacggcctgtccattggctgtgggttattcgaagtcagcaggcagagtgagacctacgactgcacagaagtcttctctcacagtgtggaggtgacgggtaaagggaaaagatatgagatccttccgtgtgctggccaggtgtgggctgtatacaaggactggagccgcacatggagcttcgaagattacagtagatgcgagtatcttctggtcgaggtcatggaggtttctgatggtgatataacagtgtcgtgccttactaaagcggagggctttagcactgtgttcatgcaagagcagaacggtaaatccaggagaatagcaaggagtgacttgactatgttctctcatcaggttcctgcctaccgcttgacagacgaaactggcgatctttgtggttactgggagcttgatcctgcgtctttaccggaagttttgctggtcaggaagaccaagtgaaacattgttgagctgatagagaggggttttggcactgtgaaaagtgaaggtatggttttgaacagagcagtttagcatgattgaacatgtggcattttttttccagctattgttaactactcatttgttttctccgcagttatgcgctggtgacaaggctgtggtactggattgttgtttatttttggctagttgtaccttgtttcgtgtaaacaggctagtccattagtttgctacctgatgccactatggcaagccttttgctggctcggtctcgctttaggctacgtttcatcatctcacctgtttgtctttgctacgtccattgtggacatttttggtgggtataccagttggtcgcggctgtcgttcgcagcttactagtgtttgcacatggcacgccacctcttcccaccatctcgcttaaaagccgagacagtaattaagcagtcaatcgaccccaacatcacacatcctaatggcggtggcggtggacgcggtggcggctctcttctcgctggtcatggccgtcggggcgccgctgttcgactcgcaggtcgtgctcccgctcagcctctacccggcgccgctggtggacgtgtaccggtggttcgtcgccgagttcgacaactacatcgtggccgaccggccgccgttcttccgcggcctcgtctggctcgacctcgccttcctctggccggtcagcctcgccaacctctacggcatcctcgcgcgccgacgctggtccgccaccacctccctcatggccggtgtccacatgctcacctacctgtccgcaatgtttggggagatgctgggttcagggagagcaacgccgaagctgctcgggttgtacgttctgttccttgtctttgctgtagcttcagttgcgcgtggcctctgctcccgctcagcacaggctacaccggcggcaggtccatcgcctgtacttgctgctccgaagaagagggtttagatacctgatcagggcatgtttgagagtcttgcattgggtccaaaacctctgaaaattacacaatgttcaaaagtttccacgacatggactggattttgct

SEQ ID NO: 143034 - DNA, 3432 bp, Zea Mays
ataagaacaagtttgtgggtgctgaagctgcctttaagctaattggagaagctcacatgatactgacagacaaagtaaaacgttcacgtcatgactcaaaaaggaacccagttattccaaaatctgcaccaaagaagcgtggacgaccatcaaaggaaactgattatgttgctaagagggccaataaggaaaatactgatgctgtatattcaactttctggaccatttgcaccacttgtggaaccaaataccagtacccatatagtttgttgatgaaagttctcttgtgccaggtctgctcaaagagtttctttgcttatgatttgtctaagaaaccgtttgtcagagtggatgcatcaaatccatggagtggaattgggatgcgacacaaaatgtttcccaaccaacaacacaattaccagagtgttcctactcagcaaaatcctgtcactggtcgtcaaactcctgtccccgaccagaaacagcaacctcggaatgtctctggtaagcaaactccaggcattaaccagcaacaacgatcacagaaattccctttcagttcaaggccaaagaatgtggtaaattctcatccatggggtggatttggtaggcaacaggaaatgtgtcctctgagtcaacccacacatgtatctgaccaaaaaccctactatcaaagggcccctggccagcaaaaccctgtcaatggtcatcaaactcttgtcactgaccatcaacagcattctctgaatacccagcaacaatctacaaaccccccttgcaatccaggatcaaagaatgtagtgaattctcaaggggcagccttccagaatagtaatgcaactgcaaacagtaaccttacggatgaagctggggcttgtaatagagaaaagattacaaggccatcattcaatgatgaagatagaactaaatcacaggttgcaaattctgataaagttcatctagtaaacaagcaaatgaagggaaacaaggtagctacaggatccagtcatcctgttgccataaatggtagccaagttgctaggaaagatgttcttactgccgcatgtgcagataaaacatctgggcagcatccttgtatagcaagccagcagagaaatagtgtcattgttgaagatgggtctgatggttgtggaaaggttagtgatcatcttcctaactcttcgacaaagaaaaggataagaaaagaccattcttcctatactgctggcaaaagtgatcatacaacagaaaatgaagttgctgaagcaaacagccaacacaaatatagtattccaagcaaagagaagataacaaatgaaaaagaagtgatcagtggattaaatcttgatgtgttgcaaggaacaaaaagaaaacaacaaacaagttctggaagtggaagtgatgctgctgctaaatctgtaaaccatagtattccctgcaatgttacagtttcatgtccagatccagacttctacgactttgagaaaaatagggatgcagatcgattcacagttgatcagatatgggcagtttatgatgatcttgaaggcatgccaagatactatgctcgaattaagcaggtctactctccaaacttcatgttgcagttcacatggctagagtatgatcctttgtgtgatgctgagaaggaatggtcttctaaggagctgcctgttgcttgtggaaatttcagagttggaagaacactcttgactgaagacactaagatgttttctcatgttgtctcttggacaaaaggaaggaagaggaacagatatgagatttatcctaagaaaggcgaagtctgggcacttttcaggggatgggacatcaactgggtttcagattccgacgatcataggcaccatgattatgatattgttgaaatcacctcagactttgctatgggtttaggcacttatgtgattcccttggtaaagatcaaaggttttgtcagcttatttgttcgatcaagcagtgaagcaccatttctgatacctagtggcaacacccttagtttctcgcacagcatccctttccacaggttggtggaaaatggcaggcaacatatcccaaccggtgctcttgagctggacactgcatcactaccttctgatttggagaaagcgtttactcctgtgaacctcgacaacagttttatgagcaccggaagtggtagcactccatgcaatgtttcatctactagctcctgcgaagtgccggttggaaagaccgaacagactcaggatggtactggtacaggtgtgaaggatggagtcgagaagctgaatcagaatacaaaggtcgaacaagacaacggctcagaagcttcaacgattgatgactgtggcgatgggtggaacgacagctctccgccaggatctccagctgggtttcattaccctgacacggagttttgcagcttcactagcctgagatcattcgacaagttcaagaaagggcaagtttgggcactgtactgcgacaccgacaagttcccaaagtactacggtttggtaaagagcgtcgattcagaagactgcacagtccacataaggtggctggagcactgtccgcgcgaacaagtggaggagcacctggcacaagacggcctgtccattggctgtgggttattcgaagtcagcaggcagagtgagacctacgactgcacagaagtcttctctcacagtgtggaggtgacgggtaaagggaaaagatatgagatccttccgtgtgctggccaggtgtgggctgtatacaaggactggagccgcacatggagcttcgaagattacagtagatgcgagtatcttctggtcgaggtcatggaggtttctgatggtgatataacagtgtcgtgccttactaaagcggagggctttagcactgtgttcatgcaagagcagaacggtaaatccaggagaatagcaaggagtgacttgactatgttctctcatcaggttcctgcctaccgcttgacagacgaaactggcgatctttgtggttactgggagcttgatcctgcgtctttaccggaagttttgctggtcaggaagaccaagtgaaacattgttgagctgatagagaggggttttggcactgtgaaaagtgaagttatgcgctggtgacaaggctgtggtactggattgttgtttatttttggctagttgtaccttgtttcgtgtaaacaggctagtccattagtttgctacctgatgccactatggcaagccttttgctggctcggtctcgctttaggctacgtttcatcatctcacctgtttgtctttgctacgtccattgtggacatttttggtgggtataccagttggtcgcggctgtcttttaaaattaattatacaaacggtatccagacgaatctattagttctaattagtttaggattagttctccatcctaaaattcaggtaa

SEQ ID NO: 143035 - DNA, 1785 bp, Zea Mays
gcctgccgtcactcacctcggctcagctccaccaagtgcccgtgaggtgccacgaccgcagcgaggagtgaccatggttgaggtgatgatggtacccagctcccacggctgcggcgagggtggtggtgtaggaagcgacgggaaggcggaggacgggcagcagcaggggcagggacaggggcaggtgctggcgctgctgctggccgcgctccgcaagtcggtggtgctaccgtgccagatggcggacgccgacgacccatcgggggcggcgtgggggatggagatcggctggcccacagacgtccgccacgtcgcgcacgtcaccttcgaccgcctccacggcttcctcggcctccccgtcgagttcgagctcgagatccccggccaggtccccagcgccagcgccagcgtgttcggggtatcaccggagtcgatgcagtgtggctacgatgacaaggggaactcggtgcccaagatccttctgctcatgcaagagaggctgtacgcgcaggatggactcaaggcagaggggatcttccggatcaccccggaaaacagccaggaggagcatgtcagggagcagctcaacagcggcatcgtgcctgacgacatcgatgtgcactgccttgctagtttgatcaaggcctggttcagagaactccctgaaggcgtgcttgacaggctttcacctgagcaagtccttcactgcaacacagaggagcaatgcattgagctcgtgaagcttcttccagcaacccaggctgcacttcttcattgggtcgttgagctcatggctgatgttgttgaggaagaggagtcgaataagatgaatgcaagaaatgttgccatggtttttgcaccaaatatgacacagatgtccgatcctctgacagcactgatgcatgctgttcaagtgatgaacttgctcaaaaccttaattctcaaaacacttcgggaacgcgaggatgatgatgcaggggcctattcttcattctcatcttcgttatcttcatctggtgaacttgacgaggatgatggccatgaccaacaggatgatgaaaatgatagtggcagtgagaaaaactataatggcagtgctaacggaagaccaagagatattgacaaggccactgcactaagagtagacagtgagcagctaattggtgtgtccaggaggcacacatcaaccgatttccatctgccttacattagatacagtaacgacagtgaagacgtatcactggatgatattgaggaatgtttcttaagaaggctagaatggaaatcagtgagggaaagtgttgatgaaggcgacagtagaaactctcctccctcagagaaagaggcagagtggcttagctcctctgagaacgtaacggaagctagcaacgcaattggtgaagaaagaggcagaacaagcaatgccactgatgtaagtttcaatgagctgaggcaaacggaaaccagaattgaaatgacgagtgctgcaaaaggggagcttattctttgctcataagcaatcctggcaagggtgcaggtttcagtctggtcatcatccttgtaagggtatgtgaagttgtaagcctatcgttcttggcagtccttgtaaaattctttgcacgctctactgcatgagctgcgaagttgattaattgtcttgtttagttgaagcagaaacaaccagtttctggctagttggacctcggtaatcagctggactcttgcaaccggaagcatgtcaaactatatttgctcgtacattatagaaaaaaggaagcaaaaaaa

SEQ ID NO: 143036 - DNA, 1758 bp, Zea Mays
ctaccggacagtgaggcgccgcttgccctccacatacggccgcggcgaggaacccaaaaggccaaaaccctcccaaaagctactacacagtacacacacggaacggaatccgggcatccgggaaagcagccctaatctcaaggccgcggctgcgagcgctgcttcccacctcccaactccagaagtcctccctagacgccgccagccgcgcgcacacccaccgagagctcctcgggctttctttctccgttcctccctcgcgcgctcagggtttcacgatggaggccgaggcggcggccaagagggcgcgggagggcggggaggacgccaccgcgccggtggcgggggccgaggcggtggtcgccggtgctggcgagcaggcgggaatctccgccgtcatcccaggatggttctccgagatcagccccatgtggcccggtgaggcgcactccttgaaggtggagaaggttctgttccagggcaagtcagactaccaaaatgtgatggtttttcagtcctccacgtacgggaaggtgcttgtcctcgacggagttattcaggtgacagagagggatgagtgcgcgtaccaagagatgattactcacctgcccctttgctccatcaaagaccccaagaaggtgttggttattggagggggggatggtggtgttttgcgtgaggtttcacggcatatctctgtggagcagattgacatctgtgaaattgataagatggtggtagatgtctccaagcaatttttccctcatctagctgttggatttgaagaccctcgtgtgtcattacacattggagatggggttgccttcttgaaaaatgctccagagggtacatatgatgcagtaattgtggattcttctgatccgataggtcctgctcaggagctttttgagaagcctttcttccagtcggtggccagagctttgcgtccaggtggagttgtatgcacccaggcagagagcatatggctacatatgcacatcattgaagatattttcgtcaattgccgccaagttttcaaaggctcagttaactatgcttggacaacagtacctacataccctagcggagttattgggttcatgctttgctccaccgaagggcctgctgttgatttccagcaccctgttttcaacatcgaggaggatgaacattctacgaaatcaaaaggaccccttaagttctacaactcggagatccacacggcatcattctgtttgccctcttttgcaaagagggtaattgagtcaaaggcaagctagacgtgaggatacttcaccaagtccagtcgattgggttaagtaccttaggcgcaacacaaaatttgttgtcgtgtgaaaatgggatgcctccctcccccaccccccacttgatgaataagcacatgagatgagatgcaacggttatcggagttgtcagtctatacgattctgtctgttgtatgtgccggctgccaggtgcagctatgaaaacgttttgcaatagctgttttcggcagtgctctgatcaggttgagttttggacatcatttattatgttcctgcatccatacctgatactccctccgttcttttttatttggcgcggtttagttcaaaaatgaactagtggtgataaatattcgagagaacggaggtagtaccacagatggaatatataagaaataaaactgtgtaatggttgttgccatcctatctttttgaaactggttcagctccaaaaaacataaatagataaaac

SEQ ID NO: 143037 - DNA, 1563 bp, Zea Mays
atccgggaaagcagccctaatctcaaggccgcggctgcgagcgctgcttcccacctcccaactccagaagtcctccctagacgccgccagccgcgcgcacacccaccgagagctcctcgggctttctttctccgttcctccctcgcgcgctcagggtttcacgatggaggccgaggcggcggccaagagggcgcgggagggcggggaggacgccaccgcgccggtggcgggggccgaggcggtggtcgccggtgctggcgagcaggcgggaatctccgccgtcatcccaggatggttctccgagatcagccccatgtggcccggtgcgtcccctgttttccgtcctctgctgcgctgcgctgcgcatcgtcatgctccccctgttctgttgagcgcactttttacttcggatattcttctttagtcactgcggggtcagggtcacgccaaccacgtgtgtttgcccttgctcatgggtcggtttcggtgtcgaaatggtaggtgaggcgcactccttgaaggtggagaaggttctgttccagggcaagtcagactaccaaaatgtgatggtttttcagtcctccacgtacgggaaggtgcttgtcctcgacggagttattcaggtgacagagagggatgagtgcgcgtaccaagagatgattactcacctgcccctttgctccatcaaagaccccaagaaggtatgttattggagggggggatggtggtgttttgcgtgaggtttcacggcatatctctgtggagcagattgacatctgtgaaattgataagatggtggtagatgtctccaagcaatttttccctcatctagctgttggatttgaagaccctcgtgtgtcattacacattggagatggggttgccttcttgaaaaatgctccagagggtacatatgatgcagtaattgtggattcttctgatccgataggtcctgctcaggagctttttgagaagcctttcttccagtcggtggccagagctttgcgtccaggtggagttgtatgcacccaggcagagagcatatggctacatatgcacatcattgaagatattttcgtcaattgccgccaagttttcaaaggctcagttaactatgcttggacaacagtacctacataccctagcggagttattgggttcatgctttgctccaccgaagggcctgctgttgatttccagcaccctgttttcaacatcgaggaggatgaacattctacgaaatcaaaaggaccccttaagttctacaactcggagatccacacggcatcattctgtttgccctcttttgcaaagagggtaattgagtcaaaggcaagctagacgtgaggatacttcaccaagtccagtcgattgggttaagtaccttaggcgcaacacaaaatttgttgtcgtgtgaaaatgggatgcctccctcccccaccccccacttgatgaataagcacatgagatgagatgcaacggttatcggagttgtcagtctatacgattctgtctgttgtatgtgccggctgccaggtgcagctatgaaaacgttttgcaata

SEQ ID NO: 143038 - DNA, 2394 bp, Zea Mays
gtggcgcccgtgcgctagccactaggcggggcgcacgccgcctgtcacgtgggcgatatttttcctggccctcggcggtcggcgcgctgcgtcgccgcttgcttcctcctctacttgagtgccgagtcgcctccgcgctctgcagtcccccgacccggagccaaagccaacaaacagccgctccgccttcttccgcggctgcagccagcgcgaggtcatcattgaatggctgcaacgatgggttcaatatctgccaatggttcttaccaaacaaataggcccagtgcactaaagcaggcacctcacatgcaattccaacaatgttgcaacggtggacttaggttcttaagcaagcattcccaatccacgcgaagtaagatacaggtggctaaaagaagagctacagataatggaattcatccaaagactacgggacatcgggcacctattgtatgttctgctgggatgactattgtatttgttgcaactgaagtgcacccatggtgcaaaactggtggcctcggtgatgttgtaggaggactgcccccagctttggctgctatgggacaccgtgtcatgacaatagctcctcgttatgatcaatacaaggatgcatgggatacaagtgtccttgttgaggtaaatattggtgacacggtagaaactgttcgcttcttccactgctacaaaagaggagttgatcgtgtttttgttgatcatcctatgtttcttgaaaaggtatggggcaagactggagcaaaattgtatggtcctactactggaactgactatcgagataaccagttgaggttctgccttttgtgccttgctgctttggaggctccaagagttctcaatttcaacaattctgaatatttctctggaccatatggggaagatgttgtcttcgtagccaatgattggcacactgctattttgccatgttatttgaagagcatgtataagccaaatggaatttataaaaatgctaaggttgctttctgcatacataatattgcctatcaaggtagatttgcccgagcagacttcgatcttcttaatctacctgacagtttcttgccatcatttgattttattgatggacatgttaagcctgttctagggagaaagcttaactggatgaaggcagggatcattgagagtgatctggttctaacagtcagtccacattatgtcaaggaactcacatctggcccagataagggtgttgagttggatggtgtccttcgcacaaagcctctagaaattggaatcgttaatggcatggatgtttatgaatgggatccttcaacagataagtacatcagcgtgaaatatgatgcaacaacggtaactgaagcaagggctctcaataaagagagtttgcaagcagaagtcggattgcctgtggactcgagcatccctgttatagttttcgtcgggcgtctcgaagaacagaaagggtccgacatactcattgcagccattccagagttcgtgggcgagaatgtccagataatcgttcttggcacgggaaagaagaagatggaggaggaactaacgcagctggaagtgaaatatccaaacaacgctagaggcatagcgaaattcaatgttccattggcacacatgatgtttgccggggctgacttcattatcgtcccaagcaggtttgagccatgtggtctcattcagctgcaagggatgagatatggagtgattcctatctgttcatccactggaggacttgtcgacacggttgaggagggcgtcaccggattccacatgggttctttcaatgtcgagtgtgaaactgtagacccagccgacgtgacagcagtggcgtcaaccgtcacgcgagccctgaagcagtacgacaccccggcattccatgagatggttcagaactgcatggcgaaagacctgtcctggaaggggcctgcgaagaagtgggaggaggtgcttctgggccttggagtcgaggggagtcgagctggcatcgacgacgcagaggagatcgccccacttgccaaggaaaacgtagccactccgtgagggcttggtggtgcctcgactcggaaacacgcgttggtgataggaagcgtcttctaggatcctcctgggcggccttgtggctggtggagtgaggtgtccagtcagacacggtttcgcctctactactagtctactactactacctcattgtaatataatccttggcattctaaaaaatgccatgcctgctctaattcttctgttcttgcgcaacatacacttcccgcttccgttcggtcgacaacggttatgtaaatatagcgaatgctagcgggcagctcgaatcatcccaagtggtagggtcacgatggagttgtttgaaatggctcgttcttgtgc

SEQ ID NO: 143039 - DNA, 2788 bp, Zea Mays
ctgcctgccgctaaccgacgccggcgcacatcgccttttcccgcctccggaaccaacggctcacgctccccaccacttcccccgcgcccctgccgcgcacggggaagaccacgaattctaggcccttttccgctgctgggcccagggacgaaccgacggccctcgtgccgcctgcccgccccgaggcccccacttgcccttgcctcacatctcaccttttgcctcggcatattcgcctccgatcgaacgcagtcgcgggccggtgcgggtacgctgctggtgaggcgcccgcggcccaccaccccatgtcaccatgtgcggtggccgccgtgctggtgatgcgggcagcggccggtgcagcgattgtgtggcgcccgtgcgctagccactaggcggggcgcacgccgcctgtcacgtgggcgatatttttcctggccctcggcggtcggcgcgctgcgtcgccgcttgcttcctcctctacttgagtgccgagtcgcctccgcgctctgcagtcccccgacccggagccaaagccaacaaacagccgctccgccttcttccgcggctgcagccagcgcgaggtacctggctggcattttgcatttgaggtcatcattgaatggctgcaacgatgggttcaatatctgccaatggttcttaccaaacaaataggcccagtgcactaaagcaggcacctcacatgcaattccaacaatgttgcaacggtggacttaggttcttaagcaagcattcccaatccacgcgaagtaagatacaggtggctaaaagaagagctacagataatggaattcatccaaagactacgggacatcgggcacctattgtatgttctgctgggatgactattgtatttgttgcaactgaagtgcacccatggtgcaaaactggtggcctcggtgatgttgtaggaggactgcccccagctttggctgctatgggacaccgtgtcatgacaatagctcctcgttatgatcaatacaaggatgcatgggatacaagtgtccttgttgaggtaaatattggtgacacggtagaaactgttcgcttcttccactgctacaaaagaggagttgatcgtgtttttgttgatcatcctatgtttcttgaaaaggtatggggcaagactggagcaaaattgtatggtcctactactggaactgactatcgagataaccagttgaggttctgccttttgtgccttgctgctttggaggctccaagagttctcaatttcaacaattctgaatatttctctggaccatatggggaagatgttgtcttcgtagccaatgattggcacactgctattttgccatgttatttgaagagcatgtataagccaaatggaatttataaaaatgctaaggttgctttctgcatacataatattgcctatcaaggtagatttgcccgagcagacttcgatcttcttaatctacctgacagtttcttgccatcatttgattttattgatggacatgttaagcctgttctagggagaaagcttaactggatgaaggcagggatcattgagagtgatctggttctaacagtcagtccacattatgtcaaggaactcacatctggcccagataagggtgttgagttggatggtgtccttcgcacaaagcctctagaaattggaatcgttaatggcatggatgtttatgaatgggatccttcaacagataagtacatcagcgtgaaatatgatgcaacaacggtaactgaagcaagggctctcaataaagagagtttgcaagcagaagtcggattgcctgtggactcgagcatccctgttatagttttcgtcgggcgtctcgaagaacagaaagggtccgacatactcattgcagccattccagagttcgtgggcgagaatgtccagataatcgttcttggcacgggaaagaagaagatggaggaggaactaacgcagctggaagtgaaatatccaaacaacgctagaggcatagcgaaattcaatgttccattggcacacatgatgtttgccggggctgacttcattatcgtcccaagcaggtttgagccatgtggtctcattcagctgcaagggatgagatatggagtgattcctatctgttcatccactggaggacttgtcgacacggttgaggagggcgtcaccggattccacatgggttctttcaatgtcgagtgtgaaactgtagacccagccgacgtgacagcagtggcgtcaaccgtcacgcgagccctgaagcagtacgacaccccggcattccatgagatggttcagaactgcatggcgaaagacctgtcctggaaggggcctgcgaagaagtgggaggaggtgcttctgggccttggagtcgaggggagtcgagctggcatcgacgacgcagaggagatcgccccacttgccaaggaaaacgtagccactccgtgagggcttggtggtgcctcgactcggaaacacgcgttggtgataggaagcgtcttctaggatcctcctgggcggccttgtggctggtggagtgaggtgtccagtcagacacggtttcgcctctactactagtctactactactacctcattgtaatataatccttggcattctaaaaaatgccatgcctgctctaattcttctgttcttgcgcaacatacacttcccgcttccgttcggtcgacaacggttatgtaaatatagcgaatgctagcgggcagctcgaatcatcccaagtggtagggtcacgatggagttgtttgaaatggctcgttcttgtgc

SEQ ID NO: 143040 - DNA, 1478 bp, Zea Mays
atgctccctgctcgctcctagtccctcccgggctcccggcagcggcggcgcaccttatggcgacttgagctctctgggcgacgtcctcgggacgggcagactgtaattgaaatgaaaaggataggtagatctagctaattcgacaacagagcaaggtgcgctcctatggaagtggaagaagcaggaggcgaagtggagaacgccggcaaggacgaggcggaggcggagtaccattcgcgcgatttcgaatgggaggacctcaaggaagaggtggaatctggacctgtcttctcctaccacctctccccctttctcgaccccgccgccagtaccacctcgccgccgcagccctcgtcggaggcctggagaagcttccaccgtcgccatgcgtccggaaaattctttaaggaaaggagatatttgcttaaggaatttcctgaactttgtagcagcaaagatcatgccaaggttttagaagtggggtgtgggaatggaagcactgctgtttccattctacggtctagtgaaaggatcactgtctttgcttgtgactgtagtaaagacactcttgagaaggcatatgaaattatatccaatacaaaagggattaatatcaaggataggttccacccctttttaatggatgtttctaaagaaactttcccagattggttattttgcaaagcctgtcaaacttcgctgggaaaagctgctgcatctttacttgatccaagtcaccatggaattagagaagagcacccagtcttccttggagagaaccaatgttgtgctggtggcatggattttattaccatgatattcacactgtcagccatacccttcgacataatgccaactaccatagaacaatgtgtttctgttctgaaaccaggcggccttcttctttttagggattacggtctttatgacatgacaatgcttcggtttttacctcatcaaagagtagggtttcgggaatatatgcgatcagatggtaccttttcatacttcttctcattggatactgtgagagaactctttcgtgctgctgggctagtagagttggagctggaatattgctgtgtcaagtccgtgaaccgaaagaatgggaagacgatgcggcgggtatgggtccatggcaaattcaaaaaaccacctaggtgacatcagttagggcttgttcgtgttcagctcaatccatatgaattggatagaattgtgtggatttaaatccatagcaagtcaaaatctctactaattttttccaatctcatcccaatccatatggtgtagaaataaccaaagggcttagctgttagttttgctcggccactttgttgttgcaacaaagcgttgtaacagttttgtagccacaaacttaaatggcattgaaattatgccctcccccacccccaatagccattctccaaccattttccttatatttcaccctttatcagtactttcgattatatttt

SEQ ID NO: 143041 - DNA, 471 bp, Zea Mays
aacaagccaaactacaagcacatgtcattgagatagaaagtaaaacaggtgatatggatacatattgttatagtgccctctgtgtttccaccatgtcccttcacggttgctatgttttaaagaacagcaccgtgagaagtctcgaccactaatttacagtaacataaaatcaagtagcacaagaaaaagaatgaactttctcaagatcatataagcaacaaaaattgacactagaagcagcccaccaaaatttggtgcatgtactcaagcgctcagcggctgttgtgggagtacgcgagtcggcagcatagatcttagttgctcactcccaggaagcccatccttcaaacgactgaatgctccaatgactcgattcatgctctcactccactcattgaactccaaggagatgagctgcataattttttttctcgaacagctgacccgaaacacaaacaccaacatacacac

SEQ ID NO: 143042 - DNA, 484 bp, Zea Mays
atcggcgtgagttggcaatgtgccaatgccatcgtcgttggatgtaaagcccaaaattggtagaaaaaaaataaagaaaaaaaatatttatgacagtattccaagatttaaacagaagttaatcagagattcaaataccctcatataacttaaaccaacctttgttgaataatatgattagaaatgtcctccaaaagaactaagttaaatatatacatataatttaataaacattatacactagaaattcatgtctcttaaataaataggaacataattttaaattaacctacaagagtaataaagattctattatatgtattgtgtaattgagcatttcacacttgaaatcatctgccccaataattgaataaaataaataatataaataaagttgcatctcatactggtatccttttgattgttcagtttagaatttaaactttatttgaagaccatttgaaattggaggtttaaatgaaat

SEQ ID NO: 143043 - DNA, 1415 bp, Zea Mays
aggtgataggggggaaaatcgggaagccttcggagaaaagaaaagggcaaccgagaccgtgagagaggggaagcggggagccttgtccgatccggtgcagcccgcgcgtcaaactcccggataactgtggcatatgatcccaaatcttgatccacttgaagtgttcagtacattctgtagttcatacaagaatggctgcagatgttacatttgtaacacaagccatcgtcactctaattgccttgatcggttcagaaaaatgaatggtgatagtaagacgttcacggagcccaagactcggaagacatgttgataatgagggatcttatcataccgatgtaaacagtggcccaaatccagatgacatatctagatctgaatttgatttcgctaaccatcaagaatttgagaactcaaccttaactgttgaaggtggtattgtatcgggggaatgccatgatgccatgcaaagttctgctgaagttaagtgtcctctctgtagaggatctgtatctggctggattcctgctggagatgtgagacagtatctagacaataagttgagaacttgctctcatgaatcctgcaaatttactggaacctatgaacaactgcgtgaacatgctaggactgcacacgttcttacagagcctgctcatgtagatctgtccaggaaaagagcttgggatcgccttgagcgtgagcaggaggtcggtgatgtcattagtgcaatcaggtcccaggtacctggggcaataatagttggtgactatgttattgagactagagatgacatgtccccagacatagactctggcgacgatgaaagtagtgaatggtggtcagaccaagttgaatcaccagatgctagacttgatcccccaagggtttggccacatgaagccctagggtcacctagcatttggtcagatgaaaggcgtaatttggcaaggataccacagaacaacagagtaccacccaggttttcattaggcagtaggcgacccctgcattcaggttggcaggggggtcgtcggtcaagcacacggaatcgactgcaacggggcttctcaaatcaccactctggacaccgtagcaactatcgtggacatcgtcacttgcttctggataggtcctatgttggtacccgagattcaggctccggcaggagcctaaattcgtcagtggtgccaagcaggcggcagcggctgcggtacacgcacagaagccactactgatggaagcaatatcagttctacgtgtagagctttattggttaatccattcatgctatctttgtaaatatatgttaaggttatgtttttatttaatgtatttaatctgtctaaacaatctatcctagatgcaaaaagaactacattatttatcataaatgtcatttgtggtgtctctgc

SEQ ID NO: 143044 - DNA, 1556 bp, Zea Mays
acagcgccagccgcccaccaccaacaatgccaaaatcccctccctctcttggtctttcctatatagccgcaggagagggcgggggatcggagcaggtgataggggggaaaatcgggaagccttcggagaaaagaaaagggcaaccgagaccgtgagagaggggaagcggggagccttgtccgatccggtgcagcccgcgcgtcaaactcccggataactgtggcatatgatcccaaatcttgatccacttgaagtgttcagtacattctgtagttggtttcaagatgacaagtaagaaaagtaacagatctacagtcacaccacacactgctctgcatatggaatgggacaggatttcttgccctatttgtatggagcaaccccacaatgctgttttacttatatgcagttcatacaagaatggctgcagatgttacatttgtaacacaagccatcgtcactctaattgccttgatcggttcagaaaaatgaatggtgatagtaaggtccgtgcttcacactcaacctattcggtgctttcaaactccaatatcagaactgtccaaccaagagctcactataatatgatttccagacgttcacggagcccaagactcggaagacatgttgataatgagggatcttatcataccgatgtaaacagtggcccaaatccagatgacatatctagatctgaatttgatttcgctaaccatcaagaatttgagaactcaaccttaactgttgaaggtggtattgtatcgggggaatgccatgatgccatgcaaagttctgctgaagttaagtgtcctctctgtagaggatctgtatctggctggattcctgctggagatgtgagacagtatctagacaataagttgagaacttgctctcatgaatcctgcaaatttactggaacctatgaacaactgcgtgaacatgctaggactgcacacgttcttacagagcctgctcatgtagatctgtccaggaaaagagcttgggatcgccttgagcgtgagcaggaggtcggtgatgtcattagtgcaatcaggtcccaggtacctggggcaataatagttggtgactatgttattgagactagagatgacatgtccccagacatagactctggcgacgatgaaagtagtgaatggtggtcagaccaagttgaatcaccagatgctagacttgatcccccaagggtttggccacatgaagccctagggtcacctagcatttggtcagatgaaaggcgtaatttggcaaggataccacagaacaacagagtaccacccaggttttcattaggcagtaggcgacccctgcattcaggttggcaggggggtcgtcggtcaagcacacggaatcgactgcaacggggcttctcaaatcaccactctggacaccgtagcaactatcgtggacatcgtcacttgcttctggataggtcctatgttggtacccgagattcaggctccggcaggagcctaaattcgtcagtggtgccaagcaggcggcagcggctgcggtacacgcacagaagccactactga

SEQ ID NO: 143045 - DNA, 351 bp, Zea Mays
acagcgccagccgcccaccaccaacaatgccaaaatcccctccctctcttggtctttcctatatagccgcaggagagggcgggggatcggagcaggtgataggggggaaaatcgggaagccttcggagaaaagaaaagggcaaccgagaccgtgagagaggggaagcggggagccttgtccgatccggtgcagcccgcgcgtcaaactcccggataactgtggcatatgatcccaaatcttgatccacttgaagtgttcagtacattctgtaggttagtaccaaccttttgtgtaaatgtcaaatgaacatattaattatgtgcttcaggtctctgtttttttcttgatct

SEQ ID NO: 143046 - DNA, 886 bp, Zea Mays
atgaagggaggaaggcgactagcgcctaccgaggcgcgggcaggtacgtgtggtgtggtgacactattttttgcgggtgttgagcgtgagaaagatgaagctgtggtagcaccagtcgcgctccttctcgttgttccccttcgtcgcccgcaccaccaacgcccacgggatctcggtgccgacaacgccgcccagcgtcgtgtgcttaagcaggcggtcgaggaggccaacgtggtcgccaaggcgctcaaggcaaccgacgtcgccctgcaggtggtcgtcgtgaagaaagagcgtgccctagaagacctgcggggggacaacgagggcctcaagaccagtgaggtcgctgcgagggagcgcgccgaggagctcctgagccagctcgcgtgcgatgaaaaagacaatgtgctgagggcaagctttgcgcggcccagcaggccgaggagaggagcaagaaggcgaccgacgagctcgccgcagcgctgtccgcggtcgccgtggaggcgaagcaggttctgtagaacagaagatacgatgtatcattatcagatatttggtcttatgatttttaatggtgatactcagatcccagagtggctttctcctggtgcacgaaatcttcttcagagaatttttggacccaacctgatgaagctgatcaccatggcagagatagcattttaattatgttatctgcttatatgtaactggtgttggtgttctcaatatattcccgggcctgagcttgtgtggttataagttactaaagttggcattgggtgtgtccttccaagttccaaatattttttcctttttattatcttgcttagatagatgggtcatgcatgcacgtacctgggaaatgaaacattcgttttcgtac

SEQ ID NO: 143047 - DNA, 114 bp, Zea Mays
gtatatacaagcagttgtatccaaaacaatcagctataagcaccagttcattaagaattacaaggtaaaaacagtgtcatcctgggaaagcatatgtacttgggaaaaaaacaa

SEQ ID NO: 143048 - DNA, 505 bp, Zea Mays
cgccatctccttgctcccgctcgactgtgcgtgctccacttcacgcgcctatttcttcaccagcagtccagcacgccctcctgccctcacgctcgctcccctccctggacgcccgtgcagctcccgcgccctgccatcctttgccctgttatcctcgcgccggcgcgccgctcctgtgcctgtcgtcctcaccatccttgcatgagtgctctggggctccctccctctcgtgtcgccatgtacaccatcgcgtccccgttcagcaccggccgcaactcatccctttttctcagtttgccccaggaaggctggatccggaggcacattgcccggagggacagttggatcaatctggtgttgaatcgatgccccgtagggtggttcctcccacaagctcccatggccgggtgcccgggtgctagaggatctgctcaatgttgagcaagtcgacatggaggcctgcaatgtacactccaaaagatagctatctgttgcaatgtttatt

SEQ ID NO: 143049 - DNA, 564 bp, Zea Mays
atgtacgagctgcatcgatcagaatcctcagaccctggtgacccccttgggctcgccggccgcgccgccgacgccgtagtcgtggtcccggtagccaccgctgccgccgaagaggcccgtgtggagcatgagcacgtagaggagctgcgtgaaggcgaggatgatgacgaaggcctccagcacgcgcaggcgccagccgcggtgtccgccgatgtggatctccttgcaggccagcccgaaggcgagcgccgtgatggcccaggcgatgagcgacgacgcggcgttggtggccaggctgtcgtggcgccaggcgcgcacgtggtgcacgcccgccagcttggacgccgcgcccaccacgccggccaggatggcgaacaccaggaagtagaacgtcgcgccgttgccggccacgccggggtagttggtctgcccgttgatgaagtggttcaggttccagctcgcgaagccgatgacgatgatgtacatgatgaggttgagcaccaggagcggcgccaccatgttcctgccaattccggccattcttcgtcgcacgagctcagctag

SEQ ID NO: 143050 - DNA, 1478 bp, Zea Mays
ttcctcctgtcagggcgcgtgcatcccctacgaccagggcagcgtatatccttgtcgctcttcgtcgtctccccccacaactgttatattcccaccggcgccgccggctcttcgtcgtcctcctccgggtgtgccccagttcgctgcccgttccccagccgccgatccctcgatctccgctagcttcgttccttcgtacaggaacggtcgagcagaaactagcagccactcccgagtcccgactcccgatcgcgattacttgccgcggcaccagtactccagcggccaccatgagcagcgggaagcgatccttcttcgcgcccaagaagaaggccaccaacccgttcgattccgactccgacgacgacaaaccgcagcagcggccagcgcgggcgtcctccgtgcctcccccggacgagcagcggggctcctcctctctcttcggcgccggcgacagaggcgggctcttctcttccgcggccaaccatcactaccggaacgacttccgcgacgctggcggccttgagggccagtccgtgcaggagctggagggctacgcggcgtacaaggccgaggagaccacgcgccggacgcgggggtgcgtcaggatcgccgaggagatgagggacaccgcatccaagacgctcgtcaccgtccaccagcaggggcagcagatccaccgcacgcacatgatggccgtcgacatcgaccaggatctctccaggagtgagaagctattgggcgatcttgggggtctattttccaaaaagtggaagccaaagaagaatggcgccatcaggggtcctatgctaactagagatgattccttcataaggaaggggagtcatttggagcaaaggcagaaactagggctggcagatcatccacctccatcaaatgcgcgccaattccgttctgaaccctcatcagcacttgagaaagttgagatagagaaggcaaagcaggatgatgatctgtctgatctaagcaacatactgacggagctgaaagggatggccgttgacatgggctctgagatcgagaggcaaacaaaagcaatgggggatgcagagaaggattatgacgagctgaacttcagggtcaagggagcaaacactcgagctcgccgtctcctcgggagataaaaaaatgcatatattcttgtctcttggatggtccataacacattaactatatgggggcatcaaattctgatgattttgtgcatcagattttgattagcattgttaccgtggacatgtcggcgtgtatggtagttgagacatattttatatgtttgcttcttttttctatttttttagcattgcacgagcttaggatttcagtggattttacatggaaaaccttgtctgattagaaacttcttttcgggtaaataatgctgatacatagtgatttgtcgccgtacactcttcacaccatcaagtacctacgtatgagtagaaactttgccagcg

SEQ ID NO: 143051 - DNA, 1570 bp, Zea Mays
ggcagcgtatatccttgtcgctcttcgtcgtctccccccacaactgttatattcccaccggcgccgccggctcttcgtcgtcctcctccgggtgtgccccagttcgctgcccgttccccagccgccgatccctcgatctccgctagcttcgttccttcgtacaggaacggtcgagcagaaactagcagccactcccgagtcccgactcccgatcgcgattacttgccgcggcaccagtactccagcggccaccatgagcagcgggaagcgatccttcttcgcgcccaagaagaaggccaccaacccgttcgattccgactccgacgacgacaaaccgcagcagcggccagcgcgggcgtcctccgtgcctcccccggacgagcagcggggctcctcctctctcttcggcgccggcgacagaggcgggctcttctcttccgcggccaaccatcactaccggaacgacttccgcgacgctggcggccttgagggccagtccgtgcaggagctggagggctacgcggcgtacaaggccgaggagaccacgcgccggacgcgggggtgcgtcaggatcgccgaggagatgagggacaccgcatccaagacgctcgtcaccgtccaccagcaggggcagcagatccaccgcacgcacatgatggccgtcgacatcgaccaggatctctccaggagtgagaagctattgggcgatcttgggggtctattttccaaaaagtggaagccaaagaagaatggcgccatcaggggtcctatgctaactagagatgattccttcataaggaaggggagtcatttggagcaaaggcagaaactagggctggcagatcatccacctccatcaaatgcgcgccaattccgttctgaaccctcatcagcacttgagaaagttgagatagagaaggcaaagcaggatgatgatctgtctgatctaagcaacatactgacggagctgaaagggatggccgttgacatgggctctgagatcgagaggtactgttacatttcgctatcttgtagactgatctgtgtggtcagtaattcatttattttcttcctgttgtatagtcaattctcaagaaagtatccgaaacttccaaaaagaaaatactatctgtcagtttgaatgctgatagcaatctcgttagttattaaattattaatttggagtattgttgctgtgagtatgacatgtcctctgtgtttgttggattcaggcaaacaaaagcaatgggggatgcagagaaggattatgacgagctgaacttcagggtcaagggagcaaacactcgagctcgccgtctcctcgggagataaaaaaatgcatatattcttgtctcttggatggtccataacacattaactatatgggggcatcaaattctgatgattttgtgcatcagattttgattagcattgttaccgtggacatgtcggcgtgtatggtagttgagacatattttatatgtttgcttcttttttctatttttttagcattgcacgagcttaggatttcagtggattttacatggaaaaccttgtctgattagaaact

SEQ ID NO: 143052 - DNA, 4154 bp, Zea Mays
accgacactcctctccttctcccccaattttctttaaaaatccccgctcgctaaatcccctcccaccgacgcctgtcgccactggcacgcattcctgctctcctctcctcttctccctcgtcggtgcggcgtggcgcggctcggcgttcggtgagaaaccactcggggatgaggatctgctgctagagtgagaggagctacggtcagtatcctctgccttcgtcggcggcggaagtggaggggaggaagcgatggaggcgagcgccgggctggtggccggctcccacaaccgcaacgagctcgtcgtcatccgccgcgacggcgatcccgggccgaagccgccgcgggagcagaacgggcaggtgtgccagatttgcggcgacgacgtcggccttgcccccggcggggaccccttcgtggcgtgcaacgagtgcgccttccccgtctgccgggactgctacgaatacgagcgccgggagggcacgcagaactgcccccagtgcaagactcgatacaagcgcctcaagggctgccagcgtgtgaccggtgacgaggaggaggacggcgtcgatgacctggacaacgagttcaactgggacggccatgactcgcagtctgtggccgagtccatgctctacggccacatgagctacggccgtggaggtgaccctaatggcgcgccacaagctttccagctcaaccccaatgttccactcctcaccaacgggcagatggtggatgacatcccaccggagcagcacgcgctggtgccttctttcatgggtggtgggggaaagaggatacatccccttccttatgcggatcccagcttacctgtgcaacccaggtctatggacccatccaaggatcttgctgcatatgggtatggtagtgttgcttggaaggaacggatggagaattggaagcagagacaagagaggatgcaccagacggggaatgatggtggtggtgatgatggtgacgatgctgatctaccactaatggatgaagcaagacaacaactgtccaggaaaattccacttccatcaagccagattaatccatataggatgattatcattattcggcttgtggttttggggttcttcttccactaccgagtgatgcatccggtgaatgatgcatttgctttgtggctcatatctgttatctgtgaaatctggtttgccatgtcttggattcttgatcaattcccaaagtggttccctattgagagagagacttacctagaccggctgtcactgaggttcgacaaggaaggccagccatctcaacttgctccaattgatttctttgtcagtacggttgatcccttaaaggaacctcctttggtcacaacaaatactgttctatctatcctttcggtggattatcctgttgataaggtttcttgctatgtttctgatgatggtgctgcaatgctaacgtttgaagcattatctgaaacatctgaatttgcaaagaaatgggttcctttctgcaaacggtacaatattgaacctcgcgctccagagtggtacttccaacagaagatagactacttgaaagacaaggtggcagcaaactttgttagggagaggagagcaatgaagagagagtatgaggaattcaaggtgagaatcaatgccttagttgccaaagcccagaaagttcctgaagaaggatggacaatgcaagatggaaccccctggcctggaaacaatgttcgtgatcatcctggaatgattcaggtcttccttggccaaagcggaggccttgactgtgagggaaatgaactgccacgattggtttatgtttctagagagaaacgaccaggctataaccatcataagaaagctggtgctatgaatgcattggtccgagtctctgctgtactaacaaatgctccatatttgttaaacttggattgtgatcactacatcaacaacagcaaggctataaaggaagcaatgtgttttatgatggaccctttactaggaaagaaggtttgctatgtacagttccctcaaagatttgatgggattgatcgccatgaccgatatgctaaccggaatgttgtcttttttgatatcaacatgaaaggtttggatggtattcagggtccaatttatgttggtactggatgtgtatttagaaggcaggcattatatggttatgatgcccccaaaacaaagaagccaccatcaaggacttgcaactgctggcccaagtggtgcttttgctgttgctgctttggcaataggaagcaaaagaagactaccaaacccaaaacagagaagaaaaagttattatttttcaagaaagaagagaaccaatcccctgcatatgctcttggtgaaattgacgaagctgctccaggagctgagaatgaaaaggccggtattgtaaatcaacaaaaattagaaaagaaatttggccaatcttctgtttttgttacatccacacttctcgagaatggtggaaccttgaagagtgcaagtcctgcttctcttttgaaagaagctatacatgtcattagttgtggttatgaagacaagacagactggggaaaagagttacagaagatattctaactggtttcaagatgcattgtcatggttggcggtcaatttactgcatacctaaacgggttgcattcaaaggttctgcacctctgaatctttcagatcgtcttcaccaggtgcttcggtgggctcttgggtctattgagatcttcttcagcaatcattgccctctttggtatgggtatggtggcggtctgaaatttttggaaagattttcctacatcaactccatcgtgtatccttggacatctattcccctcttggcttactgtacattgcctgccatctgtttattgacagggaaatttatcactccagagctgaataatgttgccagcctgtggttcatgtcactttttatctgcatttttgctacgagcatcctagaaatgagatggagtggtgttggaattgatgactggtggaggaatgagcagttctgggtcattggaggtgtgtcctcacacctctttgctgtgttccagggacttctcaaggtcatagctggtgttgatacaagcttcaccgtgacatcaaagggtggagatgatgaggagttctcagagctatatacattcaaatggactaccttattgatacctcctaccaccttgcttctattgaacttcattggtgtggtcgctggcgtttcaaatgcgatcaataacggatatgagtcatggggccccctctttgggaagctattctttgcattttgggtgattgtccatctttatccctttctcaaaggtttggttggaaggcaaaacaggacaccaacgattgtcatcgtctggtccattctgctggcttcaatcttctcgctcctttgggttcggattgatcctttccttgcgaaggatgatggtccgcttcttgaggagtgtggtttggattgcaactaggatgtcagtgcatcagctcccccaatctgcatatgcttgaagtatattttctggtgtttgtccccatattcagtgtctgtagataagagacatgaaatgtcccaagtttcttttgatccatggtgaacctacttaatatctgagagatatactgggggaaaatggaggctgcggcaatccttgtgcagttgggccgtggaatacagcatatgcaagtgtttgattgtgcagcattctttattacttggtcgcaatatagatgggctgagccgaacagcaaggtattttgattctgcactgctcccgtgtacaaacttggttctcaataaggcaggcaggaatgcatctgccagtggaacagagcaacctgcacattatttatgtatgcctgttcattggagggcttgttcattacatgttcgtctatactagaaaaaacagaatattagcattaatctatagttaattaaagtatgtaaatgcgcctgttttttgttgtgtactgtaatcatctgagttggttttgtgaaattttcgtagaaagaatgaatgtgagatacagaaaatgtaatgccgtggtatatgcgtatggaacgatgtagtatcttttatggttccataatagtgtatttaacaaccccagcaaggggtttcttgggtttct

SEQ ID NO: 143053 - DNA, 4171 bp, Zea Mays
accgacactcctctccttctcccccaattttctttaaaaatccccgctcgctaaatcccctcccaccgacgcctgtcgccactggcacgcattcctgctctcctctcctcttctccctcgtcggtgcggcgtggcgcggctcggcgttcggtgagaaaccactcggggatgaggatctgctgctagagtgagaggagctacggtcagtatcctctgccttcgtcggcggcggaagtggaggggaggaagcgatggaggcgagcgccgggctggtggccggctcccacaaccgcaacgagctcgtcgtcatccgccgcgacggcgatcccgggccgaagccgccgcgggagcagaacgggcaggtgtgccagatttgcggcgacgacgtcggccttgcccccggcggggaccccttcgtggcgtgcaacgagtgcgccttccccgtctgccgggactgctacgaatacgagcgccgggagggcacgcagaactgcccccagtgcaagactcgatacaagcgcctcaagggctgccagcgtgtgaccggtgacgaggaggaggacggcgtcgatgacctggacaacgagttcaactgggacggccatgactcgcagtctgtggccgagtccatgctctacggccacatgagctacggccgtggaggtgaccctaatggcgcgccacaagctttccagctcaaccccaatgttccactcctcaccaacgggcagatggtggatgacatcccaccggagcagcacgcgctggtgccttctttcatgggtggtgggggaaagaggatacatccccttccttatgcggatcccagcttacctgtgcaacccaggtctatggacccatccaaggatcttgctgcatatgggtatggtagtgttgcttggaaggaacggatggagaattggaagcagagacaagagaggatgcaccagacggggaatgatggtggtggtgatgatggtgacgatgctgatctaccactaatggatgaagcaagacaacaactgtccaggaaaattccacttccatcaagccagattaatccatataggatgattatcattattcggcttgtggttttggggttcttcttccactaccgagtgatgcatccggtgaatgatgcatttgctttgtggctcatatctgttatctgtgaaatctggtttgccatgtcttggattcttgatcaattcccaaagtggttccctattgagagagagacttacctagaccggctgtcactgaggttcgacaaggaaggccagccatctcaacttgctccaattgatttctttgtcagtacggttgatcccttaaaggaacctcctttggtcacaacaaatactgttctatctatcctttcggtggattatcctgttgataaggtttcttgctatgtttctgatgatggtgctgcaatgctaacgtttgaagcattatctgaaacatctgaatttgcaaagaaatgggttcctttctgcaaacggtacaatattgaacctcgcgctccagagtggtacttccaacagaagatagactacttgaaagacaaggtggcagcaaactttgttagggagaggagagcaatgaagagagagtatgaggaattcaaggtgagaatcaatgccttagttgccaaagcccagaaagttcctgaagaaggatggacaatgcaagatggaaccccctggcctggaaacaatgttcgtgatcatcctggaatgattcaggtcttccttggccaaagcggaggccttgactgtgagggaaatgaactgccacgattggtttatgtttctagagagaaacgaccaggctataaccatcataagaaagctggtgctatgaatgcattggtccgagtctctgctgtactaacaaatgctccatatttgttaaacttggattgtgatcactacatcaacaacagcaaggctataaaggaagcaatgtgttttatgatggaccctttactaggaaagaaggtttgctatgtacagttccctcaaagatttgatgggattgatcgccatgaccgatatgctaaccggaatgttgtcttttttgatatcaacatgaaaggtttggatggtattcagggtccaatttatgttggtactggatgtgtatttagaaggcaggcattatatggttatgatgcccccaaaacaaagaagccaccatcaaggacttgcaactgctggcccaagtggtgcttttgctgttgctgctttggcaataggaagcaaaagaagactaccaaacccaaaacagagaagaaaaagttattatttttcaagaaagaagagaaccaatcccctgcatatgctcttggtgaaattgacgaagctgctccaggagctgagaatgaaaaggccggtattgtaaatcaacaaaaattagaaaagaaatttggccaatcttctgtttttgttacatccacacttctcgagaatggtggaaccttgaagagtgcaagtcctgcttctcttttgaaagaagctatacatgtcattagttgtggttatgaagacaagacagactggggaaaagagattggctggatctatggatcagttacagaagatattctaactggtttcaagatgcattgtcatggttggcggtcaatttactgcatacctaaacgggttgcattcaaaggttctgcacctctgaatctttcagatcgtcttcaccaggtgcttcggtgggctcttgggtctattgagatcttcttcagcaatcattgccctctttggtatgggtatggtggcggtctgaaatttttggaaagattttcctacatcaactccatcgtgtatccttggacatctattcccctcttggcttactgtacattgcctgccatctgtttattgacagggaaatttatcactccagagctgaataatgttgccagcctgtggttcatgtcactttttatctgcatttttgctacgagcatcctagaaatgagatggagtggtgttggaattgatgactggtggaggaatgagcagttctgggtcattggaggtgtgtcctcacacctctttgctgtgttccagggacttctcaaggtcatagctggtgttgatacaagcttcaccgtgacatcaaagggtggagatgatgaggagttctcagagctatatacattcaaatggactaccttattgatacctcctaccaccttgcttctattgaacttcattggtgtggtcgctggcgtttcaaatgcgatcaataacggatatgagtcatggggccccctctttgggaagctattctttgcattttgggtgattgtccatctttatccctttctcaaaggtttggttggaaggcaaaacaggacaccaacgattgtcatcgtctggtccattctgctggcttcaatcttctcgctcctttgggttcggattgatcctttccttgcgaaggatgatggtccgcttcttgaggagtgtggtttggattgcaactaggatgtcagtgcatcagctcccccaatctgcatatgcttgaagtatattttctggtgtttgtccccatattcagtgtctgtagataagagacatgaaatgtcccaagtttcttttgatccatggtgaacctacttaatatctgagagatatactgggggaaaatggaggctgcggcaatccttgtgcagttgggccgtggaatacagcatatgcaagtgtttgattgtgcagcattctttattacttggtcgcaatatagatgggctgagccgaacagcaaggtattttgattctgcactgctcccgtgtacaaacttggttctcaataaggcaggcaggaatgcatctgccagtggaacagagcaacctgcacattatttatgtatgcctgttcattggagggcttgttcattacatgttcgtctatactagaaaaaacagaatattagcattaatctatagttaattaaagtatgtaaatgcgcctgttttttgttgtgtactgtaatcatctgagttggttttgtgaaattttcgtagaaagaatgaatgtgagatacagaaaatgtaatgccgtggtatatgcgtatggaacgatgtagtatcttttatggttccataatagtgtatttaacaaccccagcaaggggtttcttggg

SEQ ID NO: 143054 - DNA, 1073 bp, Zea Mays
ttttctttaaaaatccccgctcgctaaatcccctcccaccgacgcctgtcgccactggcacgcattcctgctctcctctcctcttctccctcgtcggtgcggcgtggcgcggctcggcgttcggtgagaaaccactcggggatgaggatctgctgctagagtgagaggagctacggtcagtatcctctgccttcgtcggcggcggaagtggaggggaggaagcgatggaggcgagcgccgggctggtggccggctcccacaaccgcaacgagctcgtcgtcatccgccgcgacggcgatcccgggccgaagccgccgcgggagcagaacgggcaggtgtgccagatttgcggcgacgacgtcggccttgcccccggcggggaccccttcgtggcgtgcaacgagtgcgccttccccgtctgccgggactgctacgaatacgagcgccgggagggcacgcagaactgcccccagtgcaagactcgatacaagcgcctcaagggctgccagcgtgtgaccggtgacgaggaggaggacggcgtcgatgacctggacaacgagttcaactgggacggccatgactcgcagtctgtggccgagtccatgctctacggccacatgagctacggccgtggaggtgaccctaatggcgcgccacaagctttccagctcaaccccaatgttccactcctcaccaacgggcagatggtggatgacatcccaccggagcagcacgcgctggtgccttctttcatgggtggtgggggaaagaggatacatccccttccttatgcggatcccagcttacctgtgcaacccaggtctatggacccatccaaggatcttgctgcatatgggtatggtagtgttgcttggaaggaacggatggagaattggaagcagagacaagagaggatgcaccagacggggaatgatggtggtggtgatgatggtgacgatgctgatctaccactgtatgaccctcaaaactgtttgattcttgttacttttatgcctctttaatgctttatgctatttggttacatgaatttgtccaaattaatttccaaaata

SEQ ID NO: 143055 - DNA, 112 bp, Zea Mays
ccgaccccgtcgcaaacaactaaccaaagaaattctactgtcttacaggtgaatattttccacaaattccaaattcccaaagcgcatcacccgaatgaggaaaaagaacaaa

SEQ ID NO: 143056 - DNA, 909 bp, Zea Mays
ctaaaaaaagcgccggcgcggaatactgcggctgcggctgcggcgacggccatggatcgcgatgctgcgatgctgccgtccctcgaactgcaccggcacttgggcgaacttctgcagaaggggacgggcgcggacgtcacgttccatgtgtccggcgagaagttcgccgcgcacaaggccatccttgcctcgaggtcgccggtgttcatggcggagctgtttgggggaatgaaggaggaggcgtcccggcacatcgaggtgaaggacataaagcccgcggcgttcaaggccgtgcttcgcttcatctacactggcacggcgccggaactggacaagaagggcgacggcgggacgtcgttggcgcagcatctgcttgccggcgcggacaggtacggcctggacatgctcaaacttatctgcgtgggctggctcgcggaccgcatcaccgtcgacacggtggcgaccacactggcgctagcggagcagcatggctgctcgcagctcaaggctagctgcatcgagttcatcgcgggatatcttgacgccgtcctggagacagaggggtacaagcacctggaagcaagctgcccctcggtgctcactgatatcctcaaggctacgctgcgaccaaccaattgaagcgtcgagcgggatgactccatcttcatgtgaacgatcagttacactagttgctacattctttatctttcatccacttctgattctggaatcttgatgcagtaattctggccttggcaacatgttcagaatcattgcttctctatttcagattatattttccagttttgctataccgtgtcggatgaaaaccttctctccaacaactgttttccctgctctttttccctaaatcgtatacataggaggaataaaactacgatttaaatg

SEQ ID NO: 143057 - DNA, 1628 bp, Zea Mays
gtatagaaaacggagctgataggaacgagattttttacatccattttcatccctagctgtggtcccacaggtcgcaccattctcccctcttcttccgccgatacacacgccctgcacgggggctcgccgaggcttcagtttactactgaagcacgcaccgcagcgtctccaccttctgctcaacctccgcttccgtaggtgccggcgctaagcgaggatccctccgttcatcggtcccgacggcacctcgactcgtttcgtcggtcgctgtggcgacgggtgattgactgcgatatgaggcaatggttatgttgtaactgccactttgatgacgaggaagatggccatgacaaggaacaggccaaagctcagagcaataagatagaccccaagcagaagtcttcaaaacctcctgttagtcaacctgagccagagttctcccctccaacaattgatgttcctgaattgtcattggatgatttgaaacaaaagactgatgattttggatcaagtgctctgattggtgaaggttcttatggacgagtatatcatgccgctttagatgatgggaggcaagccgcagttaaaaaacttgatgcatctgaaaatgagcctaatgatgagttcctcaaacaggtctcactggcatcaaagctaaaacatgaaaatcttgttgagatgttgggttattgtgtggatgggaattatcgtatacttgcttatgaatttgcaaccatgggttcgcttcatgatgttttacatggaagaaaaggcgttcaaggcgcgcagcctggccctgtgcttgactggatgcagagggtcaaaattgttattgaggctgcaaaaggtatagaatatctgcatgaaaaggttcagccttcaatcatccatcgggacatcagatcaagcaatgtactgctgtttgaggatttcaaggcaaaaattgcagacttcaatcttttgaaccaagcaccagatatggcagctcgtctccattcaactcgtgtattgggaacttttggatatcatgcacctgagtatgctatgactggccagctgacacaaaaaagcgatgtctacagctttggcgtggtccttttggaacttttgactggaaggaaaccagtagatcacacaatgcctcgaggacaacaaagtttagtcacatgggctactccaaggttgagtgaagacaaggtgaagcaatgtgtagatcccaggttgaagggagaatatcctccaaagggagtcgctaagcttgctgcagtggcagcactgtgtgtgcaatacgaagcagagttcaggcccaacatgagcattgttgtgaaggcgctttcgcctctccttcaacaaagacctgcaccaggcaccgcagagccagccccgcaacctgtgagctgaatccagtcacgtgtgatgggacctcgcagcatcaggcatctccgcgatcattcaatcagcaagtcattgagagtattttgaatatttgttctgtagcattctgttcctggcttgatgttggcgctgcacaatgacaatggtatatgcagtaggtttgatttttctttttcttttaccttctctataccagtaccaagttaccaactgttcgtagattttcagaattc

SEQ ID NO: 143058 - DNA, 1352 bp, Zea Mays
aggtcgcaccattctcccctcttcttccgccgatacacacgccctgcacgggggctcgccgaggcttcagtttactactgaagcacgcaccgcagcgtctccaccttctgctcaacctccgcttccgtaggtgccggcgctaagcgaggatccctccgttcatcggtcccgacggcacctcgactcgtttcgtcggtcgctggtaaggaagccctaactattttcttcctcggattgactgcttcctttttcgagttgagatcagttcagttggagagattatctatttctatgcttgtgtgccctcgaatccaaatcttcctttcgtggtgcggatgcgtgaacggtcctccaatccaatccccttcgagtggcgacgggtgattgactgcgatatgaggcaatggttatgttgtaactgccactttgatgacgaggaagatggccatgacaaggaacaggccaaagctcagagcaataagatagaccccaagcagaagtcttcaaaacctcctgttagtcaacctgagccagagttctcccctccaacaattgatgttcctgaattgtcattggatgatttgaaacaaaagactgatgattttggatcaagtgctctgattggtgaaggttcttatggacgagtatatcatgccgctttagatgatgggaggcaagccgcagttaaaaaacttgatgcatctgaaaatgagcctaatgatgagttcctcaaacaggtctcactggcatcaaagctaaaacatgaaaatcttgttgagatgttgggttattgtgtggatgggaattatcgtatacttgcttatgaatttgcaaccatgggttcgcttcatgatgttttacatggaagaaaaggcgttcaaggcgcgcagcctggccctgtgcttgactggatgcagagggtcaaaattgttattgaggctgcaaaaggtatagaatatctgcatgaaaaggttcagccttcaatcatccatcgggacatcagatcaagcaatgtactgctgtttgaggatttcaaggcaaaaattgcagacttcaatcttttgaaccaagcaccagatatggcagctcgtctccattcaactcgtgtattgggaacttttggatatcatgcacctgagtaattgtttaatactcttattcatgataattatcttctgccacattcattttcatttttttacacttgactgcaactttctcaggtcaactgtagctttcatagttcataccttgaacttattgtagctttcatgtcagtttggttgagccctgactgcttccttagtgattttatatattttttataatggtttaactgacagtttgtgtaa

SEQ ID NO: 143059 - DNA, 109 bp, Zea Mays
gaattacccatcttgaaagtgttattcttcttcatcttcttattagataatgattacaattgtaccttcggctttacagaaaacaacatgaaggagaaaaggagcaaat

SEQ ID NO: 143060 - DNA, 138 bp, Zea Mays
atggtgactgggctaggtggcagtgggcactacgatgacacgatggctcggcaattgctcgccattgcaggggattcgcgctccaccatggccaaactggtcgtcgagacacgcaacggtgagaaccccaccacttag

SEQ ID NO: 143061 - DNA, 230 bp, Zea Mays
caccacaattatatattcacaaaagcatcacaattataatatcattcacaactagatcatttacatatagctagctaaatcattaacaaaagctccggagatgatcagtcacaaaagcaccacagcgacatcactccagcttgaagcagttcaaaagcccacaactacatcactaatgtttcatatcactccagctattgttcaaaagcccacaactacatcactctagc

SEQ ID NO: 143062 - DNA, 1936 bp, Zea Mays
catagcacagacagtgttcttttgggtgttcgattggttgcacaacttgtatgaaacatgtgttcttagtctaaaattgattctggctgttgacaaactaacatatttatcaatatttattggaaagttgctgcaaattggtatgtatattgctgattttatcaaatcttagctccattattggctgcttcagggaaaaaatattaatcggacttagtatcaatttaaattactgtaggctgggtttattaagtgactgactattgatattgcatacctttagacatcatattcatttgtaatacagctgttcaaagttgcatttgtcttgaaagattatattttcagtttgaggtaggatattatatgtgcctaacttttcaatgcaaggcatgaaattctatgcttatcattcaaatggctcgttctgtacaattttagttaggtattggagttggtatcaggacgacctgacagtttacaatttgcaacaatgtatctatttctcaagattgctgatattgatgttgttacatttttcctgttttcgttatcattggtgtggttctacatttttgttagctatttagcatgatatttgacttttattggattggttgagggaatcccatagaggcaacattaaaatgaatctaggggatccgaggagtgaaataggatataaatttttttataggaaaatagtaccatctagtgttatccatgttttacatactaatttgtgataatgcatactacatctagtgttatccgctcatttgttaacaggaagtttgctctagattcctgtattttatataatttttcctaaatactataggtgtatgtacagcctaccccaatttgcttagtactaaatggctttgttgttgtacacttgtactatatagatgtacgtatgcttggtaaaaaaaacttgttgcacttttatacagacatcatgctcttgaaacaggcagtaggcttagtaggcactgttcaaatacaagaggaaatacataaagcatagagagtttgcctgactcatttgtttgtctttgatatatgcaatctgcggtgaagtactcccattcaacagatgctggtatatcatttcagtcaaaccaatgcaactaagaactatgcatgtttagattgagaaaattaatttgtactgtttgttgcctactgcagaaataatcttctatctaatcttgctctttgttgattaaacaatttcttccctgcaagttatgatcctttcggtgccattgtaatagtgaattatagctcagtaaagattttccctcccaggtcgctattccagtcgtgcctacaatcagagtgcttgtgacattcacaaaatttgaagagctacagccgctagatgagttcaccacaccaccctcaagtcctgacaacagcaagagcccagcagtgcagccttcttcaagttcctggattcagtggatcaaggcgccctacctccagaacttgtcgacggcacctggcccaagcagccgcgtggaggacatccaggacccattcgccattccttccaattacgtgtggacaacacctgaagagaagaaaaagaagacacaagaaaacaagaacaagtcgaagaaaggcaggagcggcgcatagatagtacgtaggtgatagcattggtgggggggggggggagttaaagttatgctgtgagtgggtgaaaagggctatactcttcaggatctaacaggagggatgattggaagatttggagatttcggctgctctgacgtcgaatattgagaagcgaccgcttgtcttctttcattgtgataacagatctgctgtcaacattctttcgtttaacccatcgtttgggtcctgattatcattgcaatctactgtattggtagattttgaggtgtggcgccttctgatatgattg

SEQ ID NO: 143063 - DNA, 2485 bp, Zea Mays
gagacgagggtgggagtaatacaacagagccaagccgagggaggagagagggagagagagggggagcagggaacccaaagagacaaggcaaggaagcagagagaaactccaagattgggggcgactggtaagcaaggggaggagtagaggcggcgtttgttctccttcgattccctagtcttcctggagggcgacgaagggagatttcgccgggcgcggacggacgccgcgatggccggtgtcgacgccgccaggtacgcgcacagcccagcacaccacgctgtggcggcccgggaccacgccgcgctgcgccgcgtgctggacgcgctcccgcgggcgcgccggcccgaggagatccggacggaagcggactccgtcgccgaggaggcccgcgccgaggccgtctcggcggtcatcgaccgccgcgacgtgcccgggcgggagacgccgctccacctcgccgtgcgcctctgtgaccccacggcggccgagatgctcatggcggccggcgccgactggagcctgcagaacgagcagggttggagcgccctccaggaggccatctgcacgcgcgaggaggccctggcgcgcgtcatcgtgcgccactaccagcccctcgcctgggccaagtggtgccgccgactgccccgcgtcgtcgccgccatgcgccggatgcgggacttctacatggagatcaccttccattttgagagctccgtcatcccattcatttcccgcatcgcgccctccgacacctacagggtctggaagcgtggctccaacctccgcgccgacatgaccctcgctggtttcgatggcttcaagatccaacgctccgaccagaccatactcttcctcggggaagggtcggaggatggcaaggtgccgccgggttcactgtgcatgatcaaccacaaggacaaggagattatgaacgcgctggagggggcaggcaccccagcctcagatgcagaagtccagcaggaggtcgctgcaatgtcacagaccaacatcttccgtccggggattgacgtcacccaagcgctgttgctcccacagctcacttggcggcggcaggaacggacagaggcggttggcccgtggaaggccaaggtgtatgaaatgaatcatgtggtggtcagtgtcaagtcaaggagggtcccgggggcgatgacggatgaagaattcttttcatcttgcaatgacaatgatatagagagtgaggggtttgatgatgttctgacagaggaggagaagaagcagttggaggctgcgctaaaaatggattctccggatgccggtggggaagaccaatctgactcatttgctggccctcgacatagttgctttgagccaagggagagggaggtacccattgaggacatgagtgtttctggaaatggggagggtaagcatgacaagaaaggttggttcagtaattggggaaagagaagtcaggttagcaagtcagagggggtgaagaagatggcatctccaaggaactcgctctgtgtagatgacaaggtgagtgacctcgtcattgaatcgccctcaaatgtacaaacaagaccgggaaggcattcggtagatgtagtcagaccagatgacaacagaaggatcagggaaagggatagtaggagacatgttgcttctgcagagaatgggcataggcgcaaagaaggttccaaagaaagtgagtacaaaaaaggcctaaggcctgttctctggctctctccaaatttccctcttcggactgaggagctgctgccattgcttgatattcttgcaaacaaagtgaaggcaattcgtcgtttgagggatctacttacaacaaaactccctccaggcacatttcctgtcaaggtcgctattccagtcgtgcctacaatcagagtgcttgtgacattcacaaaatttgaagagctacagccgctagatgagttcaccacaccaccctcaagtcctgacaacagcaagagcccagcagtgcagccttcttcaagttcctggattcagtggatcaaggcgccctacctccagaacttgtcgacggcacctggcccaagcagccgcgtggaggacatccaggacccattcgccattccttccaattacgtgtggacaacacctgaagagaagaaaaagaagacacaagaaaacaagaacaagtcgaagaaaggcaggagcggcgcatagatagtacgtaggtgatagcattggtgggggggggggggagttaaagttatgctgtgagtgggtgaaaagggctatactcttcaggatctaacaggagggatgattggaagatttggagatttcggctgctctgacgtcgaatattgagaagcgaccgcttgtcttctttcattgtgataacagatctgctgtcaacattctttcgtttaacccatcgtttgggtcctgattatcattgcaatctactgtattggtagattttgaggtgtggcgccttctgatatgattg

SEQ ID NO: 143064 - DNA, 2477 bp, Zea Mays
gagacgagggtgggagtaatacaacagagccaagccgagggaggagagagggagagagagggggagcagggaacccaaagagacaaggcaaggaagcagagagaaactccaagattgggggcgactgggggaggagtagaggcggcgtttgttctccttcgattccctagtcttcctggagggcgacgaagggagatttcgccgggcgcggacggacgccgcgatggccggtgtcgacgccgccaggtacgcgcacagcccagcacaccacgctgtggcggcccgggaccacgccgcgctgcgccgcgtgctggacgcgctcccgcgggcgcgccggcccgaggagatccggacggaagcggactccgtcgccgaggaggcccgcgccgaggccgtctcggcggtcatcgaccgccgcgacgtgcccgggcgggagacgccgctccacctcgccgtgcgcctctgtgaccccacggcggccgagatgctcatggcggccggcgccgactggagcctgcagaacgagcagggttggagcgccctccaggaggccatctgcacgcgcgaggaggccctggcgcgcgtcatcgtgcgccactaccagcccctcgcctgggccaagtggtgccgccgactgccccgcgtcgtcgccgccatgcgccggatgcgggacttctacatggagatcaccttccattttgagagctccgtcatcccattcatttcccgcatcgcgccctccgacacctacagggtctggaagcgtggctccaacctccgcgccgacatgaccctcgctggtttcgatggcttcaagatccaacgctccgaccagaccatactcttcctcggggaagggtcggaggatggcaaggtgccgccgggttcactgtgcatgatcaaccacaaggacaaggagattatgaacgcgctggagggggcaggcaccccagcctcagatgcagaagtccagcaggaggtcgctgcaatgtcacagaccaacatcttccgtccggggattgacgtcacccaagcgctgttgctcccacagctcacttggcggcggcaggaacggacagaggcggttggcccgtggaaggccaaggtgtatgaaatgaatcatgtggtggtcagtgtcaagtcaaggagggtcccgggggcgatgacggatgaagaattcttttcatcttgcaatgacaatgatatagagagtgaggggtttgatgatgttctgacagaggaggagaagaagcagttggaggctgcgctaaaaatggattctccggatgccggtggggaagaccaatctgactcatttgctggccctcgacatagttgctttgagccaagggagagggaggtacccattgaggacatgagtgtttctggaaatggggagggtaagcatgacaagaaaggttggttcagtaattggggaaagagaagtcaggttagcaagtcagagggggtgaagaagatggcatctccaaggaactcgctctgtgtagatgacaaggtgagtgacctcgtcattgaatcgccctcaaatgtacaaacaagaccgggaaggcattcggtagatgtagtcagaccagatgacaacagaaggatcagggaaagggatagtaggagacatgttgcttctgcagagaatgggcataggcgcaaagaaggttccaaagaaagtgagtacaaaaaaggcctaaggcctgttctctggctctctccaaatttccctcttcggactgaggagctgctgccattgcttgatattcttgcaaacaaagtgaaggcaattcgtcgtttgagggatctacttacaacaaaactccctccaggcacatttcctgtcaaggtcgctattccagtcgtgcctacaatcagagtgcttgtgacattcacaaaatttgaagagctacagccgctagatgagttcaccacaccaccctcaagtcctgacaacagcaagagcccagcagtgcagccttcttcaagttcctggattcagtggatcaaggcgccctacctccagaacttgtcgacggcacctggcccaagcagccgcgtggaggacatccaggacccattcgccattccttccaattacgtgtggacaacacctgaagagaagaaaaagaagacacaagaaaacaagaacaagtcgaagaaaggcaggagcggcgcatagatagtacgtaggtgatagcattggtgggggggggggggagttaaagttatgctgtgagtgggtgaaaagggctatactcttcaggatctaacaggagggatgattggaagatttggagatttcggctgctctgacgtcgaatattgagaagcgaccgcttgtcttctttcattgtgataacagatctgctgtcaacattctttcgtttaacccatcgtttgggtcctgattatcattgcaatctactgtattggtagattttgaggtgtggcgccttctgatatgattg

SEQ ID NO: 143065 - DNA, 2790 bp, Zea Mays
ctccccccttccgtcttgttcacttttcaatctcccacgtcgccccatgggccatggcaaggctgcttcgggtgtccctcgctctctctctcgctttccctctctagacttcaatacttttcccctgtccgtgggcaagcccatcatgacgtgagggagggggaggcgatgcccagtctactctagcctgggtcttgagagagaggggagacgagggtgggagtaatacaacagagccaagccgagggaggagagagggagagagagggggagcagggaacccaaagagacaaggcaaggaagcagagagaaactccaagattgggggcgactggtaagcaagtaagctccttttcgactttcttaatatcaccgagcgattgatttccgctgccatacgttccgctcaattcttaccttccactgcttccgcaaataagggggaggagtagaggcggcgtttgttctccttcgattccctagtcttcctggagggcgacgaagggagatttcgccgggcgcggacggacgccgcgatggccggtgtcgacgccgccaggtacgcgcacagcccagcacaccacgctgtggcggcccgggaccacgccgcgctgcgccgcgtgctggacgcgctcccgcgggcgcgccggcccgaggagatccggacggaagcggactccgtcgccgaggaggcccgcgccgaggccgtctcggcggtcatcgaccgccgcgacgtgcccgggcgggagacgccgctccacctcgccgtgcgcctctgtgaccccacggcggccgagatgctcatggcggccggcgccgactggagcctgcagaacgagcagggttggagcgccctccaggaggccatctgcacgcgcgaggaggccctggcgcgcgtcatcgtgcgccactaccagcccctcgcctgggccaagtggtgccgccgactgccccgcgtcgtcgccgccatgcgccggatgcgggacttctacatggagatcaccttccattttgagagctccgtcatcccattcatttcccgcatcgcgccctccgacacctacagggtctggaagcgtggctccaacctccgcgccgacatgaccctcgctggtttcgatggcttcaagatccaacgctccgaccagaccatactcttcctcggggaagggtcggaggatggcaaggtgccgccgggttcactgtgcatgatcaaccacaaggacaaggagattatgaacgcgctggagggggcaggcaccccagcctcagatgcagaagtccagcaggaggtcgctgcaatgtcacagaccaacatcttccgtccggggattgacgtcacccaagcgctgttgctcccacagctcacttggcggcggcaggaacggacagaggcggttggcccgtggaaggccaaggtgtatgaaatgaatcatgtggtggtcagtgtcaagtcaaggagggtcccgggggcgatgacggatgaagaattcttttcatcttgcaatgacaatgatatagagagtgaggggtttgatgatgttctgacagaggaggagaagaagcagttggaggctgcgctaaaaatggattctccggatgccggtggggaagaccaatctgactcatttgctggccctcgacatagttgctttgagccaagggagagggaggtacccattgaggacatgagtgtttctggaaatggggagggtaagcatgacaagaaaggttggttcagtaattggggaaagagaagtcaggttagcaagtcagagggggtgaagaagatggcatctccaaggaactcgctctgtgtagatgacaaggtgagtgacctcgtcattgaatcgccctcaaatgtacaaacaagaccgggaaggcattcggtagatgtagtcagaccagatgacaacagaaggatcagggaaagggatagtaggagacatgttgcttctgcagagaatgggcataggcgcaaagaaggttccaaagaaagtgagtacaaaaaaggcctaaggcctgttctctggctctctccaaatttccctcttcggactgaggagctgctgccattgcttgatattcttgcaaacaaagtgaaggcaattcgtcgtttgagggatctacttacaacaaaactccctccaggcacatttcctgtcaaggtcgctattccagtcgtgcctacaatcagagtgcttgtgacattcacaaaatttgaagagctacagccgctagatgagttcaccacaccaccctcaagtcctgacaacagcaagagcccagcagtgcagccttcttcaagttcctggattcagtggatcaaggcgccctacctccagaacttgtcgacggcacctggcccaagcagccgcgtggaggacatccaggacccattcgccattccttccaattacgtgtggacaacacctgaagagaagaaaaagaagacacaagaaaacaagaacaagtcgaagaaaggcaggagcggcgcatagatagtacgtaggtgatagcattggtgggggggggggggagttaaagttatgctgtgagtgggtgaaaagggctatactcttcaggatctaacaggagggatgattggaagatttggagatttcggctgctctgacgtcgaatattgagaagcgaccgcttgtcttctttcattgtgataacagatctgctgtcaacattctttcgtttaacccatcgtttgggtcctgattatcattgcaatctactgtattggtagattttgaggtgtggcgccttctgatatgattg

SEQ ID NO: 143066 - DNA, 98 bp, Zea Mays
cagacgcgggagaagaaaaggcgcgttcagtcgtatgtgtcttccgaacaagcgtgtgttggatcttttatgggcttggcccatttattgaataaact

SEQ ID NO: 143067 - DNA, 291 bp, Zea Mays
gtgaaacaagtttaaattcggcaattagaatttgaaaatggaaatagaaaataaatgggatggaaagaaaaataatattaatgcaaatagtggatgttatatcttcattagggatgagttttatatttgtaaattgaaagttcaaaacatgaatttgaatttggtttggacaattcaaattggaaatagagaaaagaaaataaaaatagaaaaaagggaattggaaaagaatatacattacaaaaaaatagatataaataagttacaattcatcatgctagcactttatat

SEQ ID NO: 143068 - DNA, 2094 bp, Zea Mays
ctacacaagtacacaacccgcccattgcattgcatcttcctcctctcccttgctcttccacttcgttgcgcccatccgtctctcgtctcgtgctcccatcgtcgacccatcacacatccacacacaagctaccctacgacgtatacagagaggaaaaagactagtggtacggccgtcgctagctcgactagtgatccgatccatcgatggaggcagcagacgcatcgtcagcgccgccgcctgcggaaggccgggtggtgtgggtgaacgggcccatcgtggtgggcgcggggccggggggcctgtcggtggcggcgtgcctgcgggcgcgcggtgttccgtgcgtggtgctcgaccgcgccgactgcatcgcgtcgctctggcagcgccgcacctacgaccgcctccgcctgcacctgccgcgccagttctgcgagctccccgggatgcccttccccgaccactacccggagtaccccaccaagcgccagttcgtcgactacctccaggcctacgccgagcgcgcgggcgtccagccgcgcttcaaccaggccgtcacgtccgcgcgctacgaccgggccgcggggctctggcgcgtgcgcgccgccgacgctctcgccgacgacgacgtcgccagcgccgcctccaccgagtacatcggccgctggctcgtcgtcgccacgggcgagaacgccgagcgcatcgtgcccgagttcgacggcgcccaggacttcgccggccccgtctcccacgtctccgagtacaagtgcggcgaggcgtaccgcggcaagcgcgtgctcgtcgtcggctgcggaaactccggcatggaggtctgcctcgacctctgcgaccacaatgccctcccgtccatggtcgtcagggacgcggtgcacgtcctgccccgggagatgttcggcgtcgccaccttctccgtcgccgtcttcctgctccgcttcctgccgctctggctggtggacgccgtcctcgtcctgctcgcgcgcctcttcctcggcgacctggagaagctcggcatccggcgccccgccgggggccctctcgagctcaagaacgccaggggcaggacccccgtgctggacatcggcgccctcgccaggatccgctccggccacatacaggtcgtgccgggcatcaagaggttcttccgtggcggcgccgagctcgtcgacggccgccgcgtcgctgcggacgcggtcatactcgccaccggctaccacagcaacgtccctcagtggctcaagggaagtgatttcttcacgcaggaagggtacccaagggtgccgttcccacacggctggaagggggagtccgggctctactctgttggcttcaccaggagaggcctctccggcgtttcctccgacgctgtgaaggttgcgcaggacatcgccgtggaatgggagaagcaaacctccacaagatgatgacgattgacgacgatgatgacgacgacgatggatgcccatcaacttaccagctcactcatgaccatcgttgacctctcatgcatggacctgctacgacgaccaacagatcgataccttgccatcatgcatagcatgttcagcaaaaagtgcaaaaacttgagatgatgtggccaagagttgccccaagctcaaatccagaaaccaaaagaaacagaggagaagcgcgcgtcgggatccagatcaaggctccgaaaactggagagcgaagcgagcctcctcgacgcttgggcgacaggaagaaggccggactgtgcgcgcgtcatgcagagcccagattttgctgtaccccatgggcccttatatacatgcgtagctatgtacagagtgtttttatgtagcaaagttgtgtacagtagtagcagtgcctctctagtgggttggtagagtgttagcgttgacatgcttgtgtgtttgtgtgccatcgtcgtgatgtctatgtatggagttgacaacgagaaatgacctattctatttaatttttgttcgttattacaagtaacagctccaagctaattaagttgcgccttttctgttctgtccgggccatgcttccgcgcgcgctattcgcaaacagggaaaaaaaaggaaa

SEQ ID NO: 143069 - DNA, 1414 bp, Zea Mays
ctcccagccatctccacttcttctccccacgccatcctccttcctgctcctcacgcacaccagtggagggcctcccatggcgtctcctcccctttcctcaagtcagccaccctagcttccactcctctcgccaccagccattttccagcagcctctcttctcccacacggcagcagcttctccctcacgccaacagcagggagcaggagcttttcctcccatggccggcctcccttctccccctcggctccttcctccaggccgagctcctatgtcaggaacggctgatccacttgaccgctgctccatttttccctcgcctctgctctctcggctgctgtcagccatggcgtgacgcctctgctccttctctcttccccacaaaacaaccagcgcgcaggagcttctccttcatggacgctgaccaggctggtccctcgcccccttctctccccttgtccgcgaccttctctgcccgcgcgcaaagccgctgaccggagcgcggcatggcagcgccgccctttcgtggatgaagctagtgcccctttcagcttctccactgcagcaggccgggcatccccatgcctgcgccttccctctcttgccgtgccttccccatggtcaggatcagcggcagaagtcgtgtgctacctgttagatgatatgggcagcaaccacgcttcgcagctccttgcaacagcaatcaatccctgccgcatgccacctgctcgatatattacgcagccacatcgtcgttgccctttctcgcagcacgccgttgttggttctaggtgctgctacctacatccctcgcactcaccttgctcgacaaaaatgcctccccgttcgttgacctcgggtggctgcacacttgttgtcgctgccccttgtccgtcaacgcgcagcccctctgtttccccattggcgcagcagccccgacgtctccgcgctctgtcggctcgctgttttgtgaagccagtggacagcacgccgtcgacgctcgctgggtgtttgctgtttttgcgcagccccatccgcgacgtcgtcgaaacccctagtggtcgacgccgcgcttcgcgccttgctcgttcgatgaaataccgagccatgtggacagcccatgcgtctagtcacgacccgttcaggttgattgatttatagtttataatacatatgctttggttgatgtcggacgatgcatgtatatatgtggatgtgtgtaatatgtttcggcaatacacgttagtaggatcacatttgcggttaaagaacaagtggttgttgaggtgtgcgatttgtagtttgtctaattacgttttgggtcgatgtggtgtatagtggtgtctgattagatgtgggcataaaatgtttggattatatgccgtggcaaggtcgcattcacgttttggtaaac

SEQ ID NO: 143070 - DNA, 1996 bp, Zea Mays
acacgaacacaacagcacagcctctctctcctctactagacttgttttttccgttcatccatccatacgtttcgtttgttccacctgcgcaactgcgacggggataagtacgtcttccagatgacgacggcggcatggccgcggccacgcttcctcgtcctcccccagcctggattcctccgctcggtctgccacggcctctgcgcccgctgtctcttctgcttcctgctgctcctcgccttcgcctgcagctccagctccggacgggtggtggtcaccagcttgcctggcttcgacggcgacctccccttccacctcgaaacagggtacgtggaggtggaggaggacgccggcgtggagctcttctactacttcgtccaggccgagtccggcgccgccgccgccgccgatgacacccctttcctcttctggctcaccggcggcgaccgctgctccgtcttcagcggcctcgcctacgagatcggtcccatcagattcgtcctggaaccctacaacggcaccctgccgcgcctgcgatacaaccacaactcgtggtcaaaggtgtcacatatcctcttcgtcgattcaccggttggagctggattttccttctcgagagatcccaaaggctacgatgtcggagacatctcggcctcactgcagctacaggaattcctcatcaagtggttcagtgatcatcccgagtacctcgcgaatcctttctacattggcggggactcctatgtcggaaaaatcgtgccgttcctcgggcagatgatttcagaaggtattgaacttggaagaagacccttccctaacctcaaggtatgtccatcatacatttctctccggaatggaagatgctatatcgacgtgggatactagctagtctatatccaagaaattaattgtagtcggtcacttaggctgatgatatgcaggttctgaatttgtcatgatcagggctatctggtgggtaacccaatcacgggcgaaagtatagatttcacttccagagtgccctacgctcatggagtcggtatcatatcagatcaattgtatgagacgatattggggcattgccaaggagaggactacactagtcctgcaaacgctctgtgtgctcaggctctggacactttcaacaatctcatcaacgaagtccagaacgcccagatcttactggacacgtgcgtctacgcgtctcctgcgccaaacgttctcagcagaccggtggacggtggtagaaggatcctgagggcggcggggatgggaggaggggcgacgctgaaccatccgccagctcgtcctcggtttggctgcatcacctacggctactacctgtcgtatttctgggcgaacgatgaacgcactcgaacagctcttgggatcaagaagggaacagtggacgagtgggtgaggtgtcacgacgcagacctgccgtacacgatcgacctcaagagcgccatcaagtaccaccggaacctgacgtccagaggctaccgcgccctggtgtacagcggcgaccatgacctgctggtgccacacctgggcacccaggcatgggtcaggtccctcaacttccccgtcgtcgacgactggagggcgtggcatctcggtggccaagccgccgggttcacgataaattactcaaacaacatgacgttcgcgacgatcaaaggtggcgggcacacggcgccggagtacgagccggagaggtgtttcgccatgttcagccgctggatactcgaccgtccactctaatctccactcgtacattgccggattcttgcaccatgaccatgattgatggactgtgtggattgcagttcataggtggaataaaatggatgatttctgtgaatggataggtctgccaactaggcaactttgtgtaaattaactaggtctgtgtcagcgcgctttaacgtaatatatgcggggataaatcgtgcaaatccagccaccaagattttaggaatgcggtggttcattc

SEQ ID NO: 143071 - DNA, 2021 bp, Zea Mays
acacgaacacaacagcacagcctctctctcctctactagacttgttttttccgttcatccatccatacgtttcgtttgttccacctgcgcaactgcgacggggataagtacgtcttccagatgacgacggcggcatggccgcggccacgcttcctcgtcctcccccagcctggattcctccgctcggtctgccacggcctctgcgcccgctgtctcttctgcttcctgctgctcctcgccttcgcctgcagctccagctccggacgggtggtggtcaccagcttgcctggcttcgacggcgacctccccttccacctcgaaacagggtgcgcgtgcccgcgtggcgtgtctactagtagtatcctccttcttcttcttcattcattcatcctggtggtgtactactagactactactagtagctcacgcgcgcggcacatgtagatgtagcctctaaccaccgttgctgccctgaaactcaaaacgaaggtacgtggaggtggaggaggacgccggcgtggagctcttctactacttcgtccaggccgagtccggcgccgccgccgccgccgatgacacccctttcctcttctggctcaccggcggcgaccgctgctccgtcttcagcggcctcgcctacgagatcggtcccatcagattcgtcctggaaccctacaacggcaccctgccgcgcctgcgatacaaccacaactcgtggtcaaaggtgtcacatatcctcttcgtcgattcaccggttggagctggattttccttctcgagagatcccaaaggctacgatgtcggagacatctcggcctcactgcagctacaggaattcctcatcaagtggttcagtgatcatcccgagtacctcgcgaatcctttctacattggcggggactcctatgtcggaaaaatcgtgccgttcctcgggcagatgatttcagaaggtattgaacttggaagaagacccttccctaacctcaagggctatctggtgggtaacccaatcacgggcgaaagtatagatttcacttccagagtgccctacgctcatggagtcggtatcatatcagatcaattgtatgagacgatattggggcattgccaaggagaggactacactagtcctgcaaacgctctgtgtgctcaggctctggacactttcaacaatctcatcaacgaagtccagaacgcccagatcttactggacacgtgcgtctacgcgtctcctgcgccaaacgttctcagcagaccggtggacggtggtagaaggatcctgagggcggcggggatgggaggaggggcgacgctgaaccatccgccagctcgtcctcggtttggctgcatcacctacggctactacctgtcgtatttctgggcgaacgatgaacgcactcgaacagctcttgggatcaagaagggaacagtggacgagtgggtgaggtgtcacgacgcagacctgccgtacacgatcgacctcaagagcgccatcaagtaccaccggaacctgacgtccagaggctaccgcgccctggtgtacagcggcgaccatgacctgctggtgccacacctgggcacccaggcatgggtcaggtccctcaacttccccgtcgtcgacgactggagggcgtggcatctcggtggccaagccgccgggttcacgataaattactcaaacaacatgacgttcgcgacgatcaaaggtggcgggcacacggcgccggagtacgagccggagaggtgtttcgccatgttcagccgctggatactcgaccgtccactctaatctccactcgtacattgccggattcttgcaccatgaccatgattgatggactgtgtggattgcagttcataggtggaataaaatggatgatttctgtgaatggataggtctgccaactaggcaactttgtgtaaattaactaggtctgtgtcagcgcgctttaacgtaatatatgcggggataaatcgtgcaaatccagccaccaagattttaggaatgcggtggttcattc

SEQ ID NO: 143072 - DNA, 1858 bp, Zea Mays
acacgaacacaacagcacagcctctctctcctctactagacttgttttttccgttcatccatccatacgtttcgtttgttccacctgcgcaactgcgacggggataagtacgtcttccagatgacgacggcggcatggccgcggccacgcttcctcgtcctcccccagcctggattcctccgctcggtctgccacggcctctgcgcccgctgtctcttctgcttcctgctgctcctcgccttcgcctgcagctccagctccggacgggtggtggtcaccagcttgcctggcttcgacggcgacctccccttccacctcgaaacagggtacgtggaggtggaggaggacgccggcgtggagctcttctactacttcgtccaggccgagtccggcgccgccgccgccgccgatgacacccctttcctcttctggctcaccggcggcgaccgctgctccgtcttcagcggcctcgcctacgagatcggtcccatcagattcgtcctggaaccctacaacggcaccctgccgcgcctgcgatacaaccacaactcgtggtcaaaggtgtcacatatcctcttcgtcgattcaccggttggagctggattttccttctcgagagatcccaaaggctacgatgtcggagacatctcggcctcactgcagctacaggaattcctcatcaagtggttcagtgatcatcccgagtacctcgcgaatcctttctacattggcggggactcctatgtcggaaaaatcgtgccgttcctcgggcagatgatttcagaaggtattgaacttggaagaagacccttccctaacctcaagggctatctggtgggtaacccaatcacgggcgaaagtatagatttcacttccagagtgccctacgctcatggagtcggtatcatatcagatcaattgtatgagacgatattggggcattgccaaggagaggactacactagtcctgcaaacgctctgtgtgctcaggctctggacactttcaacaatctcatcaacgaagtccagaacgcccagatcttactggacacgtgcgtctacgcgtctcctgcgccaaacgttctcagcagaccggtggacggtggtagaaggatcctgagggcggcggggatgggaggaggggcgacgctgaaccatccgccagctcgtcctcggtttggctgcatcacctacggctactacctgtcgtatttctgggcgaacgatgaacgcactcgaacagctcttgggatcaagaagggaacagtggacgagtgggtgaggtgtcacgacgcagacctgccgtacacgatcgacctcaagagcgccatcaagtaccaccggaacctgacgtccagaggctaccgcgccctggtgtacagcggcgaccatgacctgctggtgccacacctgggcacccaggcatgggtcaggtccctcaacttccccgtcgtcgacgactggagggcgtggcatctcggtggccaagccgccgggttcacgataaattactcaaacaacatgacgttcgcgacgatcaaaggtggcgggcacacggcgccggagtacgagccggagaggtgtttcgccatgttcagccgctggatactcgaccgtccactctaatctccactcgtacattgccggattcttgcaccatgaccatgattgatggactgtgtggattgcagttcataggtggaataaaatggatgatttctgtgaatggataggtctgccaactaggcaactttgtgtaaattaactaggtctgtgtcagcgcgctttaacgtaatatatgcggggataaatcgtgcaaatccagccaccaagattttaggaatgcggtggttcattc

SEQ ID NO: 143073 - DNA, 1897 bp, Zea Mays
acacgaacacaacagcacagcctctctctcctctactagacttgttttttccgttcatccatccatacgtttcgtttgttccacctgcgcaactgcgacggggataagtacgtcttccagatgacgacggcggcatggccgcggccacgcttcctcgtcctcccccagcctggattcctccgctcggtctgccacggcctctgcgcccgctgtctcttctgcttcctgctgctcctcgccttcgcctgcagctccagctccggacgggtggtggtcaccagcttgcctggcttcgacggcgacctccccttccacctcgaaacagggtacgtggaggtggaggaggacgccggcgtggagctcttctactacttcgtccaggccgagtccggcgccgccgccgccgccgatgacacccctttcctcttctggctcaccggcggcgaccgctgctccgtcttcagcggcctcgcctacgagatcggtcccatcagattcgtcctggaaccctacaacggcaccctgccgcgcctgcgatacaaccacaactcgtggtcaaaggtgtcacatatcctcttcgtcgattcaccggttggagctggattttccttctcgagagatcccaaaggctacgatgtcggagacatctcggcctcactgcagctacaggaattcctcatcaagtggttcagtgatcatcccgagtacctcgcgaatcctttctacattggcggggactcctatgtcggaaaaatcgtgccgttcctcgggcagatgatttcagaaggtattgaacttggaagaagacccttccctaacctcaagggctatctggtgggtaacccaatcacgggcgaaagtatagatttcacttccagagtgccctacgctcatggagtcggtatcatatcagatcaattgtatgagacgatattggggcattgccaaggagaggactacactagtcctgcaaacgctctgtgtgctcaggctctggacactttcaacaatctcatcaacgaagtccagaacgcccagatcttactggacacgtgcgtctacgcgtctcctgcgccaaacgttctcagcagaccggtggacggtggtagaaggatcctgagggcggcggggatgggaggaggggcgacgctgaaccatccgccagctcgtcctcggtttggctgcatcacctacggctactacctgtcgtatttctgggcgaacgatgaacgcactcgaacagctcttgggatcaagaaggctaatttaaagcaaagcgatccatgaactggtggtcagggaacagtggacgagtgggtgaggtgtcacgacgcagacctgccgtacacgatcgacctcaagagcgccatcaagtaccaccggaacctgacgtccagaggctaccgcgccctggtgtacagcggcgaccatgacctgctggtgccacacctgggcacccaggcatgggtcaggtccctcaacttccccgtcgtcgacgactggagggcgtggcatctcggtggccaagccgccgggttcacgataaattactcaaacaacatgacgttcgcgacgatcaaaggtggcgggcacacggcgccggagtacgagccggagaggtgtttcgccatgttcagccgctggatactcgaccgtccactctaatctccactcgtacattgccggattcttgcaccatgaccatgattgatggactgtgtggattgcagttcataggtggaataaaatggatgatttctgtgaatggataggtctgccaactaggcaactttgtgtaaattaactaggtctgtgtcagcgcgctttaacgtaatatatgcggggataaatcgtgcaaatccagccaccaagattttaggaatgcggtggttcattc

SEQ ID NO: 143074 - DNA, 2013 bp, Zea Mays
acacgaacacaacagcacagcctctctctcctctactagacttgttttttccgttcatccatccatacgtttcgtttgttccacctgcgcaactgcgacggggataagtacgtcttccagatgacgacggcggcatggccgcggccacgcttcctcgtcctcccccagcctggattcctccgctcggtctgccacggcctctgcgcccgctgtctcttctgcttcctgctgctcctcgccttcgcctgcagctccagctccggacgggtggtggtcaccagcttgcctggcttcgacggcgacctccccttccacctcgaaacagggtgcgcgtgcccgcgtggcgtgtctactagtagtatcctccttcttcttcttcattcattcatcctggtggtgtactactagactactactagtagctcacgcgcgcggcacatgtagatgtagcctctaaccaccgttgctgccctgaaactcaaaacgaaggtacgtggaggtggaggaggacgccggcgtggagctcttctactacttcgtccaggccgagtccggcgccgccgccgccgccgatgacacccctttcctcttctggctcaccggcggcgaccgctgctccgtcttcagcggcctcgcctacgagatcggtcccatcagattcgtcctggaaccctacaacggcaccctgccgcgcctgcgatacaaccacaactcgtggtcaaaggtgtcacatatcctcttcgtcgattcaccggttggagctggattttccttctcgagagatcccaaaggctacgatgtcggagacatctcggcctcactgcagctacaggaattcctcatcaagtgatcatcccgagtacctcgcgaatcctttctacattggcggggactcctatgtcggaaaaatcgtgccgttcctcgggcagatgatttcagaaggtattgaacttggaagaagacccttccctaacctcaagggctatctggtgggtaacccaatcacgggcgaaagtatagatttcacttccagagtgccctacgctcatggagtcggtatcatatcagatcaattgtatgagacgatattggggcattgccaaggagaggactacactagtcctgcaaacgctctgtgtgctcaggctctggacactttcaacaatctcatcaacgaagtccagaacgcccagatcttactggacacgtgcgtctacgcgtctcctgcgccaaacgttctcagcagaccggtggacggtggtagaaggatcctgagggcggcggggatgggaggaggggcgacgctgaaccatccgccagctcgtcctcggtttggctgcatcacctacggctactacctgtcgtatttctgggcgaacgatgaacgcactcgaacagctcttgggatcaagaagggaacagtggacgagtgggtgaggtgtcacgacgcagacctgccgtacacgatcgacctcaagagcgccatcaagtaccaccggaacctgacgtccagaggctaccgcgccctggtgtacagcggcgaccatgacctgctggtgccacacctgggcacccaggcatgggtcaggtccctcaacttccccgtcgtcgacgactggagggcgtggcatctcggtggccaagccgccgggttcacgataaattactcaaacaacatgacgttcgcgacgatcaaaggtggcgggcacacggcgccggagtacgagccggagaggtgtttcgccatgttcagccgctggatactcgaccgtccactctaatctccactcgtacattgccggattcttgcaccatgaccatgattgatggactgtgtggattgcagttcataggtggaataaaatggatgatttctgtgaatggataggtctgccaactaggcaactttgtgtaaattaactaggtctgtgtcagcgcgctttaacgtaatatatgcggggataaatcgtgcaaatccagccaccaagattttaggaatgcggtggttcattc

SEQ ID NO: 143075 - DNA, 207 bp, Zea Mays
acaaccgctgtgctcgcgggataaacaaaaaaacatatggacgaataaacaaatcagtcaaaaaacaaaaaaaaatatggataagaaataaatctagacggacaaatcagcgacataaacgaaaaatctggacaacaaaaaataaattagtgacaaagacaaaaaatattaaatgcccatcgtagggcttgaacccacgaccacaag

SEQ ID NO: 143076 - DNA, 1503 bp, Zea Mays
atggcagtggccggggcaattgttggcgctggcgcaggcggttggatgaatgaccggttcgggcggcgaccgtcgatcctcatcgctgacctgctcttcctggctggctctatcgtcatggcttttgcgcctacgcccgcggtcatcatcgtgggcagagtcctggtcggccttggcgtcgggatggcctccatgacgtcgccgctctacatctccgaggcgtcgccggcgaggatccggggcgcgctggtcagcaccaatgggttgctcatcacggcggggcagttcctctcctacctcataaacctggccttcaccaaggtgagcgggacgtggcgatggatgctcggggtggccggcctaccagcgctcctccagttcgtgctcatgctggcgctgccggagtcaccgcggtggctctacaggaaggaccgaaaaagggaggccgaggagatcatgcgcaaggtgtacccgccggaggaggttgagggggagattgaggcgctgcgtacgtcggtggaggacgacatggcccaggaacggtccctcggcggcgcggggctcgccggcacactcaggaaggcgttcggcagcgtggtggttcggcgcggcctcactgcgggcgtgctttgccaggtggcgcagcagttcgtcggcatcaacaccgtcatgtactacagcccgaccatcgtgcagctcgccgggttcgcgtccaacagcacggcgatggcgctgtcgctcgtcacctcgggactcaacgccgccgggtccttggtgagcatgttcttcgtcgacaaggcgggacggcggaggctgatgctgctcagcctcatgggcgtcgtcgtgtgtctcggtatgctgagcggggtcttcttcgcggtggacagccatgcgccggacgtcagtctggccgggacagcgctcttcggcgccaacggcacgtgcccagagtttgacctcgccgccgtggccggggtggagtggacctgcgcccagtgcatcaaggctccctcaggctgtggcttctgcgcggacaccgaaaagctcctgcccggcgcctgccttaggacgtcggacgcgtcgcggcgcgcgtgtcgggcggggcggcgcgagtggtacatgcggggttgcccgagctcatttggctggctggcgctggtggcgctgggcgcgtacatcgtgtcctactccccgggcatgggcagcgtgccgtggctcatcaactcggaggtgtacccactccggttccggggcgtctgcggcggcatcgcggcggtggccaactggacgtccaacctgctggtgacgcagacgtttctcagcctcacacaggcgctggggacagcgggcacgttcctgctcttttgtggtgtgtcggcgatggcgttcctgctcatattccttctggtgccggagactaaggggatgcacttcgaggaggtagagcaaatgctagggagcaaggactacaaggcctggaagaagttcaattccaaggcctaa

SEQ ID NO: 143077 - DNA, 2186 bp, Zea Mays
tgcttctcctccccgctcgctctcccccgcgctgtactttctcttcggcgaaaaccccacaaccaccgaccagagatggccgcggtgaaaccccaaccccatttctcgccgcacgccaccttctccgcgcccgatgccggacctgccgacaccggtttcgccgtcttccgcctcctcctgccctcgtccttctccgacgccgacaccatgcgcctctacgccgccgtcaacccgttgcgccgccgcactgccacgctgcaggtccgcgtcgagcccctcgaccccgcctccgcgggcggccgtgtcgtcgccgccatagttggccccaccgtccccgtccgccgcgtcgaggcctcgtcctcgtccgcggagcccctcgcgctctcgccggcgcaggaggcgctagtcgccgtgattgataccgagggcgcgctctgctgcgcagtcgagaaggaggctcgcggcaaggcccgtcccgggtgcatcacgtgcctgctcctggtcgatgctgaccggctcgaagcttcgaccgggagaggcgtcatggagaggatcgccctggaggccggcgccgacgtgcgcgtcgcgatgtgggaggagggcgcgcagccgccacgggggcagccgcttgaggaggttgtcgagataactggagatagaacagctgtaaggaaagctctagttgctttgtctagctttcttcaaggtgaccttccaatcggtaactcaacaacttatgttaagaaagaaggttcaatactcccatgggcatcttcagaagtacctgggcctaatatgggggcttcgtgctcagaggcatccacagagtttgcacaaggcagtgttgctaagactcattgtccagaaggtaatacaggagatgctcaaagtaaaactcttcagcaagtttcattcaggcttctcttgcctacctatcttgctggaggtttgattggcaagaagggcttgattatcaaaggcattgaagttgaaactggtgcttgtattgatgttggtgcacctgtcgctggttgcaaggaacgtgtaataacaatttgcgccctagagagcccagactcggaatatcatatagtgcaaagtgcactacttctcatatttgacaggatgatggagatggaaaccaatacacactcaacatttgagaaagcatctcaattcttggtcagagtccttgtgctcaaaaaccagtttggctgtttagttggtttgggtggttctataatcaaggaaatggtgaatacaacaggagcaagaattcaaatattggacgatacagaaattccggcttgtgcctctacctttgaactagttgtacagatcactggggagctaatgaatataaggaatgctttatcccttgttttctggaaacttcgtaaccatattttctccaatgaaaccgactacaacaattcccatatttcctcttcagaaattgctgaatcaaatgcaaccagccaggcgaatatttattcaacaatccaatattcagtggacaatggccataaggttgatcatagatcccctctcagttatggagtggactctgtggaaaagtctttcagtgatttagagctcagttcttcagaaattcagaaacctgataacgggaatggtgtcaggatcaacaattcagatagcgggattcagaaccctagtgactggaatggcattgtaaccaataacttaaatgatggaattatttcttcagatgaaaacaatcttgtgaggggagctgagcatgctgcgataacaagaatcacatacgagactgctgtttctgggagtatcctaactcttgtttatggtgataatgggagcaacctggccaagcttacagaggtatctggtgctgacattatcgtctacaatccaccttccgagggcaacgaagctatgatcgtggtttctggaccaccggatcaggcacaatcagctcagcgcctactcgtcgagttgatcctacagggacaccccggcacctgcctttctgcttaatacggcagataaccttgtcgtgaaatatacaacgatggttgacgtgcagactgttagctggggaactgaattttatgactcgaactgcgtggggaatatggagtttgaaccatgtgattgatacgttgtgtacctttatctatacgtagtacttatcctgtgcccaa

SEQ ID NO: 143078 - DNA, 3409 bp, Zea Mays
agcagcagcaagcaggccagcagcagcagcagcaagcagcagagcgcgccctgttcttgtgccgaggaattatttattgccaccgcatcgagatttatatagtacggggaaattgattgctcattcccctctgcttcctccatccactgatccaccccatgctgcgatattttcctccactcgccgccggggcagcatttgctcgcgatttataacctcccctcgccttcgcctctcctttctgcttgtctttttccccagtggggaggttagcacccggcacaagcaaagcgccgggttcttgtcgcagtttctgcgcgctcgctcgctttttgcccgtaagatctgatacaaagaggagagggagagccaagagaggagaggttctcgtgtggaattcttcggcgatgaggtccgacgcccgtctggattcggtggtcttccagctcacccccacccggaccaggttcgatttggttctgatagcgaatggccggaaggagaagtttgcatctggtttgctgaaaccgttcgtcgctcacttgaaggccgcccaggatcagattgccaagggagggtactcgatcacacttgaaccaagctcagggttcgatgtgccatggtttacgagaggcaccgtggagagatttgtgcgtttcgtgagtactccggaggtccttgagcgagtcagaacactggagtctgagatcctgcagctcgaggatgccattgctatccagagcaacgatagtcttggattaaaatctgtcgaagaccatggaagaaagttgactgaaagcaatggaggtggacgtgcaaattatgatcctgattcagccacagcaattgttgtctacaagcctggatcaaatccaacgccacaaattcagaatgaaacagcagcacatgaggagaattcaaaagttcaattgctcagagtgcttgaaacccgcaaaactatgttaagaaaagagcaggctatggctttcgctcgtgctgtagctgctgggtttgacattgacaacttgggttacttgatcgcatttgcagagcgctttggtgctgcacgtctgatgaaggcatgttcacatttcatcgaactgtggaagcagaagcatgaaactggacaatggattgaagttgaacctgaagcaatgtctacacgctctgaatttcctccatttaacgcatctggcattgtgttcatgggagacaacatgaagccaaacttggaatcaggctccattaatggagaggcaaatggcgaggatggagctaaagctgatcagaagtccagccagcagatgggatctcatgctgcatatcctccatgggcaatgcatcctccatctggtgcagttgtttacccaccttatcctatgcaaggcatgcctttttatcctggggtgaatccatactaccctccatatcctccagtggatgatcccaggtaccactactcaggaaggaaatcttcgaggaagcactcctcggatagtaaggactcagaaactcttgacgttgaaagtgaccattgcagttcagatagaggaagttctcatggtcgcaagtcacatagaaaggggaagaggtccggaaagaaaaaacctagtgtggttgttatcaagaatgtgaatgtaacatctaaaaagcatggctcatcagagagcgaatcacaatcaagttctgaagttgagtctgcggacagtgacaattcacactccaaatcaagtgaaaggaagcataaaagctcaagttcaaagaaaaaggagggtaggagaactacttttgcctccggagatgaatatagcaaggatgaaatgtcaaatggccacgatgctgagcaaggaaactggagcgcattccaaaatttcttgttgagagcagaagaaaaaacaagatctagtgatgcagacctgtttgctggtgagaaagaacccccatcaaggagaaaacagaatgtaaacacagcagatcctattcttttagctgagagagatggtggcattgtccatgagcggaacatagtaggttttgattcagccaatgggaggactagagctatccgggtcatgtccaatgatgaacttgttatgtctggagaagggaggaactatatgcatagtgaaataaaggagattgaagctggtggaggaaggtacaggagagggacaggtgatgactacatggtttatggtcagggaagtcagatagccagacatagtttgttggatcctcttgcagaggcccagtacaagaatcctgttcagcaggacaagaataggaatggtgtggcggacgagtcctttatgatccctcttaggtccagcttacatgataatatcggagcagaaagcagaactactattgacatagatgttgagcttccttctagaattcataaagcatcagatgaaaaggctggacatcagcttttttacgaacctgacgaattggtgccagagcgtggatctgaagatgtttcatttggatatgatccagcaatggattatgatagccacatgcagactactgtgaaggtggaagatgaaaaaacagaggatgacttgccagttgctgacaatgatgtacagaaggtagagaaagagaagctaaggaatgcaaaggatggttcagataaacgaaggaaagatgccttattgaggaggttatcggcgccaaggaccccactgaatgatgcacaaaaacgtgcacagaacctgcgtgcatataaggcagaccttcagaaactgaagaaagaacaggaagaagagcaaataaagcgattggagaggctcaaattggagcggcaaaagaggatcgccgcaagaggtaatggaaagggtccagggaatggttctcctaaagcgaatggtacgaatggactcagtaaatcagttccaaccttcactgggttgaaaaaggagaaaaatggaacaactgaatcactcagcgatcgactgaagaggctttctgaacccaaaagcattgctggggcagagcattccttgaatccaaagtcaactggcgcagaccattcacgaagaagaagcatggcgtgagacggagaaccgagcatcttgaatccatcgtaccactcgctagctcagcaaccatgaatggcatatcaaaaggcttcttgtacagaaagaggaaatggctggcgctgtagcactgcctgcttccaagatttgtgatggaaaatcaagttaccttttcaatggcatggcgttgtacttccaattttaacataattatttcattcttttattgaggatggcttgtaatagctgtaaacctggatttttcggcgacgcggagctatattttggtttttggctgtatttatggaatggattgatcgttgtttgagatatattgtggtatttatacagtgtataaatgtcaa

SEQ ID NO: 143079 - DNA, 747 bp, Zea Mays
atttgtgcgtgcacacccactcctgagaatgctaatgtacgtgaccttgaactccccattgcacgtgcccttctgaataccatatgattaagtacctttcggcatgttaatttcatctccaaaagttcttatacgaggccgcagcaacttggattatatatccctagtcgtcgtccacggcgggtgcggtcgccgacgccgacgccgccacctcctccggcgcggccgcggtggtgtccttggccgcggcgctaccgctcccctcggagcttcccttgtttttccggcggttggacttcttgggaacggcggggaggtcctggcatgtgcccgaggcgtcgtcgccggccgacttgtcctgcttcttgcggttctttcgggtttgcaacaagaggaggatgaagatcgaagaccagcaagagctgtatatatttgtgagtggcgaagacaaccttgagaagcccagggatttgcagcagccgtgcccccactctcactcctaaaagaggacgagtcaagcggtgccgagtggtaatccttcatctgtcaaaaccaaccttttctcgtcatgctacaatatccactacattacgatggatttttttttacataatatatgctacatgcatggacataactattatgaattgtcttcatgtcgacaaggaagacattgttaaaaatcaagtagaacacatgcatgcataaagattgtttgcatatatgtaacatttttcttttgctcaa

SEQ ID NO: 143080 - DNA, 2315 bp, Zea Mays
cggcttgttcgctgcggcttgctgcggctgcaatccggctgcggctgcggcttctacagtatttttctctctatggattgcagctgcagcagtccaaacagctgcaacagtgtcggcttgcagccaaccgaacacgccctcagtctcgtctcgccttcaatttcccatccatttctcccttcccttccttcccgacccgaaccaccgcgcattaaaatctgccccctcctgccactgccagcgaccaatccaatccctacctgctcgggaaccacccgtcgggctcctcccgcccccctcgccgcatctgcatgcggcggggatctccgggctcgctccgtcaccggagccccaatcaccgccacctcatccaagcccccgaatcccccgggcgcgcagcacaaccttgccgcgatcgcgcgcgggaaccgccgctgattgggtcgtgaaagctcgattttgggcgattttgattcggagaacccgccgtcattcgattttggcgcgcgttgcgagccgggatggggttgcagcagtccaaagaggaactgctgtaccagcaggtcaactacggcaacgtcgacgggattcgcacgctccgggggcaaggcgctggtctcgagtggattgacaaggaagggaagacgcccctgatgcttgcctgtatgcgcccggatctgttcgacgtggccaaggtgctgatcgagttgggagctaatgtgaatgcctacaggcctgggtcacactgtgggacagcattgcaccatgctgccaagaaaggacttcagcagactgtccatttactactctcacatggagctaatccgttcataccaaacgatgattgcaatactgccctcgaattggcaagagaaaagggtcatgtgaatgttgttcgtgccatagagggacggctttgtcttttttgtggatggatgagagagaactatgctcctgcttttttggatgcaattgctccacagttcatgacaagaaaaatttgggctgttgttttaccccgtgaagtgcgaactccaaccaggcctcttaagttagagatagctatatatcctgaattacaggcttctaaaccacgttctgtacttaaactatggaaatgtcaaattgagcaaccaaagcttaatcaggctgacccttccattatcatttttgacaaaggaacaaagactagatacaagatcttaccggcctatgaaggtgacaaacagcagcttcaatggttttataatgcatgttgtggcatggcacaggttttgaacacggctccagtagcaccagcaaatctccctatgccaaatccagcaccggcaatttcatctgtggcgccttcagaacaatctgcacccagcaaggaggatgttgaattagcaatggctatcaatgcctccattcaatcagctattgcagagggagtatcagtgcccaatgttcaaccaaatgcatccacccccaacaacaatggctgggctgcccctccaagtaattctcacaacggatggggaccaccagccactcctgcaccatcaaagacgagcggtcagtcccaggtccgggtagacgccccaagcagcagcacttacaatggatgggatgtgcccggaacaagctctagtcaaagttcatcgaaaccccaccaaacccaaaccaaccctccagtcttgattccacaggaagcacttcaggctctcccaaccccaaccgcgccaccatttgctgaagaaaccttctacaacggtcctgttcactatccatccatagactctacgcctgtcgatgtaaccatgccggctaccactggaggcggtagtacaacagtcatcgcaacggcagcacctacagaacagttagaaaatgaagctgatgcaagtgacagcggcaaaactccctctggtacttgcgttatatgtctggatgcccctgtggaaggcgcctgcatcccgtgcggccacatggctggttgcatgtcctgtttgaaggatatagaatccaagaagtggggatgccctatctgccgtgccacgattaaccaggttgttcgcctctatgctgtttgaggagttgaaacggtgggttcagaaagttggcaatggattggagggttctcgcaacaaatgttgatgggaacgtctctatctcaaaattgtgcaattatgctattttgcacttcgtactgcactacaaatatgacttccgtgtaatgtatgtgggctgacgcctttatgtacataggtagtactatacaagacaattttataaaaatctgggtattgttgcaagttgcaactcacgtagtc

SEQ ID NO: 143081 - DNA, 1281 bp, Zea Mays
cttcctctatacaaattattgtttgtgatattccttttcttaatgaacttgcaggcttctaaaccacgttctgtacttaaactatggaaatgtcaaattgagcaaccaaagcttaatcaggctgacccttccattatcatttttgacaaaggaacaaagactagatacaagatcttaccggcctatgaaggtgacaaacagcagcttcaatggttttataatgcatgttgtggcatggcacaggttttgaacacggctccagtagcaccagcaaatctccctatgccaaatccagcaccggcaatttcatctgtggcgccttcagaacaatctgcacccagcaaggaggatgttgaattagcaatggctatcaatgcctccattcaatcagctattgcagagggagtatcagtgcccaatgttcaaccaaatgcatccacccccaacaacaatggctgggctgcccctccaagtaattctcacaacggatggggaccaccagccactcctgcaccatcaaagacgagcggtcagtcccaggtccgggtagacgccccaagcagcagcacttacaatggatgggatgtgcccggaacaagctctagtcaaagttcatcgaaaccccaccaaacccaaaccaaccctccagtcttgattccacaggaagcacttcaggctctcccaaccccaaccgcgccaccatttgctgaagaaaccttctacaacggtcctgttcactatccatccatagactctacgcctgtcgatgtaaccatgccggctaccactggaggcggtagtacaacagtcatcgcaacggcagcacctacagaacagttagaaaatgaagctgatgcaagtgacagcggcaaaactccctctggtacttgcgttatatgtctggatgcccctgtggaaggcgcctgcatcccgtgcggccacatggctggttgcatgtcctgtttgaaggatatagaatccaagaagtggggatgccctatctgccgtgccacgattaaccaggttgttcgcctctatgctgtttgaggagttgaaacggtgggttcagaaagttggcaatggattggagggttctcgcaacaaatgttgatgggaacgtctctatctcaaaattgtgcaattatgctattttgcacttcgtactgcactacaaatatgacttccgtgtaatgtatgtgggctgacgcctttatgtacataggtagtactatacaagacaattttataaaaatctgggtattgttgcaagttgcaactcac

SEQ ID NO: 143082 - DNA, 943 bp, Zea Mays
caaactagcaagagcagcagcgttcagagtttggaaaattcagacttgagctagaaccagaggaacaccaaacacgcacgcgcccaccccccgaaacggagagaactgaccccgcagagaagatggccggcgagatgagctgggtgggcaagaagatccacctctacaacgtcaccatgggcctctacatgctcgattggtgggagcggtgcctattcagtatccttccgctgcgtctccatccggctcagtttcttcgttaatattccacttgcttgcgaatttctccgacctcgcgttgctcgacaccgtcatcagctagggctagggcttacgttagatccgcgtttgattttgggtatctctatcccgacaagacttaggttttgggtaggcatttgttcgattcgttcttggtgggaagcgttttgttttaccggccaggcaatccgtcgattttgcgcgtttcttccaatttgctgcgcgaggtttctcatccggtgttcctttccatgtacctggattttacgttcctgtgtcattgggatgttctccctttaactagagtagacatattggtgctgatcctgctctggttcgtctgcttcaatggctcccgcttcgcttccgacgtcttcgaaagccacctgaaggcgcggattttccaaggctcaaattacggcctggcaattggcacgccctcctcataggccttcagcgcaacacacagaagcagcgaaatctgctggttctggaatgttaactagttcccacaaactttagcgctgtcgtgatgtgtatgatgtggttccaatatgtaagattttttttacagttattctctttattttcttgttttgtgtttgattacacgatatcacaccctgaactctactgtaattaaaaaccattttcttggtatctcgtactgtaagtagccaca

SEQ ID NO: 143083 - DNA, 697 bp, Zea Mays
caaactagcaagagcagcagcgttcagagtttggaaaattcagacttgagctagaaccagaggaacaccaaacacgcacgcgcccaccccccgaaacggagagaactgaccccgcagagaagatggccggcgagatgagctgggtgggcaagaagatccacctctacaacgtcaccatgggcctctacatgctcgattggtgggagcggtgcctattcaacatattggtgctgatcctgctctggttcgtctgcttcaatggctcccgcttcgcttccgacgtcttcgaaaggttttgttgaaacaatcatcgttgtggtgatgatctacgaatgtattcttgctagtcaattaatcactgttttaagacattaagcgtgggtttgattgttgttatgccacctgaaggcgcggattttccaaggctcaaattacggcctggcaattggcacgccctcctcataggccttcagcgcaacacacagaagcagcgaaatctgctggttctggaatgttaactagttcccacaaactttagcgctgtcgtgatgtgtatgatgtggttccaatatgtaagattttttttacagttattctctttattttcttgttttgtgtttgattacacgatatcacaccctgaactctactgtaattaaaaaccattttcttggtatctcgtactgtaagtagccac

SEQ ID NO: 143084 - DNA, 591 bp, Zea Mays
caaactagcaagagcagcagcgttcagagtttggaaaattcagacttgagctagaaccagaggaacaccaaacacgcacgcgcccaccccccgaaacggagagaactgaccccgcagagaagatggccggcgagatgagctgggtgggcaagaagatccacctctacaacgtcaccatgggcctctacatgctcgattggtgggagcggtgcctattcaacatattggtgctgatcctgctctggttcgtctgcttcaatggctcccgcttcgcttccgacgtcttcgaaagccacctgaaggcgcggattttccaaggctcaaattacggcctggcaattggcacgccctcctcataggccttcagcgcaacacacagaagcagcgaaatctgctggttctggaatgttaactagttcccacaaactttagcgctgtcgtgatgtgtatgatgtggttccaatatgtaagattttttttacagttattctctttattttcttgttttgtgtttgattacacgatatcacaccctgaactctactgtaattaaaaaccattttcttggtatctcgtactgtaagtagccac

SEQ ID NO: 143085 - DNA, 727 bp, Zea Mays
gccttccttataaacgacaagaccaaactagcaagagcagcagcgttcagagtttggaaaattcagacttgagctagaaccagaggaacaccaaacacgcacgcgcccaccccccgaaacggagagaactgaccccgcagagaagatggccggcgagatgagctgggtgggcaagaagatccacctctacaacgtcaccatgggcctctacatgctcgattggtgggagcggtgcctattcagtatccttccgctgcgtctccatccggctcagtttcttcgttaatattccacttgcttgcgaatttctccgacctcgcgttgctcgacaccgtcatcagctagggctagggcttacgttagatccgcgtttgattttgggtatctctatcccgacaagacttaggttttgggtaggcatttgttcgattcgttcttggtgggaagcgttttgttttaccggccaggcaatccgtcgattttgcgcgtttcttccaatttgctgcgcgaggtttctcatccggtgttcctttccatgtacctggattttacgttcctgtgtcattgggatgttctccctttaactagagtagacatattggtgctgatcctgctctggttcgtctgcttcaatggctcccgcttcgcttccgacgtcttcgaaaggtatgcaaacagggtagtttacatttgtgctaacctctagtagatctgtaagttcctaaat

SEQ ID NO: 143086 - DNA, 79 bp, Zea Mays
ttctttgtttctatgcgtgcaattcatttccttttattgcacattattttcatcataaattcgtgtgcatgcagtttgt

SEQ ID NO: 143087 - DNA, 1602 bp, Zea Mays
aagctggagtaccgctgccgcacagactgcagcgcgtgcgcactgagtacgcaggcaggacgcgacgcagcgccgaagcaacaaggatggcgcccgagattcagagcctgtgtccgagtacgacggccgcgctcctcctgctggccgcctgcctcgccgccgcggtggcagcgctcgacgctgcggactacgccaggccgccgctgcctgcaggcggaggcggccggcgcgtcctcttcgccaacgggctcgggctgacgccgcagatggggtggaacagctggaaccatttccagtgcgacatcaacgaggcggtcgtccggagcaccgctgatgcgctcgtcgccatcggacttgcaaaggctggctacacgtatgtcaacttagatgactgctgggcggattccgagagaaccaaagaggtaggatacatggtcgctaaccccaagacattcccatccggaatcaaggccctggcagattacgttcacagcaaggggcttaagcttggcatctactcttccgctgggacaagaacttgcagcaacaggatgcctggatctctgggctacgaggagagggatgctaagatgtttgcgtcatggggcgttgactacctgaagtatgacaactgctacagagacggcacgcctgaaaccgtgaggtttgggcgcatgtcccgagcgctggtgaactctggccgcccaatcttctactcgctttgcgaatggggcttcatggaagttcccaaatggggcggcatgtacggcaacagctggaggaccaccggcgacatcaacgacacatggtcaggcatgctggacaacatcgacctgaacgacgcctacgcccggtacgccaagcccggcggctggaacgaccctgacatgctggaggtcgggaacggaggcatggcgtacaacgagtacgtcgtgcacttcagcctctgggccatcgccaaggctcccctggtcatcggctgcgacgtgacgagagtctccaatgagacgctcggaatcctctccaacgcggaggtcatcgcgatcagccaagatcggctgggtgtccaaggacagaaagtgagcaagtacggcaacgatctcgaggtatgggcagggcagctctcggggcacaggaaggcggtgctgctgctcaaccggggggccacgcgctccgcgtccatcaccgcggcatggccggacgtgggcatccgccgcggcgtggccgtggaggcgagggacgtctggaagcacgagacgctaccgggctggttcaccggcagcctcacggcggtggtcgggccgcactcgtgcaagctcttcgtcctcacgcccgttcctagctgacggcgccgctggagatctgtccatccaatatctgcccgtggatccagctagagttattaattgtatgatttcagatactgtaactgccttgtgactgctccgacaacaagagctcatcaccatctgtctaatgatttgacatggtgcaacgctcagtttggcctagatttgagatccgaacgtggcgaataaaataataaaatgacgtctcctgacttcttttagcagtttagtaattaatagtaaggcttcgttt

SEQ ID NO: 143088 - DNA, 1613 bp, Zea Mays
cccgggcccgtcacgcgtcagacaagctggagtaccgctgccgcacagactgcagcgcgtgcgcactggcaggacgcgacgcagcgccgaagcaacaaggatggcgcccgagattcagagcctgtgtccgagtacgacggccgcgctcctcctgctggccgcctgcctcgccgccgcggtggcagcgctcgacgctgcggactacgccaggccgccgctgcctgcaggcggaggcggccggcgcgtcctcttcgccaacgggctcgggctgacgccgcagatggggtggaacagctggaaccatttccagtgcgacatcaacgaggcggtcgtccggagcaccgctgatgcgctcgtcgccatcggacttgcaaaggctggctacacgtatgtcaacttagatgactgctgggcggattccgagagaaccaaagagggatacatggtcgctaaccccaagacattcccatccggaatcaaggccctggcagattacgttcacagcaaggggcttaagcttggcatctactcttccgctgggacaagaacttgcagcaacaggatgcctggatctctgggctacgaggagagggatgctaagatgtttgcgtcatggggcgttgactacctgaagtatgacaactgctacagagacggcacgcctgaaaccgtgaggtttgggcgcatgtcccgagcgctggtgaactctggccgcccaatcttctactcgctttgcgaatggggcttcatggaagttcccaaatggggcggcatgtacggcaacagctggaggaccaccggcgacatcaacgacacatggtcaggcatgctggacaacatcgacctgaacgacgcctacgcccggtacgccaagcccggcggctggaacgaccctgacatgctggaggtcgggaacggaggcatggcgtacaacgagtacgtcgtgcacttcagcctctgggccatcgccaaggctcccctggtcatcggctgcgacgtgacgagagtctccaatgagacgctcggaatcctctccaacgcggaggtcatcgcgatcagccaagatcggctgggtgtccaaggacagaaagtgagcaagtacggcaacgatctcgaggtatgggcagggcagctctcggggcacaggaaggcggtgctgctgctcaaccggggggccacgcgctccgcgtccatcaccgcggcatggccggacgtgggcatccgccgcggcgtggccgtggaggcgagggacgtctggaagcacgagacgctaccgggctggttcaccggcagcctcacggcggtggtcgggccgcactcgtgcaagctcttcgtcctcacgcccgttcctagctgacggcgccgctggagatctgtccatccaatatctgcccgtggatccagctagagttattaattgtatgatttcagatactgtaactgccttgtgactgctccgacaacaagagctcatcaccatctgtctaatgatttgacatggtgcaacgctcagtttggcctagatttgagatccgaacgtggcgaataaaataataaaatgacgtctcctgacttcttttagcagtttagtaattaatagtaaggcttcgttt

SEQ ID NO: 143089 - DNA, 564 bp, Zea Mays
gcaggccgcgttccggccttccgggccactacttatccctcgtgttccgttctgacacggcgccgactgggactgagaagaaacctccaaacacctacctctctacgaactacctgccgccggaaaaccctagagcgctcgaccatggatccgcagcagccggagcctgtcagttacctctgcggagattgcggagctgagaacaccctgaagcccggagatgtcatccagtgccgtgaatgtggctaccgcatcctctacaagaagcggacccgccggattgtccaatatgaagcgcgctgaagagtgaagacaagggaaaacactgaagatggttgatctattactcgccacattacctatgtaaacagtcttctgggggaaatgaaaatgtcagacttaacgtttgtatgtcgtgtgcctcctttgaacctgagctgtataatttgtaacgcttgaactggggactgatttgagaactgagacactgcagcaatatgttgatgggtcctaagtggcgaatctaatgcatgcgtgttatgccagcaagaaaaaaaagcaaaa

SEQ ID NO: 143090 - DNA, 637 bp, Zea Mays
aaaatcgctaccgatctcgcggattcgagtcagccgttgaaacggtaagctgataatttattcagaatagttcgatcattgaatgaattaatgtgttagtgcgaggctcattagggtgctcgataaattgcgtaagtcacggaactctcttcgacttcgcggttcttgcgattatcgagccaggttcagttatagcgagttatttcgctattccggtcacttagctgaattagtggaccgagtagaattttggtaggcatgtgtgatgataaaatattttaatcacttataaagatatagtataatttataaggcaagggattagttcagaatttaattaattaactgataagttgtgattaggctaattgtatttcttgtgtatagtttgttgttcgtgatgtttgcgttaggttcgagaagcgtaattattgcgtgtagtcgtatattaataactagtgattccgtacaaaattgtacaacgcctcgccgctagatgtttaaattcgccatcgcgtagcactatttagggtttttgatattcctgtctatatgcattcatatgcataatgcatttcattcaggtgcgataattaatcacgtgatgcggaagatgactcaagtcgaccctaagcgc

SEQ ID NO: 143091 - DNA, 104 bp, Zea Mays
gtggagcttatggttggagagaaacaacagaatcttcaagggtcaacagagaacgacagaacaagtggtgcagatggtgaaagatcttgtgggtagaggtctgg

SEQ ID NO: 143092 - DNA, 1500 bp, Zea Mays
aagagctaagagggaagaacaatcgagctactaataaggtcgtatacatatcttctatatactcctctgaaagttgtgaactccggtcgagcttaaaaacagcagcaatggcgaagctttggacattgctgctggctgcagtggtggtcctctcactcctagtgagccccattgcttgcacccgaaagctcaacaaacccaagccgaagccgggcagctacaggcggccggtcaagccgaagccaaaaccggtcacgggcagctacaagccggcgcctgtggccgccagaagaaaccacacagctacacccacgccatcgccgactgtctacggccccggtggctggctgtcaggcgccggcgccacgtactacggcgcgaccaacggcgacgggagcgacggcggcgcgtgcggctaccagacggccgtcggaaagaagccattcgactcgatgatcgccgccgggagcacgccactgtacaggggaggcgagggctgcggcgcctgctacgaggtgaaatgcacgaccaacgccgcgtgctccggccagcccgtgaccatcgtaatcaccgaccagtcccctggcgggctgttccccggcgaggtcgagcactttgacatgagcggcaccgccatgggcgccatggcccggcccggcatggccgacaagctccgcgctggcggcgtgctcaggatcctgtacaggagggtgccgtgcaagtacaccggcgtcaacatcgcgttcaaggtggatcagggcgcgaacccgtactacttcgacgtgctcatcgagttcgaggacgacgacggcgacctcagcgccgtggacctcatggaggccggcagcggcgtctggactcctatggcgcacaactggggcgccacgtggcgcctcaacaacggcaggaagctcaaagcgccgttcgggctccggctcacctccgactcccgcagggtgctcgtcgccaacaacgccatcccggccgcgtggaagcccggcaagacctaccgctccttggtcaactacccctgaaaagagaaataccgacaagtggatggcgtgtattgtgcgtccgggtgttgcgagtggcggcggtgtactactggtgtcggaaaacagaagagaatgaaagaggaggttgaagaagagaataatgtccttcttccctccctggacggtctctgcagtccccaaaagtgatgtgtgacggtgttagtcaaatcatgccggtaatttgatacttcatctcgatttgagttttactgctatactactgtgattgaggtaagacagaatcttatttcttgaccacgtagtacataaactacaaagcatgcccgttgcgttggtaattagactcttgtagtggtttttgccaatatcaagatgtatgtagaatgtgtgtgcatgcgttcacagtgatgagaatatacatgcgtgtatctgatcctctacatctccacttcgtaaaagaaacaactacatactatgtttatat

SEQ ID NO: 143093 - DNA, 1393 bp, Zea Mays
aagagctaagagggaagaacaatcgagctactaataaggtcgtatacatatcttctatatactcctctgaaagttgtgaactccggtcgagcttaaaaacagcagcaatggcgaagctttggacattgctgctggctgcagtggtggtcctctcactcctagtgagccccattgcttgcacccgaaagctcaacaaacccaagccgaagccgggcagctacaggcggccggtcaagccgaagccaaaaccggtcacgggcagctacaagccggcgcctgtggccgccagaagaaaccacacagctacacccacgccatcgccgactgtctacggccccggtggctggctgtcaggcgccggcgccacgtactacggcgcgaccaacggcgacgggagcgacggttagtacagcagatgaccctgccctactctcccagccgactcctagtgtatttcttcgctaccggtgcattagaattgacatggggatgggatcaaatgactctaattaacatgtgaatgcaggcggcgcgtgcggctaccagacggccgtcggaaagaagccattcgactcgatgatcgccgccgggagcacgccactgtacaggggaggcgagggctgcggcgcctgctacgaggtgaaatgcacgaccaacgccgcgtgctccggccagcccgtgaccatcgtaatcaccgaccagtcccctggcgggctgttccccggcgaggtcgagcactttgacatgagcggcaccgccatgggcgccatggcccggcccggcatggccgacaagctccgcgctggcggcgtgctcaggatcctgtacaggagggtgccgtgcaagtacaccggcgtcaacatcgcgttcaaggtggatcagggcgcgaacccgtactacttcgacgtgctcatcgagttcgaggacgacgacggcgacctcagcgccgtggacctcatggaggccggcagcggcgtctggactcctatggcgcacaactggggcgccacgtggcgcctcaacaacggcaggaagctcaaagcgccgttcgggctccggctcacctccgactcccgcagggtgctcgtcgccaacaacgccatcccggccgcgtggaagcccggcaagacctaccgctccttggtcaactacccctgaaaagagaaataccgacaagtggatggcgtgtattgtgcgtccgggtgttgcgagtggcggcggtgtactactggtgtcggaaaacagaagagaatgaaagaggaggttgaagaagagaataatgtccttcttccctccctggacggtctctgcagtccccaaaagtgatgtgtgacggtgttagtcaaatcatgccggtaatttgatacttcatctcgatttgagttttactgct

SEQ ID NO: 143094 - DNA, 222 bp, Zea Mays
atgatacgcttagaacagagaggttcccttgcctttcttgtcaccaccgatctcaaagtgcttgcacctcttgatcgggtgttgagagtagtgcttgcagctctggcactgcagcttcagcacaatcttctttgttgtttttgccttcttgtggaaaacaggctttgtctgaccaccatatccagactgtttgcggtcataacgtcgcttcccttgagctga

SEQ ID NO: 143095 - DNA, 1957 bp, Zea Mays
ggggggatccttggctttacagcacaaacctcgatagcctatccagccagcatcgttggattggagcacgcaaacaaaaccaaaagggagagcgacagcgtcaggaaataatacccaggggaaaaaacagagagagaaagaaaagaaaagaaaagaaaaggccattcaatcttatcaacacaaagttgatttaataaaaaaaggcaggaatcggtacagaagctgctgaattttctgttccattccatcaagcaataatgaagcgggggagcatggcccgccccagccttgcagcactattgtgctttgttgtcacttacctactcttcactccctccataaatagcaccactgcaccctctccttcgcgcactcatccattccatcatcccctttgcaagtatagtctctctgctaagcgaagcgaagcttcaagctagtctcggcggctctagaagacgatgggcaaggacgacgtgatcgagagcggcgctggcggcggcgagttcgctgccaaggactacacggaccctcccccggcgccgctgatcgacgcggcggagctggggtcctggtcgctgtaccgcgccgtgatcgccgagttcatcgccacgctgctgttcctgtacatcacggtggccaccgtgatcgggtacaagcaccagacggacgcgtcggcgtcgggcgccgacgcggcgtgcggcggcgtgggcgtgctgggcatcgcctgggccttcggcggcatgatcttcgtcctcgtctactgcaccgccggcatctcggggggccacatcaaccccgccgtcaccttcggcctcttcctggcgcgcaaggtctccctggtgcgcgcgctgctctacatcgtggcgcagtgcctcggcgccatctgcggcgtcggcctcgtcaaggcgttccagagcgcctacttcgacaggtacggcggcggcgccaactcgctcgcctccggctactcccgcggcaccggcctcggcgccgagatcatcggcaccttcgtgctcgtctacaccgtcttctccgccaccgaccccaagcgcaacgcccgcgactcccacgtcccggttctggctcccctccccatcggcttcgccgtgttcatggtgcacctggccaccatccccgtcaccggcaccggcatcaacccggccaggagcctgggcgccgccgtcatctacaacaaggacaagccctgggacgaccactggatcttctgggtgggccctctcgtgggcgctgccatcgcggccttctaccaccagtacatcctccgggctggcgccatcaaggccctcggctccttcaggagcaacgcgtgatgagcggggcttggctgtggagcaatggcgggcgacctacgggcggggggccgtgagcgaggagaatgccatcattcatcgatcgacttgggtgccggtggttggttcgggtcgccttttttttgtttcagcagctgctgcgttgcgcgcgtgcgtgagatttggtttggtttcgttcccctgcaatgtaatcatgtcgtgactctcaagggattattccgctctgctcttatggtctctgttttctatttaatgattgttattaccatgtagcagtaaccatcgtcatcagtgagaaccttgttgcttctgtctaaatcaaccgagacgtgtggagtggatggatcgaacattcagccttgtgctctctctcgctccctcgtttggctgtcctgtctgctgtctgtattattgcatcttggccctctcaatcaatcccttgtgattcctcccactaccttgtgattctctctccacagcggtggtgggggctgccgcgcccgctttagcagttacagctaggtacactacccggtaggaggagcgtgctgcgcagatttcatcaaatcttcaccgggtcgcttctgctgcctggaatatgatataaattaaaaaaaaaggaa

SEQ ID NO: 143096 - DNA, 1680 bp, Zea Mays
ggggggatccttggctttacagcacaaacctcgatagcctatccagccagcatcgttggattggagcacgcaaacaaaaccaaaagggagagcgacagcgtcaggaaataatacccaggggaaaaaacagagagagaaagaaaagaaaagaaaagaaaaggccattcaatcttatcaacacaaagttgatttaataaaaaaaggcaggaatcggtacagaagctgctgaattttctgttccattccatcaagcaataatgaagcgggggagcatggcccgccccagccttgcagcactattgtgctttgttgtcacttacctactcttcactccctccataaatagcaccactgcaccctctccttcgcgcactcatccattccatcatcccctttgcaagtatagtctctctgctaagcgaagcgaagcttcaagctagtctcggcggctctagaagacgatgggcaaggacgacgtgatcgagagcggcgctggcggcggcgagttcgctgccaaggactacacggaccctcccccggcgccgctgatcgacgcggcggagctggggtcctggtcgctgtaccgcgccgtgatcgccgagttcatcgccacgctgctgttcctgtacatcacggtggccaccgtgatcgggtacaagcaccagacggacgcgtcggcgtcgggcgccgacgcggcgtgcggcggcgtgggcgtgctgggcatcgcctgggccttcggcggcatgatcttcgtcctcgtctactgcaccgccggcatctcggggggccacatcaaccccgccgtcaccttcggcctcttcctggcgcgcaaggtctccctggtgcgcgcgctgctctacatcgtggcgcagtgcctcggcgccatctgcggcgtcggcctcgtcaaggcgttccagagcgcctacttcgacaggtacggcggcggcgccaactcgctcgcctccggctactcccgcggcaccggcctcggcgccgagatcatcggcaccttcgtgctcgtctacaccgtcttctccgccaccgaccccaagcgcaacgcccgcgactcccacgtcccggttctggctcccctccccatcggcttcgccgtgttcatggtgcacctggccaccatccccgtcaccggcaccggcatcaacccggccaggagcctgggcgccgccgtcatctacaacaaggacaagccctgggacgaccacgtacgtaaacgcatgcgtgtactgactatatatgactgtgactatgacgacgcgatctcatcgtttaacctttcgcagtggatcttctgggtgggccctctcgtgggcgctgccatcgcggccttctaccaccagtacatcctccgggctggcgccatcaaggccctcggctccttcaggagcaacgcgtgatgagcggggcttggctgtggagcaatggcgggcgacctacgggcggggggccgtgagcgaggagaatgccatcattcatcgatcgacttgggtgccggtggttggttcgggtcgccttttttttgtttcagcagctgctgcgttgcgcgcgtgcgtgagatttggtttggtttcgttcccctgcaatgtaatcatgtcgtgactctcaagggattattccgctctgctcttatggtctctgttttctatttaatgattgttattacca

SEQ ID NO: 143097 - DNA, 1716 bp, Zea Mays
ggggggatccttggctttacagcacaaacctcgatagcctatccagccagcatcgttggattggagcacgcaaacaaaaccaaaagggagagcgacagcgtcaggaaataatacccaggggaaaaaacagagagagaaagaaaagaaaagaaaagaaaaggccattcaatcttatcaacacaaagttgatttaataaaaaaaggcaggaatcggtacagaagctgctgaattttctgttccattccatcaagcaataatgaagcgggggagcatggcccgccccagccttgcagcactattgtgctttgttgtcacttacctactcttcactccctccataaatagcaccactgcaccctctccttcgcgcactcatccattccatcatcccctttgcaagtatagtctctctgctaagcgaagcgaagcttcaagctagtctcggcggctctagaagacgatgggcaaggacgacgtgatcgagagcggcgctggcggcggcgagttcgctgccaaggactacacggaccctcccccggcgccgctgatcgacgcggcggagctggggtcctggtcgctgtaccgcgccgtgatcgccgagttcatcgccacgctgctgttcctgtacatcacggtggccaccgtgatcgggtacaagcaccagacggacgcgtcggcgtcgggcgccgacgcggcgtgcggcggcgtgggcgtgctgggcatcgcctgggccttcggcggcatgatcttcgtcctcgtctactgcaccgccggcatctcggggggccacatcaaccccgccgtcaccttcggcctcttcctggcgcgcaaggtctccctggtgcgcgcgctgctctacatcgtggcgcagtgcctcggcgccatctgcggcgtcggcctcgtcaaggcgttccagagcgcctacttcgacaggtacggcggcggcgccaactcgctcgcctccggctactcccgcggcaccggcctcggcgccgagatcatcggcaccttcgtgctcgtctacaccgtcttctccgccaccgaccccaagcgcaacgcccgcgactcccacgtcccggtgagcacccgaccaacgccaccgccttctccttttttttttgttttgtttttgtctcgaccctcggtctgctgctacctgctagtaagtagctgtttgttgggagtagtagtattttatttttaaaactagcttaaaagttcgcttgtcttaatcagttggcatcagtcgtaagttgagtcccaggcgagcttaattagagctcaagttatgctagctaacatgctcaaatctcggcaatgtacatggcgcacgtgaaaaaagaaaatttccgttcacgggcagagagagggaaaggagtagcacaacaaatacaaaaaggcaggagaatatccattttttcttgatcggctgtgctacgcagcgctgtggctagcacatattttgaagctagcacatattttcaagctagcagcaaggccacaacagttagcactcagcagcacatctattatttgctccatccaagatgaatttctttgccgtagactgaagtgtttcgttttatactatttttgttttgtttttgaaagattctcctgcggactattttgttcttccatggaccatgcatgtttatgtactgctctaaattactctgttcgtggcttccatgaggattaaaatcttcataaag

SEQ ID NO: 143098 - DNA, 1293 bp, Zea Mays
ataccctccgtgtcagccctaacacagcaacgcaagcaagcaattgtcaaccgactctatcttagctctctttgcaagccagtaggtcaccactcaaaagcttgtgaagcaggtgagatgggcaaggaggtggatgtgtccactctagaggccggcggcgtccgtgaccgtgactacgcggaccctccgccggcaccgctgatcgacatcgacgagctcggcaagtggtccctgtaccgcgccgtgatcgccgagttcgtggccacgctgctgttcctgtacatcacggttgccacggtgatcgggtacaaagcaccagacggacgcgtcggcgtcggggcccgacgcggcgtgcagcggcgtgggcatcctgggcatcgcgtgggcgttcggcggcatgatcttcatcctcgtctactgcaccgccggcatctcgggcggccacatcaacccggccgtcacgttcggcctcttcctggcgcgcaaggtctccctggtgcgcgctctgctgtacatggccgcgcagagcctcggtgctatctgcggcgtcgcgctcgtcaagggcttccagagcgggttctacgcgcgctacggcggcggcgccaatgaggtcagcgccgggtactccaccggcacggggctcgccgccgagatcatcggtaccttcgtgctcgtctacaccgtcttctccgccaccgaccccaagcgcaacgctcgcgactcccacgttccggtgctggcgccgcttccgatcgggttcgctgtgttcatggtgcacctggcgacgatcccgatcactggcaccggtatcaacccggcgaggagcctcggcgccgccgtcgtgtacaacaacagcaaagcctggagcgaccagtggatcttctgggtgggcccgttcatcggagcggcgatcgcagcgctataccaccagatcgtcctccgcgccagcgccagggggtacggctccttccggagcaacgcctaggaccatctcgtcggcgggctattcagctcttcctcctccgcagtttaaggtgaacggagaaggagagcgcaagggggtacggagcaacgtctaggctcacctcgcctttgcccccgcccatccacagcagcagtagctttcattcaggtcaagtgttgcagctgccggcaacggtagctagcgcaggcgtttgtgagtttgtgtgcggtgtggaaagcaagtgtgacttggtcagcgtctgtgtgtcctgttgggttgcagtcaatctaacttaataaagatggacgaatgcaagtgattattaccct

SEQ ID NO: 143099 - DNA, 1167 bp, Zea Mays
atgggcaaggaggtggatgtgtccactctagaggccggcggcgtccgtgaccgtgactacgcggaccctccgccggcaccgctgatcgacatcgacgagctcggcaagtggtccctgtaccgcgccgtgatcgccgagttcgtggccacgctgctgttcctgtacatcacggttgccacggtgatcgggtacaaagcaccagacggacgcgtcggcgtcggggcccgacgcggcgtgcagcggcgtgggcatcctgggcatcgcgtgggcgttcggcggcatgatcttcatcctcgtctactgcaccgccggcatctcgggcggccacatcaacccggccgtcacgttcggcctcttcctggcgcgcaaggtctccctggtgcgcgctctgctgtacatggccgcgcagagcctcggtgctatctgcggcgtcgcgctcgtcaagggcttccagagcgggttctacgcgcgctacggcggcggcgccaatgaggtcagcgccgggtactccaccggcacggggctcgccgccgagatcatcggtaccttcgtgctcgtctacaccgtcttctccgccaccgaccccaagcgcaacgctcgcgactcccacgttccggtgctggcgccgcttccgatcgggttcgctgtgttcatggtgcacctggcgacgatcccgatcactggcaccggtatcaacccggcgaggagcctcggcgccgccgtcgtgtacaacaacagcaaagcctggagcgaccagtggatcttctgggtgggcccgttcatcggagcggcgatcgcagcgctataccaccagatcgtcctccgcgccagcgccagggggtacggctccttccggagcaacgcctaggaccatctcgtcggcgggctattcagctcttcctcctccgcagtttaaggtgaacggagaaggagagcgcaagggggtacggagcaacgtctaggctcacctcgcctttgcccccgcccatccacagcagcagtagctttcattcaggtcaagtgttgcagctgccggcaacggtagctagcgcaggcgtttgtgagtttgtgtgcggtgtggaaagcaagtgtgacttggtcagcgtctgtgtgtcctgttgggttgcagtcaatctaacttaataaagatggacgaatgcaagtgat

SEQ ID NO: 143100 - DNA, 150 bp, Zea Mays
atggcctgggtgcgacagatgtcggagctggggaaggtgatggagcagggagggagctcggcatgggacggaggagatgtacgtaagggggagccgccatgggaggggcagggagctgagcgcccagtgttggctgccgcccacgagtag

SEQ ID NO: 143101 - DNA, 2108 bp, Zea Mays
ccgctgctcgaatagatcgtctgcagtcgcgtgactcgactttaccccgctgctccgcttccctctctcgtgctcgccgccccacagctcgaagacgacgaggtggcctcagcacacgcgcgcgcaaccatggcagctgctcaaggtggcactgttgtgtgttcatctgagaaagttgagtttctgaagcttcaaaatggcagtgatattcgtggtgttgctgttgctggggttgaaggtgagcctgtcaacctcacggaagatgtcactaaagctatagctgcagcttttgctgcatggctgttaaacaagaaaccagatggcttgagacgtttaagaatctctgttggacatgattcacgaatttctgcacataaattgcagaatgcagtcactcatggaatcactactgctggacacgatatcctacagtttggattggcttcaacgcctgcaatgttcaacagtacacttacagaagatgagagaagtcatttacctgttgatggagccataatgataacagcaagccatctcccctacaatcggaatggtctcaagttttttacaagtgatggtgggctaaataaagctgatatcaaagatatcctggagcgtgcttccaaaatatatgaggaatctgcacataataacctgaaagaacagggggaagcttcgaagggagttgtcactaatgtggactacatgtcaatttatgcttctgatcttgtacaagcagttcgtaaatctgctggagacaaagaaaaaccattggaggaactgcatatagtcgttgatgcagggaatggtgctggtggtttttttgtggataaggtactcaaaccattaggagctgttaccactggaagtcaattccttgagcctgatggtttgtttcccaatcacattcccaaccctgaggacaaaaccgcaatgaagtttattacacaagcagttcttgataacaaggcagacttaggcatcatatttgatactgatgttgacaggtctgcggctgttgattccaggggtcgtgagttgaatcgtaaccgattgattgctttgatggctgccatagttcttgaggaacatccaggaactacagttgtgacagatagtgtgacttcagatggattgactgtatttattgaaaataaacttggagggaagcatcaccgtttcaaacgagggtacaagaatgtaatagacgaggctattcgtctgaactctattggtgaggagtcacatttggccatggaaacaagtgggcatggagcgctgaaagagaaccactggcttgatgatggagcataccttatggtcaaacttttgaataaacttgctgctgctagaacactgggttcaagtattggtagtaaagttttgactgatttggttgagggccttgaggaagctgatgtgacagttgagataaggttaaagattgatcagaatcatgcagatttgaaaggagggtccttccgtgactatggagaatccgtcttgagacatttagagaatgcaatcagcaaagacccaaatctccgtaaagccccggtgaaccatgagggcgtaagggtttcaggatatggtgggtggttcttgctgaggctctctctgcatgatcctgttcttcccctaaacattgaggcacagagtaacgatgatgcgattaagctggggcttgcggttcttgctgctgtgaatgaatttccagcactggatgtgacggcactgaacaaattcgtgcatcagtgaatataagggacggacattggcatcataatgtgatcagcttcgcatggtgtcgtgttcgccccggtcgaacatgttctacatgtggcacgagtatcatacagaaatataccagtttattacttgcacaggctttttagtttggaaagacaagggagatttcagtgttgagatgattcttgtgtgtgtttataccagctatcagagtaagaatatgcgtgcgtactgttgaggctgatctttacttgagaataaggtttgagttacctgagtatttttttaaaaggatcaggaggcttgctgtgatgtgaggccacgaatttgccaataagtacctcgatttttctttagcg

SEQ ID NO: 143102 - DNA, 2327 bp, Zea Mays
ccgctgctcgaatagatcgtctgcagtcgcgtgactcgactttaccccgctgctccgcttccctctctcgtgctcgccgccccacagctcgaagacgacgaggtggcctcagcacacgcgcgcgcaaccatggcagcattatcagcgaagaccatacaaaatgcattcttggcacaacacacacggaataggcatggtgcaagatatcccagtgatttttgttctctcaatacccgcagcatgcattccttccaggaatgtagattggcagtggctgattcttcagccaaatggttaaataccacatcgacgctatggactagcttcaacaaacaagcaggcattagctgcaatgctgctcaaggtggcactgttgtgtgttcatctgagaaagttgagtttctgaagcttcaaaatggcagtgatattcgtggtgttgctgttgctggggttgaaggtgagcctgtcaacctcacggaagatgtcactaaagctatagctgcagcttttgctgcatggctgttaaacaagaaaccagatggcttgagacgtttaagaatctctgttggacatgattcacgaatttctgcacataaattgcagaatgcagtcactcatggaatcactactgctggacacgatatcctacagtttggattggcttcaacgcctgcaatgttcaacagtacacttacagaagatgagagaagtcatttacctgttgatggagccataatgataacagcaagccatctcccctacaatcggaatggtctcaagttttttacaagtgatggtgggctaaataaagctgatatcaaagatatcctggagcgtgcttccaaaatatatgaggaatctgcacataataacctgaaagaacagggggaagcttcgaagggagttgtcactaatgtggactacatgtcaatttatgcttctgatcttgtacaagcagttcgtaaatctgctggagacaaagaaaaaccattggaggaactgcatatagtcgttgatgcagggaatggtgctggtggtttttttgtggataaggtactcaaaccattaggagctgttaccactggaagtcaattccttgagcctgatggtttgtttcccaatcacattcccaaccctgaggacaaaaccgcaatgaagtttattacacaagcagttcttgataacaaggcagacttaggcatcatatttgatactgatgttgacaggtctgcggctgttgattccaggggtcgtgagttgaatcgtaaccgattgattgctttgatggctgccatagttcttgaggaacatccaggaactacagttgtgacagatagtgtgacttcagatggattgactgtatttattgaaaataaacttggagggaagcatcaccgtttcaaacgagggtacaagaatgtaatagacgaggctattcgtctgaactctattggtgaggagtcacatttggccatggaaacaagtgggcatggagcgctgaaagagaaccactggcttgatgatggagcataccttatggtcaaacttttgaataaacttgctgctgctagaacactgggttcaagtattggtagtaaagttttgactgatttggttgagggccttgaggaagctgatgtgacagttgagataaggttaaagattgatcagaatcatgcagatttgaaaggagggtccttccgtgactatggagaatccgtcttgagacatttagagaatgcaatcagcaaagacccaaatctccgtaaagccccggtgaaccatgagggcgtaagggtttcaggatatggtgggtggttcttgctgaggctctctctgcatgatcctgttcttcccctaaacattgaggcacagagtaacgatgatgcgattaagctggggcttgcggttcttgctgctgtgaatgaatttccagcactggatgtgacggcactgaacaaattcgtgcatcagtgaatataagggacggacattggcatcataatgtgatcagcttcgcatggtgtcgtgttcgccccggtcgaacatgttctacatgtggcacgagtatcatacagaaatataccagtttattacttgcacaggctttttagtttggaaagacaagggagatttcagtgttgagatgattcttgtgtgtgtttataccagctatcagagtaagaatatgcgtgcgtactgttgaggctgatctttacttgagaataaggtttgagttacctgagtatttttttaaaaggatcaggaggcttgctgtgatgtgaggccacgaatttgccaataagtacctcgatttttctttagcg

SEQ ID NO: 143103 - DNA, 507 bp, Zea Mays
tttatgacaactaatgcttagctatatgcaacatcacttacatcaacaacattttttgtcatgactaggaacaatagaaatcataccaaggagaaaaagtatgggcaagcaacttgaattgttaagcagaggactaggaatgaagattccaatccagattactgaagggaacaaaaggccagagccacctattcaagctgctaagtttgcatcagacgggggaatcactttgaggtaacacgttccaatatttcaccactggaaggagtacagaagaaacagaatgaacctacaataagaaactatattggaaaagttactcaattcaccatgtacaatgaaagcaaggcagtggaagatgcatgtctagaaatgctaaagggtggacaacgccaaatcaggtatagactgaaacaaaaatatttcaatgggatacctgctaatgaagtcaggacttcatcgcctattccaagcatgtctgatgaggactggagaaagttggtggag

SEQ ID NO: 143104 - DNA, 291 bp, Zea Mays
atggcgattgccacagcaccagccatggctacgaagctgatggtggaggcagatgtggcggtgctcttctccgtgatgggtgcggttgccggagtcagagcggaggtttggtgcagcagcagggtcgtgacaaatgacggtagggcccaggcgtcgggcgagcgacagctgctggcttcagtccggtgggcgacggctccctgtccagggcaggtgcatcttggtccacgaggccatggggtggaagtgggacttgggagccgcgagtgcctgagtgctttggtgggctga

SEQ ID NO: 143105 - DNA, 1651 bp, Zea Mays
gaaccgcggctacgaccttcgtagccgagggccccctgctctaaacgcccaggccccttgacaactactatgcttgctgatttgcttgagaagaagattgataatattggcagagacaaagtgattcaagtagtgacagataatggcaccaattataaggttgcaggcaagattctcatggatcgaattccaacattgttttggagtccttgtgcagctcattgcttggatctaatgctagaagatattggaaagttgaaagatttcaagaaaacaattgctctagccaaacgagtcaccacttttatttatttatttatatgcatggaaggatccttagtgcagcgagggagcaaacaggtggcatggacctagttagaattggagccactaggtttgccacttgcttcctttgaagagcctacataagcatagagatcctttgaagggtctagttttgagtgatgcatggaagtcaaacaagttgtcaaaaacagaggctgggaagggagtttatgacattgttctatcctcaacgttttggagcacagttgaagattgccttagagcttcaacaccaattcttattgtctttagggcggccgatgcggatgagaagcctgccatggcagaaattgcagcataaatggacagggcaaaaaagaggataaagcttagctttacatcacaaaacaagcaagctttgctaaaaagagtcttgggtattgttgagcgtcgatgggtgtcgcaaatggaccatccattgtatggtgctgcattgtatttgaatccggaaaaattctttgccattaagaacaaaagggatgataggtatgttgcagagctaagaagctgctttaatgatgtgcttgaaagaatggaaccggatgatgctattcggtctaagattgatgaatttgcaatgcattatgaggaacaacgtggccctatcttctcaagcaaattggcacttgcaaacattgaaacaaaaagccctcataagtctatgtgcttttgttaatttcagcagctacatgcctacatgtttcaatgtccctaatatgtatgtgtcatgtgacatgttatagttgattggtggcattcgtatggtggtcgtgccttcgaattgcaaaggtttgcaaagcgtgtggttagtctatgtgcttcatcatccggttgtgagagttggagtataagttgacttatgcacacaaaaagaaggaaccgattgctacacaaaaggctaaatgacttagtctttgtatcatacaaccggaagatgcaaaataggttccaaaagaggagggagacaggtggcacaagttatgacccattagtgcttgacgattttgattgggacaatgagtgggtacactcatcggttgtacatgctggtagggatgatgatgagcataacttgacatgggaacaagttgatgaagccattggagcatctgagtcccttcgaggccgcaactttccaagacaagctcgtatgtattcaaacagctaccaaaggcgtagtacaatgagggcacatgaagatgaacaaggtgaggaggatgatggaaatgattcaaacaatgaagtggtggatccacaagatgactattggtatggtgatagttatgtgcttcgaggcggaagatga

SEQ ID NO: 143106 - DNA, 270 bp, Zea Mays
aaggctgacagagattatgtcaacaagcaatgggctatgtggttctatgagtgtggtgtaccttttaacgccattaattctagacagtttcacattacttgtgaggccactgctcaatatggtactagatatgttcctcctagtattcatgaggttaaagagcctttacttgctgaatgtgtcaaaaatgtgactaacttgagagctcatcatgagttagcttggaagacttatggttgcacacttatgtcatatggatggactgacagg

SEQ ID NO: 143107 - DNA, 796 bp, Zea Mays
ctgaagcagataagccgtacgccgtccccttgcacagcaaacatccatggcgactgcccgcttgccctctcgctccttcctgtccccggctcagcaatcctatccacggcttcccgcctccgtccgcctctgcctctctcatcacgagcaacctcccaccggccccaagcggcaccgacgcgccgccacttcgcatcctgccttttctgcagccgcgcggggtcgtgccaagaagattcccatcgcggacaccgatgagcccgccgccggagtccgcgtcaccgatcgcggcatctcttaccgcctcgatggcgcgccatttgagtttcagtatagctacactgaggccccacgcgcacgccccgtagcgctccgtgaggccccgttcatgccgttcgggcccgaggccacgccacgcccctggacgggaaggaagccgctgccaaagagccgcaaggagcttccggagtttgactcgttcgtgctgccagcaccggggaagaagggggtgaagcccgtgcagtcaccgggtccgttcctcgccggtatggagccgagataccaatcggtgtccagggaggacatactcggggagcccctaaccaaggaagaggtctccgaactcgtgaaagggagcctcaaatccaaacggcaactcaatatgggcagggatggtttgacacacaatatgttggagaacattcattcacattggaagaggaaaagagtttgcaagataaagtgcaaaggtgtctgtacaatagatatggataatatctgccatcagctagaggta

SEQ ID NO: 143108 - DNA, 120 bp, Zea Mays
gatccattacactcagacgtaaccgaacacgaagcagcgggatccgttaaccatgtgaatggattacgggccaaaaagacctaagttcataagaaaaaggcttatacttcaacactcccc

SEQ ID NO: 143109 - DNA, 515 bp, Zea Mays
tccatgtacttcctgcagtggtcctcagatgtctccattgattccaaatatgcggaccttgtgcatgtttggcaattttgccacaactagcacaaaaactgccattgtattgaggaaaaacatcggctgcttgtagtcagtcaagtgcgatgcgatcagatacctggaagaacgcgctttagaatatatgccactcaatatgacaatatcaacttggtttcaaaaatacaatgactttgttaactgcataaattttttttaacaatgactaacttcaagccaagcatcatagttttaaatttgtcaaaaatgctaagatgctgtgcttaggaaagaaagcgtaataaaatgtctagattcaactgcccttgtggcactggcagatagtaactgattaatcatcagccgaactctgcactgctcatgaaaatcctagttctcgttttaacttttggatcacaagcaacaaatgagtccttgagggcacagcagcagcaaagtgtagatggataatg

SEQ ID NO: 143110 - DNA, 1073 bp, Zea Mays
atagcagtatcacgagcgtcgaggtcgagcgaacccaacgcatctccgcaattagcagcacgcacccagagcaagcccaagtgccaatcaacaaacccagaccgccagacggcaaccgttgtcatctctcactccacggcgccggccatcgtcactcacacgcccagcaccgcagcacgacaccatcgcgccctggccatcctcccgttcacgtgcacctaccgcacgcaccaccgcggaaagtaaccccgagatccagcgccgtcggcacgaccaggcctgtccagggatggggcggagaggggagccctactacgtcgaagcggcgccgccggtggacgtgaacaagaacacagagtggttcatgtacccgggcgtctggaccacctacatcctcctgctcttcttcgcttggctcctcgtcctctccgtctctggttgctcccccggagcagcctggacggtcgtaaacctcgcgcacttcgccatcacttaccacttcttccattggaagaaaggaaccccttttgctgctgatgaccaaggcatctacagcagattgacatggtgggagcaaattgacaatggtcagcagcttactcggaacagaaagtttttgactgtggtacctgtggtgctgtatctgatcgcatcgcacttgactgactacaagcagccgatgtttttcctcaatacaatggcagtttttgtgctagttgtggcaaaattgccaaacatgcacaaggtccgcatatttggaatcaatggagacatctgaggaccactgcaggaagtacatggatgcgatgccatgatgtgatgaagagctaaacagaacaagcagtgtgtttctcaaacttgacacaactgtctgtaatatatgtacaggtttaggaagaactgtaaatgttactctaccatagaagctttgccagcggactggcctgtgttgttgccgttgctgctttcttttgagtttcactggaaggggaaacggtaactccggtaaacaaccaccagcatgtggataagaaataaggaagtgggtaggaggaccgcggctccgaaggtcg

SEQ ID NO: 143111 - DNA, 2176 bp, Zea Mays
atagcagtatcacgagcgtcgaggtcgagcgaacccaacgcatctccgcaattagcagcacgcacccagagcaagcccaagtgccaatcaacaaacccagaccgccagacggcaaccgttgtcatctctcactccacggcgccggccatcgtcactcacacgcccagcaccgcagcacgacaccatcgcgccctggccatcctcccgttcacgtgcacctaccgcacgcaccaccgcggaaagtaaccccgagatccagcgccgtcggcacgaccaggcctgtccagggatggggcggagaggggagccctactacgtcgaagcggcgccgccggtggacgtgaacaagaacacagagtggttcatgtacccgggcgtctggaccacctacatcctcctgctcttcttcgcttggctcctcgtcctctccgtctctggttgctcccccggagcagcctggacggtcgtaaacctcgcgcacttcgccgtgagttcccaccctctattccgtccccagtccctcgccctttctactggggtttgcttacgagcggttgctcgcgcgatcgacttctgattttgcgcatgtctcgtccctttcgtcctcaaactgggttgcttccgtcaactgtatcccaagatttggttgtactggtagttggatttactaattagctccttcggtgtttattatttctgctccccaagtgtttgtggccattcacgctccagcaggactgtttgattttcgccttgcgtgtacgtgtttagccaaaaagattatgttctttgccatgaggcaaaggcggaatatgtgtaggattaggtgacagttcatctgaattaaaatatttcctcagcctgtgcccatggattgctaggaatataggaaagccatagaagaaatattttcgagataaaatattagtagtataagctgtcttggctggatgttctattctgttagcttatcttaattttgttccccatttgtgtgtggaacgatttcccttgcataaaagtcaaaacaagcaccccattcttggcccggaccatttctttgtttcagagcagatttttattagatattgactattgaaaggtccatttatgtgtactatactactatgaagaatagctagtcgatagaattttatttaggtttctgtaacaagaattgttcgtattaaaggtccaggacaggctatgcattgtgatctgcagacttatgtattgttccgtaatcaatatttggacttgcggcatgtcatggtggcctgaaatatgtgccttgtaaattatatttgacaattctcatcctggggtaaagatattatgtgtccttctgggtcagggatgtgctcgataaaatttgtccctttgactcgaagatgcatttcatgccatctgcaatatcacattatttttaacccaagtgatggcatggattcatccgatttctgtctcacacacagttaagaaacacatgggtcaaatgggtaggaggacttaagtgaaagacgtcaactccttgctattcatgttccttgccaattgaatttcagttgacacacttgaatctattttcagatcacttaccacttcttccattggaagaaaggaaccccttttgctgctgatgaccaaggcatctacagcagattgacatggtgggagcaaattgacaatggtcagcagcttactcggaacagaaagtttttgactgtggtacctgtggtgctgtatctgatcgcatcgcacttgactgactacaagcagccgatgtttttcctcaatacaatggcagtttttgtgctagttgtggcaaaattgccaaacatgcacaaggtccgcatatttggaatcaatggagacatctgaggaccactgcaggaagtacatggatgcgatgccatgatgtgatgaagagctaaacagaacaagcagtgtgtttctcaaacttgacacaactgtctgtaatatatgtacaggtttaggaagaactgtaaatgttactctaccatagaagctttgccagcggactggcctgtgttgttgccgttgctgctttcttttgagtttcactggaaggggaaacggtaactccggtaaacaaccaccagcatgtggataagaaataaggaagtgggtaggaggaccgcggctccgaaggtcg

SEQ ID NO: 143112 - DNA, 257 bp, Zea Mays
ggtcttaccggggtagacatgccgacggcccccgaccatggcaaagggcagtcctgcggtggcgcatgtactctggcgagaaatctgcgtgatcacagaggtcccccgcattacccaccgccatagacgagttcatcatggcccgacaatgcaccacggccgatactcgacgaccaaggaacagggtggcgacgacgcacccccttttcccccatcaccacatttacacccggctcacggtgcagcttgttcccttg

SEQ ID NO: 143113 - DNA, 571 bp, Zea Mays
aacatggttccttggtgttgcgggtgtgctccagccccaagtgtccgagtctttccggcgaagggtttcggacagagaagatggcgacggcggcggcagggttggctccggcaaaggaggtggtggagaagaaggtggaactcctgaaggagatacgggcgcacgaggtggcgatcgcggagctagacaacctgaatccctcccgagcggtgtaccagaaagctggcaacatcttcttccgtaagagcgtcaaatcggtgatcacaacggagcagaagcaacttgaccaagccaaggctcggctgagcaagctgaaccaagcttgatgggcagcacgctacaaatgttgaccttgaacaaaatagagcatgcagatttgaatggacttctcgttgctcattaattctgcagttgggcgttgtggacataatccatgtgtaatgctactttctttttcatgagatgtatggctagtgtggtcgtgaagtttggttaagccttttgagcccgattcagtgttaaaaatctagaatttcaactaaaggagtacatgagctgaatagatttctaa

SEQ ID NO: 143114 - DNA, 892 bp, Zea Mays
aacatggttccttggtgttgcgggtgtgctccagccccaagtgtccgagtctttccggcgaagggtttcggacagagaagatggcgacggcggcggcagggttggctccggcaaaggaggtggtggagaagaaggtggaactcctgaaggagatacgggcgcacgaggtggcgatcgcggagctagacaacctgaatccctcccgagtcagcctcttcccctctgtctccctcccttgcttgcggtttgtgtcaggtgctgcgagatggtactggtatcaaattaccaatggctaccactaggttgctcgccagtgataaactgatgctgtacactttcaattaatcttatttcaatacattagtaatcagatgacaatcgtgaagcaccggtagaagctttgattatccaggttgcgagcaagagcacggatatgcttactggatctgggtcaaattttgagtagcttgcctcgtcacgaactcacagcttgtccatcgtactcacagtttcttgctttgcaacaggcggtgtaccagaaagctggcaacatcttcttccgtaagagcgtcaaatcggtgatcacaacggagcagaagcaacttgaccaagccaaggctcggctgagcaagctgaaccaagcttgatgggcagcacgctacaaatgttgaccttgaacaaaatagagcatgcagatttgaatggacttctcgttgctcattaattctgcagttgggcgttgtggacataatccatgtgtaatgctactttctttttcatgagatgtatggctagtgtggtcgtgaagtttggttaagccttttgagcccgattcagtgttaaaaatctagaatttcaactaaaggagtacatgagctgaatagatttctaa

SEQ ID NO: 143115 - DNA, 111 bp, Zea Mays
aaatctattgttttctgtttccaactaaacaccgtcttcagttaaagagcaaatttcatgcctttgctatttacaagtgtcaagcacgtagatgttagcattatagaaaaa

SEQ ID NO: 143116 - DNA, 1485 bp, Zea Mays
tatcttcgtctgttcctagattctactaggacgagcccaaatccaaatcgtcctgaggaaagggtaaagaaagtgaagcaaggggctgcctggcttagggtttcttgacggctccttgccctctccgccatggacgcgcagcgagccctccttgacgagctcatgggcacagctcgtaacctaacggaggaggagaagaaggggcacaaggagctgaagtgggacgatccggacgtgtgcggcccctacatggtccggttctgtccccacgaccttttcgtcaacaccaagagcaatctcgggccgtgcttgaggatccatgatccgaagctcaaggaaagctttgagaaatctcccaggcatgatacttatatgcaaaggtttgaggcagagcttgcacaacaatgtgagaaattggtaatggatttggatagaaagataagacgtggtcgagaaaggttggctcacgattctgctgtgccaatgccaatccctggaaaaatagctgagcagctttcagcgcgagaagaacaggtcaagaagctactggagcaaatcgaggagcttggtgaggctggtaaagtggatgaagctgaggcacttatgaaacgggttgacattctaaacgctgagaagacagctttatctaaccaagcagacagcaaagtggctatgcttgagaagaagatggagctttgcgaaacgtgtggatcattcttagttgctgatgatgctcttgagagaacccagtcccacgtgactgggaaacaacacattggatatggtatggttagagatttcctggtggaatacaaggcggcaatagagaagtcaaaagaggaagataggcttgcaagggagcagaaagcagaggagcgtcggaagcagagaggaaaagagtatgataatgggggcagggatagagataccagaagggagaagtctggggagcgtgactatgaccgtgatcgtcagtatgagcgaagccgtggaagagacaggtcttatgattacagagagagaggatcagagcaccgaagcaatctctacagaaatgggagggattccgaaagaggtggacacagatacaggagtggtgatatgacaaacgaccgggggagaatgaggagcagatcacgttctccaacaaggcatggctatggaagatctggaagtccaaatcattagctgaatatttagatagttttattcacagttgggactcatgaggtagaccgttcccttctgctatttattactgtacaatgggttttattgaagtgtcgcacttgtttgagtctctgctctgctgtaacagctctgttggaaccctacagtcttcctttttacatgagaaaaaaaaaattctcaggtaggtatcaattttcattcccacaatttttgtgtttctgatattctatgtattctgaagctttgtttcgatatttggaatcgaaagttaaactcgtaaggccggtactggac

SEQ ID NO: 143117 - DNA, 108 bp, Zea Mays
attttggatcccaatttggaatcgcatatatttcaaacggttggattattagcgatgtatactgggtcgacacgcaacgcgaatacacatttcattctccgaatttag

SEQ ID NO: 143118 - DNA, 516 bp, Zea Mays
atggcgttgggtgctcgccggagccagttggctggcctggccgcagccgtgctgcagggggcatgctggatgccggctggccttgcaggcagcacggtggtgacggattcagaggggcacacatacgcgcaccgtctcgccgaaggacccggaggcgaggacgttgccatgggggctgaagaagacgcagaagacgtagttggtgtggcccgtgagcgtcttggggaggtgggctcctccgccgacggcgagatcccagatgcggatggtgcggtcatcagaggtgggggcaagtcggcaaggaggcgaccgtcgggggagaaagagaggtctgagacactctctccatggccctcgagctccgcaacgggggtgagatcggaggaagaccacacgcgaagaagcttgtcggcggaggcgagcgtggctgcgacaacgcgcacgaccaggcaaggaagggagagacggtttccttttcagtcgtgggaggaacgaggaaaagggagcgagatttag

SEQ ID NO: 143119 - DNA, 2523 bp, Zea Mays
gttggttgtgcattactgcattgcatccagtaaaaaaactacagctcaaccaaatttagccgagcggagacgcacaagccggcgtgggctgcattacacgagacgatcaacaagggcagcggcccagcagcaacgaaccaccgcacaagcgccaggccgccagctcgcactctggtccagccacgcggcgccgctgccaccttcctctcaccgtgtacgtcttcggcgtacacgtctctctctctctctctcctcccctaaaccctacgctgcccttctttccctccccgtctctccctcccgtgcgggcggcggagctgatgagatcccggccatggcgggccccacctcgcggctcctcatcctcgcccgccgcgccgaccgacgcagatgcctcccttttctcgttccccgcgccttgcaggccgcccccccgaccttttctccggcgttgccgctacctccctgcctccccgcctcaacgccggtgatgagctattcaagtgcatttacaagtgtacatggagagaggccttcatcagaatatgcaaagatcaggaaggagtcactggaaacccagtttggaagaatattgggttcaagttcacgcaggcattttgctgaccgtggctttggtccattccttgctctatacagggctgctactatctcctttcatgttgtaaaactcactatttggcatttgttgctcaatgatatgcataaaagagcagaaaagtttcgagagaccttgatacgcttgggtcctttttatatcaagcttggccaagcattgagcacacgccctgatatacttcctagtgcgtactgtcaggagcttgcaaagctacaggatcaaataccaccgtttccaactcgcattgcactcaggaccatagagtctcagttgggttctcgaatttctgatttgtttgctgatatcagcccagagccgattgcagcagcatcactggggcaggtttacaaagctcatctacgatctggagagcttgttgcagtcaaagttcaaaggcctggaatggcgcccttgctgactctagatgcacttttgttccacatgattggaggacaaatgaaacgatttgctaaggctcgcaaagacctattggtggccgttaatgagattgtcagacacatgtttgacgagattgattatattttagaaggaaaaaatgctgaaaggtttgctactctttattcacatggttcaagtggggtcaattctgaagctagtacaagtatcaaggtcccaaaagtttactggaactatacatgtaaaaccatattgacactggaatggattgatggaattaagctaactgatgctgagcgcatcagcaaagccaatttgaacaggaaaagaatgatagatgagggtctctattgctcattgcgacaactgcttgaagaagggtttttccatgcagacccccatcctggtaatctagttgcaactgaaggtggatctctagcatattttgactttggtatgatgggagatattccgaggcactatcgtgtggggcttatacaaatgatttacttgcagttgcagatgcgttgcggttttcctttggtgatgtcaggaggcaatcaaatgatttccagggcgtaatgaaccatttgtatgatgtgatgtatgaatttagtttctcccttccccctgattatgcgttggtgataagagctcttggttctctagaagggactgcaaaagcactggatcctgagtttaaagttattgagagtgcatatccttttgtaattgggagactccttgcagaccccagccctgatatgaggaaaatattgcgggagcttcttatatgtgacgatggatccatcagatggaatcgactggaaaggctgtttcatggacctatcctttctgtgaacatgattactaatttgtggtagccctcttgacacatagaaccactaagctatatctgaacagtcatcagaatcttcaagcgcatcaggagctgactccagtgagaacgccaatggaagtcctgagtggagatcatttgatatgcattctgtgattgcagctacagaagacctatttgatttcattttatcgaggaaaggatggcgggttcgggttttccttgtccaggacatcgttaatgcttcagacgtgttccttcaagaagcgacattcccatatgtatatgcgaaagtgggaaagataggggacctaaatccagagagaagtaagatgatcaggaggctggtgaatactgtgcaatcgttccgccaagctatcaatttggctccagatgcttggagcgccatgctaatccgcactttgttgaaacctgaatcacaaaaatttgttcttgatgtgtttttggccctggctaaccattccagttacaagattccagaaacattctggctatttatgtcaagatttctaaattacttggacaaacaagatatactttaggaacggttaatatatcaattcctttttttttgttatggcttgaattt

SEQ ID NO: 143120 - DNA, 2587 bp, Zea Mays
gttggttgtgcattactgcattgcatccagtaaaaaaactacagctcaaccaaatttagccgagcggagacgcacaagccggcgtgggctgcattacacgagacgatcaacaagggcagcggcccagcagcaacgaaccaccgcacaagcgccaggccgccagctcgcactctggtccagccacgcggcgccgctgccaccttcctctcaccgtgtacgtcttcggcgtacacgtctctctctctctctctcctcccctaaaccctacgctgcccttctttccctccccgtctctccctcccgtgcgggcggcggagctgatgagatcccggccatggcgggccccacctcgcggctcctcatcctcgcccgccgcgccgaccgacgcagatgcctcccttttctcgttccccgcgccttgcaggccgcccccccgaccttttctccggcgttgccgctacctccctgcctccccgcctcaacgccggtgatgagctattcaagtgcatttacaagtgtacatggagagaggccttcatcagaatatgcaaagatcaggaaggagtcactggaaacccagtttggaagaatattgggttcaagttcacgcaggcattttgctgaccgtggctttggtccattccttgctctatacagggctgctactatctcctttcatgttgtaaaactcactatttggcatttgttgctcaatgatatgcataaaagagcagaaaagtttcgagagaccttgatacgcttgggtcctttttatatcaagcttggccaagcattgagcacacgccctgatatacttcctagtgcgtactgtcaggagcttgcaaagctacaggatcaaataccaccgtttccaactcgcattgcactcaggaccatagagtctcagttgggttctcgaatttctgatttgtttgctgatatcagcccagagccgattgcagcagcatcactggggcaggtttacaaagacctgagttctccaagttgaaatgcattcctttgatacttcaagtaatgcagctcatctacgatctggagagcttgttgcagtcaaagttcaaaggcctggaatggcgcccttgctgactctagatgcacttttgttccacatgattggaggacaaatgaaacgatttgctaaggctcgcaaagacctattggtggccgttaatgagattgtcagacacatgtttgacgagattgattatattttagaaggaaaaaatgctgaaaggtttgctactctttattcacatggttcaagtggggtcaattctgaagctagtacaagtatcaaggtcccaaaagtttactggaactatacatgtaaaaccatattgacactggaatggattgatggaattaagctaactgatgctgagcgcatcagcaaagccaatttgaacaggaaaagaatgatagatgagggtctctattgctcattgcgacaactgcttgaagaagggtttttccatgcagacccccatcctggtaatctagttgcaactgaaggtggatctctagcatattttgactttggtatgatgggagatattccgaggcactatcgtgtggggcttatacaaatgcttgtacattatgttaatcgggactccttaggcttggcgaatgacttccattcactaggatttgttcctgagggaacagatttacttgcagttgcagatgcgttgcggttttcctttggtgatgtcaggaggcaatcaaatgatttccagggcgtaatgaaccatttgtatgatgtgatgtatgaatttagtttctcccttccccctgattatgcgttggtgataagagctcttggttctctagaagggactgcaaaagcactggatcctgagtttaaagttattgagagtgcatatccttttgtaattgggagactccttgcagaccccagccctgatatgaggaaaatattgcgggagcttcttatatgtgacgatggatccatcagatggaatcgactggaaaggctgattgcagctatatctgaacagtcatcagaatcttcaagcgcatcaggagctgactccagtgagaacgccaatggaagtcctgagtggagatcatttgatatgcattctgtgattgcagctacagaagacctatttgatttcattttatcgaggaaaggatggcgggttcgggttttccttgtccaggacatcgttaatgcttcagacgtgttccttcaagaagcgacattcccatatgtatatgcgaaagtgggaaagataggggacctaaatccagagagaagtaagatgatcaggaggctggtgaatactgtgcaatcgttccgccaagctatcaatttggctccagatgcttggagcgccatgctaatccgcactttgttgaaacctgaatcacaaaaatttgttcttgatgtgtttttggccctggctaaccattccagttacaagattccagaaacattctggctatttatgtcaagatttctaaattacttggacaaacaagatatactttaggaacggttaatatatcaattcctttttttttgttatggcttgaattt

SEQ ID NO: 143121 - DNA, 2528 bp, Zea Mays
gttggttgtgcattactgcattgcatccagtaaaaaaactacagctcaaccaaatttagccgagcggagacgcacaagccggcgtgggctgcattacacgagacgatcaacaagggcagcggcccagcagcaacgaaccaccgcacaagcgccaggccgccagctcgcactctggtccagccacgcggcgccgctgccaccttcctctcaccgtgtacgtcttcggcgtacacgtctctctctctctctctcctcccctaaaccctacgctgcccttctttccctccccgtctctccctcccgtgcgggcggcggagctgatgagatcccggccatggcgggccccacctcgcggctcctcatcctcgcccgccgcgccgaccgacgcagatgcctcccttttctcgttccccgcgccttgcaggccgcccccccgaccttttctccggcgttgccgctacctccctgcctccccgcctcaacgccggtgatgagctattcaagtgcatttacaagtgtacatggagagaggccttcatcagaatatgcaaagatcaggaaggagtcactggaaacccagtttggaagaatattgggttcaagttcacgcaggcattttgctgaccgtggctttggtccattccttgctctatacagggctgctactatctcctttcatgttgtaaaactcactatttggcatttgttgctcaatgatatgcataaaagagcagaaaagtttcgagagaccttgatacgcttgggtcctttttatatcaagcttggccaagcattgagcacacgccctgatatacttcctagtgcgtactgtcaggagcttgcaaagctacaggatcaaataccaccgtttccaactcgcattgcactcaggaccatagagtctcagttgggttctcgaatttctgatttgtttgctgatatcagcccagagccgattgcagcagcatcactggggcaggtttacaaagctcatctacgatctggagagcttgttgcagtcaaagttcaaaggcctggaatggcgcccttgctgactctagatgcacttttgttccacatgattggaggacaaatgaaacgatttgctaaggctcgcaaagacctattggtggccgttaatgagattgtcagacacatgtttgacgagattgattatattttagaaggaaaaaatgctgaaaggtttgctactctttattcacatggttcaagtggggtcaattctgaagctagtacaagtatcaaggtcccaaaagtttactggaactatacatgtaaaaccatattgacactggaatggattgatggaattaagctaactgatgctgagcgcatcagcaaagccaatttgaacaggaaaagaatgatagatgagggtctctattgctcattgcgacaactgcttgaagaagggtttttccatgcagacccccatcctggtaatctagttgcaactgaaggtggatctctagcatattttgactttggtatgatgggagatattccgaggcactatcgtgtggggcttatacaaatgcttgtacattatgttaatcgggactccttaggcttggcgaatgacttccattcactaggatttgttcctgagggaacagatttacttgcagttgcagatgcgttgcggttttcctttggtgatgtcaggaggcaatcaaatgatttccagggcgtaatgaaccatttgtatgatgtgatgtatgaatttagtttctcccttccccctgattatgcgttggtgataagagctcttggttctctagaagggactgcaaaagcactggatcctgagtttaaagttattgagagtgcatatccttttgtaattgggagactccttgcagaccccagccctgatatgaggaaaatattgcgggagcttcttatatgtgacgatggatccatcagatggaatcgactggaaaggctgctatatctgaacagtcatcagaatcttcaagcgcatcaggagctgactccagtgagaacgccaatggaagtcctgagtggagatcatttgatatgcattctgtgattgcagctacagaagacctatttgatttcattttatcgaggaaaggatggcgggttcgggttttccttgtccaggacatcgttaatgcttcagacgtgttccttcaagaagcgacattcccatatgtatatgcgaaagtgggaaagataggggacctaaatccagagagaagtaagatgatcaggaggctggtgaatactgtgcaatcgttccgccaagctatcaatttggctccagatgcttggagcgccatgctaatccgcactttgttgaaacctgaatcacaaaaatttgttcttgatgtgtttttggccctggctaaccattccagttacaagattccagaaacattctggctatttatgtcaagatttctaaattacttggacaaacaagatatactttaggaacggttaatatatcaattcctttttttttgttatggcttgaattt

SEQ ID NO: 143122 - DNA, 2535 bp, Zea Mays
gttggttgtgcattactgcattgcatccagtaaaaaaactacagctcaaccaaatttagccgagcggagacgcacaagccggcgtgggctgcattacacgagacgatcaacaagggcagcggcccagcagcaacgaaccaccgcacaagcgccaggccgccagctcgcactctggtccagccacgcggcgccgctgccaccttcctctcaccgtgtacgtcttcggcgtacacgtctctctctctctctctcctcccctaaaccctacgctgcccttctttccctccccgtctctccctcccgtgcgggcggcggagctgatgagatcccggccatggcgggccccacctcgcggctcctcatcctcgcccgccgcgccgaccgacgcagatgcctcccttttctcgttccccgcgccttgcaggccgcccccccgaccttttctccggcgttgccgctacctccctgcctccccgcctcaacgccggtgatgagctattcaagtgcatttacaagtgtacatggagagaggccttcatcagaatatgcaaagatcaggaaggagtcactggaaacccagtttggaagaatattgggttcaagttcacgcaggcattttgctgaccgtggctttggtccattccttgctctatacagggctgctactatctcctttcatgttgtaaaactcactatttggcatttgttgctcaatgatatgcataaaagagcagaaaagtttcgagagaccttgatacgcttgggtcctttttatatcaagcttggccaagcattgagcacacgccctgatatacttcctagtgcgtactgtcaggagcttgcaaagctacaggatcaaataccaccgtttccaactcgcattgcactcaggaccatagagtctcagttgggttctcgaatttctgatttgtttgctgatatcagcccagagccgattgcagcagcatcactggggcaggtttacaaagctcatctacgatctggagagcttgttgcagtcaaagttcaaaggcctggaatggcgcccttgctgactctagatgcacttttgttccacatgattggaggacaaatgaaacgatttgctaaggctcgcaaagacctattggtggccgttaatgagattgtcagacacatgtttgacgagattgattatattttagaaggaaaaaatgctgaaaggtttgctactctttattcacatggttcaagtggggtcaattctgaagctagtacaagtatcaaggtcccaaaagtttactggaactatacatgtaaaaccatattgacactggaatggattgatggaattaagctaactgatgctgagcgcatcagcaaagccaatttgaacaggaaaagaatgatagatgagggtctctattgctcattgcgacaactgcttgaagaagggtttttccatgcagacccccatcctggtaatctagttgcaactgaaggtggatctctagcatattttgactttggtatgatgggagatattccgaggcactatcgtgtggggcttatacaaatgcttgtacattatgttaatcgggactccttaggcttggcgaatgacttccattcactaggatttgttcctgagggaacagatttacttgcagttgcagatgcgttgcggttttcctttggtgatgtcaggaggcaatcaaatgatttccagggcgtaatgaaccatttgtatgatgtgatgtatgaatttagtttctcccttccccctgattatgcgttggtgataagagctcttggttctctagaagggactgcaaaagcactggatcctgagtttaaagttattgagagtgcatatccttttgtaattgggagactccttgcagaccccagccctgatatgaggaaaatattgcgggagcttcttatatgtgacgatggatccatcagatggaatcgactggaaaggctgattgcagctatatctgaacagtcatcagaatcttcaagcgcatcaggagctgactccagtgagaacgccaatggaagtcctgagtggagatcatttgatatgcattctgtgattgcagctacagaagacctatttgatttcattttatcgaggaaaggatggcgggttcgggttttccttgtccaggacatcgttaatgcttcagacgtgttccttcaagaagcgacattcccatatgtatatgcgaaagtgggaaagataggggacctaaatccagagagaagtaagatgatcaggaggctggtgaatactgtgcaatcgttccgccaagctatcaatttggctccagatgcttggagcgccatgctaatccgcactttgttgaaacctgaatcacaaaaatttgttcttgatgtgtttttggccctggctaaccattccagttacaagattccagaaacattctggctatttatgtcaagatttctaaattacttggacaaacaagatatactttaggaacggttaatatatcaattcctttttttttgttatggcttgaattt

SEQ ID NO: 143123 - DNA, 98 bp, Zea Mays
cttcctcctttcagccagaacgcggctgcgtgcaggccctcccgcggtggatctccattgtgccatggaagaggggctctcggccaccatgccggagc

SEQ ID NO: 143124 - DNA, 994 bp, Zea Mays
attccatatttccatcctccattcacgcatcacaagctggaaggcactgtgggcaataatggctctgctcacgctccagccagcgatacccttcctcctgctcctcctcctccccgccgcgtccgctgggctgcccggcggccggacactggtgttcatcctggctgggcagtccaacatgagcggccgcggcggcgccaccaacggcacctgggacggcatcgtcccgccggagtgcgcgccctcggaccgcatcgtccgtctctccccggcgcttcgctgggaggaggcgcgcgagccgctgcacgccggcgtcgacgtgggcaacgttctcggcgtcgggcccggcatgcccttcgcgcacgccgtgctcgccagcgagggcgcagccgcagagccccccgtcgtcgtcggactcgtgccgtgcgcgcagggcggcacgccgatcgccaactggtcccgggggacggagctgtacgagcggatggtgacgcgcgccagggcggccgtggccgagtgcagcggacgcggtcacctggccgccttgctttggtaccagggggaggcggacaccatgaggcgccaggatgctgagctctaccagcggcggatggagactctcgtgcgtgacgttcgctgcgacctcggccggcccgacctcctcgtcatccaggtgggcattgcaactgcgcagtacaatggcaagttcctcggcgtggtgagggaagctcagaaggcagtgaagctcccaaatgtcaagtacgttgatgccatggggctgcccatcgcgagcgaccacacgcatctcaccacggaggctcaagtccagctcggcaacaaactagccgagtcgtatttagaaacgctgtaattttcaaataccggtatgcctaccaaaaacaaggcattcccccacgatttggaaacggacagagcaagcaatatgtacactcaaattacgatgctgcgttgagattaatattttccgtgctat

SEQ ID NO: 143125 - DNA, 676 bp, Zea Mays
tggaggtgagctcacagcctcagaggccaacggcaaatcagccatcagctactatagctttatatatcctgtcgaaataacactttacaaagaccaggaaggaagccgtgtatctacaacaaaccatatctcagttaaaaaaaaggtttttaaatcgagtatatacacttgggccgatgaatgctgtcatccatatagttctccgggggaacgactgatggcatttacaaccaatgggcgtaaatggtaatgacaacataacatacaccgcgcagccaaacagggtgtgcagcttttggaagggcacaaacgaaagagctcgctcttgactaaaaccaatggtgggggcttgcagtgcccaatttttgctgcggcgcagagcgtgaagcagcacacctaggaggaaatggatcagagaacagatataatttaccctggctacacactccaaaactcctatgttatttcgttttcctcttttagtagcatagaagaagctgaggatgcgctttgtaattctgccgctctgcgactactggatgctgaactgtggaccctgtgtggtactggtaagctggtggaagatgacccattggcgttggcagcagcatggctaccgttcctgactgctggaacatcatggctgtgcttcccttcgtaagtcgttatgacggcc

SEQ ID NO: 143126 - DNA, 123 bp, Zea Mays
gcagaagatggatagcactagataatttgctgttagtgttcatcattcagagaagtgacctgcgtcagtaccttttgttcaggtctatattatatcagctgccttttttggctccattttacc

SEQ ID NO: 143127 - DNA, 324 bp, Zea Mays
catttatatccattattatttgttcatatgcaggcaacttgaaagacagcagggttgcatcccacaatgtcagctcccaacagtgatagcaacatgcagcagctagtccctatagcaccaccaggaaaggcttctggtggtgacagtgggaaggagctggttgtggcagatcctgcaggtaagagatcaggaggtgtaaaactgcgagaggatgaggaagacctggaggtgaagctcaggcgcatcatggagaatgtccctgtgcgtgtcagtaacacatcagggtcatctgctggctctggctctggtgatttccaccagtaa

SEQ ID NO: 143128 - DNA, 980 bp, Zea Mays
tacatgtaaaagtaatatgctgaaatatattaatagtacatgtaaaagtaatatgctgaaatatagtaacaatacatgtaaaaataatgatacctgcacatagtttgcatatcctcaaatggttcttcacttgttcttcagtgagcttcatcttgaaatagtcatttagagccttagcacacatgttaaggtgaactttcttgaagcctgttgatgtcctgatcccttcagccacaaggcttgctaggttactgagcatgtaagcggacattgcagaagtccacacaacatggctactaccatcagcttgttctacaaagtgctcaccagctccttcactctccattttctgcaatatggttatgtccagacatatacatcccatgaagaactttgacataaatgattgatgtccatgaatacattaaataagtcatgtgcatatagcaagaagtaatctcacacaatatatgaatacattaattaagtccatatattaatgtccataaataaaaattacagcaagaaaaacaataacaaattaggaagcatagtggttttgacgatcttcccacatctgatttgctatttcctgcctcaaattaaccatgaatgcatgttcactagcttggccacttgttgttgtagcatgattatgaattggccaattagattcttcaatgatcagctcatcacctccatcttgtatgacccaattgtgaataatgcagcaggctacaacaatatctacttgagtagaaaatgaaaagaatggtgtggcatcatcaagtattttaaatcttctcttcagtgaaccaaatgcacgctctacggtgacacgaagagacgagtgcctaaggttgaacaactccttctcattttgtaccggattatttccccattcattcaagtgataccggacagcacgaaaagggggcaaaaatccaggtttggctccatatccagcgtccactagatag

SEQ ID NO: 143129 - DNA, 1409 bp, Zea Mays
cttcgcctccactccatttgtgtcggatctaaaacctcgcaagccaaggtacacgacgagcgaccatgtcctcctccttcgactccatcacggccgtcgtaggagatgacgacgagctaccgccagccccgttcgacactgccgtcgacgggaccgcagcggagtacggcggcgagcagcagggcttcggcatgcgccgcggtcaccgttttgccgcgtcctactcgtccttcggcaccgccgtctcggaggacgatctgggcggcgccggcggagaaggcggcggtgggtacggaggcttcggcatcccgccgtactccaacggcggccccgcgtacgggtacgccgacaacgacgcgaacggcgtggagcatgtcatgggcgcccaggacgtgatggatggcgcggcgcacgcggcaggggacatcagcggtggccgactcgatgaggacctgttcagtggtgcggccgacgacgacgacggggccgtcctgccgccgccggaggccatgcgggaggagggcattctccgccgagagtggcgccgccagaatgcactgatgctggaggagaaggaacggaaggagagggagcgtcgcaacgagattatcgcagaagcggaggagttcaagaggtccttccttgacaagcgcaggctcaactgcgagacgaaccgaacgcagaacagagacagggagaagctgtccctggcgaaccaagagaggttccacaaggaggcagaccagcagtactactggaaggcgatcgcggagctggtgccgcgcgagatcccggggctggagaagaggggcaagaggaaggagcaggagcgaaagccgggcatcgtggtggtgcagggtcccaagcccggcaaggccaccgacctctcccgcatgcgccaggtgctcctgaaactcaaggacaaaccaccatcgcacatggtgccgcctccaccgcaggccaaggaggagaaggagaaggatggagataaggacgccaagaaagatggcaacaagcaggaagaaaagaaggatggtaagcagcaggcagctggaccggccgagaagaagactgatggccctgagatggccagtgctgctggatctccgccgtagccaactgaaaggccggtagcaaaggcaccagagcattagagcaagcggtgaagtgattgccatgtgcccatgatgataatgctatctagtcgcttctagtaataagaacatcgggaaataatgtccttgagctgtggttcaaggaaaactacgctggataaattaatctgtctggagtttgagcgcagttttggtggcaggggtagctatctgcctatctctatgtttggtatttaaaggttagaggctgatgctgcttagattcagataatactagtgataatatacttttgc

SEQ ID NO: 143130 - DNA, 1165 bp, Zea Mays
agcgcaacgagccaacgcccgtccagtagcggctgccaggtgcaccccacccgtctgccgcattcgttaggttttcccgcatccgtccagtaggcgcgtacccaccccgaaatgccaaaaaagcgaagctttgcagcactccacaccgacaccgcgacacgcgaccgcactgcctttaaactactcactcaagtacctccccggactactagctcacaccagcggtacccagcccacaccggcagatcagctgcgagctagtagacatcgaccggaccgaccaacaggagcagcaagccgggctagctcgctcgctcgctcgcaatggcttccatcatcgtgcaggcggtggtcatcctcctggacgtcatcgccttcggcctgggcgtcgccgccgagcagcgccgcagccgggccaccgtcaccccggacgccgccaaggagtacgactactgcgtctacgactccgacatcgccacgggctacggcgtcggcgcgctgctcctcctcgccgccgcgcaggtcgtgctcatgctcgccagccgctgcttctgctgcggccgcgggctcaagccgggaggctcccgcgcctgcgccctcatcctcttcctcttcacatgggtgaccttcctcatcgcggaggcgtgcctgctggcgggatcagtacgcaacgcgtaccacacccggtacaggggcgtattctacggcgagtccctctcatgcgagacggtgcggaagggcgtcttcgctgctggcgcggcatttaccttcttcacggccatcctgggcgaggtatactacctcagctactccaaatcccgagatgccgctggtggtgctggctccagcattggcatgggcccttacaactaaaggagcttgatcgaggcaggcaggcagcccccgtgttttcaactctgcttcgtggtggatgaatgcagtgttctttttaacattaccttagtagggacggtgtaattggttgttggatccgcggttttttcctctctctttaggttcttgtatgaggttactcggttgggccgtatactgtttggattattgggctggattctggacatggtatacacgtattcgtagtatgctatgctgtttatatgtatgtgaaagaaataatagaagcgttgcatcgtctatccaaaca

SEQ ID NO: 143131 - DNA, 2659 bp, Zea Mays
ctggatttttcttcacaggtgcttatctcctccccggagctccctgctcctctcttccccagccgtgcccagctcctctgctcgccggccgcgagcccctgtccatggccgcgcgtcttcctccgtctccctgttgtcgtgccctggagttccctacgcgcttctctgctcggtgccctgcttgctcccgatgccgcactcggtcgccatggcgtgcccaggctccagctcccctgcgcgtgctcgccggccggagctctctggcgcgctcgcccatgccgcgcgcagccgagctcgccctgcgcaccccatctcccaggtgctcggccagctcgcccatggtcgcgcccttgacttcgccccagcgcccgaccgtcacttccatggcgcgcccatcccctgcgtcctcccctgcatcgtgccctcccatctccctgttgtcgcgcctggctcgccccctgcgcgtgtgtcctcgccgcgcccgagcgctctgctcactggtgccgcaaccccagccggagctcctggcttgcccctgcttccatgactgaccgcgcggctcctctgcgccgtcattctttgcgcccatgcgtggagcttcctccctcgctgcgctctctctagatcttggttggtcgagctcgccggcgttgctggcctctagctccctccagctcggcgtccatctctactgctcgcccctgcgctcggatttttcctctcggccggtcgtggatttctctgcgccgctctctctctcccggcgcttcttccctgcgcgctccaactttccttccatggcgcgtccgtgtttccttctcctggacgccgcgtcctcccggccatggagttcgccgttagccgccccgtcgtgctcgtttctggtgctcgctccggctccggccacgaacgttgtcgagcccgtcgttttcctgtccagttctcgcgcggcttcctgctcgccagcgcgctctctcagctccgctcggccgctcctcttgttccctgtccgtggtggtgttgtggcgtagcgacgttgtgcgcgtcgcggcagccgtcctggccgcaggaacagtccacgccatatagctcgcccagccatgaccttgccttgctcctcgcgtcaccgttcatcgagctcatccaacacttgccttatcctagccatagtccgtgcctccttgaattccctccctggccggtcatcgtgtgtgctcgtgctcaactgcgcttgattacatccgtgtcgttcttcgacttagtgctagcgtccacttggctctagctcgctagctatcagcgctcgcagttggtcccggttttgagctcgtcgtctggtacctagccacctagccactgactagcgcttgcgtcggccacgaaaaacctcgacgtcgaacgtgctgttctacgcaagacaggcccgcgtcattattattcttatcgggattgccgacgtcaatcgcctcgacaacaaccacatccatgactcggcgttccaattttgccgcaccgccctttaaattcgagtcctcgtccgtagtatcgtcattgacctcgcaacttcagctcgaattaattatggtgagttgatctgttattcccgtcaactaaataaatggttggattaaatagatacatctattgcgatgattctcttgtctattatttgatgtggaggttaaagttgaatttcgggtttatgtgatcagtgtattagtaaaatatatgttgtgtgatgatgctctacttgatagattaagtatagtgtgatgttttattagttaggatattttaaggattaattcaaaagagtggtttaaatagttagttaagttgtttcggtccatacttcgagtttcatgtcctaaaataatgagtctaagtaattagtctttcggtattatgctttagtcaaatagaaaggtggaactcatatggtctattgttttcctaatgaatgaatctaggtttgatagtcttgtggtgttgggccttagctaagcaaagtagatgtgcgtataatttattgttccttgatgtttgagttaaatctggtaaaactagaaaatcgtgattgttgtgtttagtgagttataggtgtctagtgcttatgtaggattgtgtcgatgtcttgccgctaagtatttgattctcttttctgtatcatccggttactttatgctcatacatgtgcattgtgcatctcatgaggtatgataattaatcgcgtgatgtggagaacctgagccaagtcgaccccaagtgtgggctactccgcatggtgatgctgatggacgaacttgaagatggataattgaacgagtaccaagaaaaaggatggtcgtcaagtgatcgtcgtctaacaacactaacctagtgttaccaaggcaagccccggtgcgtttgccaccttgataggagttgtgtgctaaaccgttgatgcatttccttccttgaaaaattgattacccatccttgataccctttttgaaaagaattttatgatgcttagccttgttttagcaaataaaaaaatattttctgacaagtaaaaatggatttttaaggatccactcatagtaagcttttctgcaaacagagtccttgattcttgataagccataccttgaacccttttgaaaccagcatacccttg

SEQ ID NO: 143132 - DNA, 1094 bp, Zea Mays
tttagcggcttggccggttactcggaattcgcaattattctatttcctgatgctagcaatgtatagtggtcaaataggattattttcttcatgagaccttttacttttttatcatgtgggagttagaattaattcctgtttacttacttttatccatgtggagggaaagaggcgtatgtattcagctaccaagtttattttgtatactgcaggcggttccatttttttcttaattggagttctgggtatgggattatatggttccaatgaacccggattagatttagaaagattgattaatcaatcataccctacaacattggaaatactactgtattttggcttccttattgcttatgctgtcaaattgccgattatacctttacatacgtggttaccagatacccatggggaagcgcattacagtacatgtatgcttttagccggaattctattaaagatgggagcatacggattgattcgggtcaatatggaattgttaccgcatgctcattatctattttccccttggttggtaataataggagcggtgcaaataatctatgcagcttcaacttctcttggtcaacgaaatttcaaaaaagaatagcctactcctccgtatctcacatgggtttcataattataggaattggttccataaccaacattggactaaatggagctattttacaaatattatctcatggatttatcggtgctacactttttttcttggcgggaacgacttgtgatagaatgcgtcttgtttatctcgaagaactggagggaatatctatcccaatgccaaaaatttttaccatgtttagtagcttttcagtggcttctcttgccttgccgggaatgagcggttttgttgcagaattagtagtattttttggactaattactagtcctaaatttatgttaatgccaaaaatgctaattacttttgtaatggcaataggaatgatattaactcctatttatttattatctatgttacgccagatgttctatggatacaagctatttcatgttccaatcaaaaattttgtagattctggaccacgggaactctttcttttaatctg

SEQ ID NO: 143133 - DNA, 242 bp, Zea Mays
atgtcacattctgtaaaaatttatgatacatgtataggatgcactcaatgtgtacgagcttgcccaacagatgtattagaaatgataccttgggatggatgtaaagccaagcaaattgcttccgcgccgagaaccgaagattgtgtgggttgtaagagatgcgaatccgcctgtccaacggatttttaagtgtccgcttttatttagggcctgaaacaacccgcagcatggctctatcttat

SEQ ID NO: 143134 - DNA, 1466 bp, Zea Mays
cttactagccttccgagaagaggatgcagatgaaggcaacaacgaatcagcccaatggagccgcagtgcaacgtcggtatgttcacgcgcgccgagctgctggaggccagcgtggagcttcgtcatcacgccctcggctgcgtcaagtccacggccctccggtgcgctgtcaagctcggcgtcgccaacgccatccagcgccgtggcggcagggcctccgtcgaggacctgctcaccgagctctctctggacgcgagcagactccgctgcctgcacagcgtcatgcgcgcgctcgccgcgttgggcgtcttcaaggaggggagcgacggcgagtacggcctcactgccatttcctcgctgctcgtggacgacgacagcagcgtccgaggtagcctccggccgatcacgctcttgtacctggagcctgcattcgtggcgccagtgctcaacctggcagattgggcccttgctggtgtcgatggtagcgacgacgacaacaactgcagtgctcgaggaacggcgttcaagatgacgcacggcgaggacgtctgggatgtcctcgcgcgcgacgcctttctgggcgacttcttcaacggcgcgctcgcgtcagagactcggttcctcatggacatagccatccgcggatccccccaggtgttcgagggaatagcatcgctagtggacgccggcggtggcaccggcgcagcagcccaagcggtggctgcagcattcccggacacccggtgcacggtgctggagcttccgcaggtggtagacgctgctccgattgatgggccggttcgctttgtcggaggtgacatgacgaagttcatccctcctgctgatgccgttcttctaaagaatgtgctgcatgactggagtgacaaggattgcgtgatcatcctaaagcgatgcaaggaggcgattgccgccagtggaaaagtgatcgtcatagatattgtacttgggtcatcttcccttgcaatttgcaacgagacccagctctggcttgatcttttcatgtccacggtaacgacgggcaaggagcggagggaggaagaatggtatcggctattcaaggaagctggattcagtgcgtacaagatcagcccagttctagggcttctctcgatcattgaggtttttctgtagccaccctgttcatctgggagactgggactggggctgctcatcacattttacggcattgtacgtctgttttgtaccaaaccttcttctaattagattccctcgcgtgtagcgctcctacggactacagtgtagtatgcttcgtccatgaaaccaatgtgtattgaaaacatcctacaaactacctttctaatagcaagtttaataatatagccaccagcaggcggtaagaaatccttgcaacctactttttagcttatatgcataatggttagttcttcattattaatgtatgacccacttatctctcttacaat

SEQ ID NO: 143135 - DNA, 1171 bp, Zea Mays
attttgattaagtatacccgatgccattgatcttataggatgtatatcatggcattattgcaaagatacaacattgctccttataaaaatgctaaaataatattgacaaagtattgttgtattattatgactgaatttagaggtatcagaatttagcaacaaacaaagtcactctatcaatttaaaggtctcagaatttagcagcaaacatgtggagtttagaaaaaaaaagatagcagcaaacacgtaacttggagtttagaaaaaagagatagcagcaaacaagtatcttgtttgcttgcgctaaatggtagatcttctaaagataggaactggagcatcatctaattatggcatatgcatcctcaggacaggttgcggtgctaccaataacataattaccactgctatgcaagaacagcagggatctcaacaagaaagataccttgtgaggaaggcactcaagtctgctctatctcacttgaaagcagaccatgcaggagattttcttagttgccatggccagagagaggaaccatctgtagttgagtcctactataacaagcggatagtcggctgccctggtggtgagggagaggatgaacacgatgttgtatggttctggttgaaaaaagatgagccgcatgagtgtccagtctgctcgcaatactttgtgcttaaggtcattggtgatggtggtgatccagatggtcatggcgatgaagatgatggacatcactaaggatgccttgtggttctgaaaataagaacttggtgaggcagatgaatccaatacactccttttttctagaaccagactgctccacggcatccttgtttatgaaaagacagttggccatcaagcaggtggtagttttcacctagggattttgtccaaacaaaagctgtctgagatttgacccatgcgtttctttaagagcatcgtcgaataaaagatgactgcagtcagattgctttcttttgatacatcatattggcccatcgggtgtgatggacatgtaatattcagttatggaacagccccatttctatgcttagcgtgttgggaattttgcaaaaggcctcctatatcattgatgagttttaagccagagtttgatgatccaacatgtttatgaccattgttttaatagtcatgctattctgtgac

SEQ ID NO: 143136 - DNA, 805 bp, Zea Mays
atttaaattaattttcagcagtgctattattttttctgctatttgttttggaccgattaatattttgtgtactcttcctatttattcgtgggactgtaactgcaaagcttgtaactcaagtcatatgtgtcttgtgcctgctgttgtagctatggagcagaaaattcatgtgaacccactgaagatactaagccaaacgaagtgtacacatattcagaattctagctcaagctgccctaatcaactgaggaggataaggatgccgtggattttgagagggaggagcccgccaattgccagaagtctgtgcaagctgatgcaaatgcgacagctgccccgtctaaggctgttggcttcttcgggaggacattatacaccacattaattctgcttgttgcgagccatccagatgtgtatgagccatgtgatgatttctttgcccttgttgatgcactactctcagacaaagcacaacttttgacactacaaccaaggttatgtatgtagacgatgacactatcatgcaaggcccactatcctctttgttgtcctctcatggatcctggtccagtggtggaggctgaggaatcagaaaggccctagatcatggccagtcatcgacgcaacggtggagcttatggctggaagtaatatgaagagtctatatctgacaaaaaatcatctaaaattaaatagtgagataagctttgaatagctgatgtaaaattatggagtaacattgtattagttgttgacaaaaaatgtgagaaatttaggtcaataataatatatgtattgtttgttt

SEQ ID NO: 143137 - DNA, 1786 bp, Zea Mays
cgcggatctccctgtcgcccccaaccaccttccatccctcgtgacctgttcatgccgtcgccgcctcgatcctgtggatctccctgccgcctcccacgtccgtgctcatgacctgttccgcgtccgctgtcacccccagatcgcgcgaggcccatgtccacgcagtcatcgtcgccgccccctggccacgcgagatgccagcgccccctccaccttgcgtgagcgaccccttcatctaccttcaccaccatcttcaatccgcctctgcatcaccgccaaaaccctacccacttccctgctgcccaacaatgaatctgcctccgcaccaccgccaaaactctagcaactatggcagtgaacaacatccggtttcaagtctttggcagctatgctcatggaaaatacgtctatgttgatggtgaccgatctgttctcgcagaatcagcaaaggcttgatatcattgttgttttgctttatcatttgggcatttgaagcaaagctctatggagaaaaggcagggaaatgttgtctttctcatttttgcaggctgacgaatttaatgcagtggcaagagttggggttgctgctgaccatcgtggaatcatctgcagtcgtcgtgtgtccacactccctaacatgttgagcctcttgctgatcagatcaggcttgagaaggaaaatttggttttaataagtgttcttgtctggttcgattaaagaaagattcagtaattgtcttttttaggaacatagattcttcatctgtgtataatgtatttttattatctagattgtgatagttatttcaaggcctggtgatcgtatagcttgaccattgattgatgattatctgttgtcttaaggattggtacactgtatgtgttctttggtgttggtggtactttgctgacttctctatttatggtatcaaatatatctattgagtgttggtacttcaggtgcactatttagactattgggatcaatgctgtcagagctcataataaattggacgatatacgagaacaaggtcaattctaaaatatatgcagtattgcaatagtggatggaaacagaacaaaatagttgttccttgcaggtattgcaatatctcaaaccagataaaagtaaatttttactcagctatggagcagaaaattcatgtgaacccactgaagatactaagccaaacgaagtgtacacatattcagaattctagctcaagctgccctaatcaactgaggaggataaggatgccgtggattttgagagggaggagcccgccaattgccagaagtctgtgcaagctgatgcaaatgcgacagctgccccgtctaaggctgttggcttcttcgggaggacattatacaccacattaattctgcttgttgcgagccatccagatgtgtatgagccatgtgatgatttctttgcccttgttgatgcactactctcagacaaagcacaacttttgacactacaaccaagacgatgacactatcatgcaaggcccactatcctctttgttgtcctctcatggatcctggtccagtggtggaggctgaggaatcagaaaggccctagatcatggccagtcatcgacgcaacggtggagcttatggctggaagtaatatgaagagtctatatctgacaaaaaatcatctaaaattaaatagtgagataagctttgaatagctgatgtaaaattatggagtaacattgtattagttgttgacaaaaaatgtgagaaatttaggtcaataataatatatgtattgtttgttt

SEQ ID NO: 143138 - DNA, 1791 bp, Zea Mays
cgcggatctccctgtcgcccccaaccaccttccatccctcgtgacctgttcatgccgtcgccgcctcgatcctgtggatctccctgccgcctcccacgtccgtgctcatgacctgttccgcgtccgctgtcacccccagatcgcgcgaggcccatgtccacgcagtcatcgtcgccgccccctggccacgcgagatgccagcgccccctccaccttgcgtgagcgaccccttcatctaccttcaccaccatcttcaatccgcctctgcatcaccgccaaaaccctacccacttccctgctgcccaacaatgaatctgcctccgcaccaccgccaaaactctagcaactatggcagtgaacaacatccggtttcaagtctttggcagctatgctcatggaaaatacgtctatgttgatggtgaccgatctgttctcgcagaatcagcaaaggcttgatatcattgttgttttgctttatcatttgggcatttgaagcaaagctctatggagaaaaggcagggaaatgttgtctttctcatttttgcaggctgacgaatttaatgcagtggcaagagttggggttgctgctgaccatcgtggaatcatctgcagtcgtcgtgtgtccacactccctaacatgttgagcctcttgctgatcagatcaggcttgagaaggaaaatttggttttaataagtgttcttgtctggttcgattaaagaaagattcagtaattgtcttttttaggaacatagattcttcatctgtgtataatgtatttttattatctagattgtgatagttatttcaaggcctggtgatcgtatagcttgaccattgattgatgattatctgttgtcttaaggattggtacactgtatgtgttctttggtgttggtggtactttgctgacttctctatttatggtatcaaatatatctattgagtgttggtacttcaggtgcactatttagactattgggatcaatgctgtcagagctcataataaattggacgatatacgagaacaaggtcaattctaaaatatatgcagtattgcaatagtggatggaaacagaacaaaatagttgttccttgcaggtattgcaatatctcaaaccagataaaagtaaatttttactcagctatggagcagaaaattcatgtgaacccactgaagatactaagccaaacgaagtgtacacatattcagaattctagctcaagctgccctaatcaactgaggaggataaggatgccgtggattttgagagggaggagcccgccaattgccagaagtctgtgcaagctgatgcaaatgcgacagctgccccgtctaaggctgttggcttcttcgggaggacattatacaccacattaattctgcttgttgcgagccatccagatgtgtatgagccatgtgatgatttctttgcccttgttgatgcactactctcagacaaagcacaacttttgacactacaaccaaggttatacgatgacactatcatgcaaggcccactatcctctttgttgtcctctcatggatcctggtccagtggtggaggctgaggaatcagaaaggccctagatcatggccagtcatcgacgcaacggtggagcttatggctggaagtaatatgaagagtctatatctgacaaaaaatcatctaaaattaaatagtgagataagctttgaatagctgatgtaaaattatggagtaacattgtattagttgttgacaaaaaatgtgagaaatttaggtcaataataatatatgtattgtttgttt

SEQ ID NO: 143139 - DNA, 839 bp, Zea Mays
ttactgatttactattagcttgtttagtgaagacattctattggttgtagttatcatcaaatgattaggttcaaacatgtgataaggcttttaattcagtaaacgagacagaacatcagtgatatattaccttatagcttcccaccatgtgacattcaactaaagtgttggagtgctaaaaacatgttatccatttgtcatgtactattttgtttcattctaaccaactaatgtgcttgctttaaacgtagggaagtaatcaatatatttatttaagtgaatatccattatagttttatgacaaaaacttgtctttgtaggcttcttcgggaggacattatacaccacattaattctgcttgttgcgagccatccagatgtgtatgagccatgtgatgatttctttgcccttgttgatgcactactctcagacaaagcacaacttttgacactacaaccaaggttatgtatgtaggtagtgtcagatagtggttacgtcgtcacctctattgcaaccatgttttgtacacaatatatgttttatatatggtgcacttggttccgtctctatttcactttttctcttaccctcttcttttcatgctttttcgtcagacgatgacactatcatgcaaggcccactatcctctttgttgtcctctcatggatcctggtccagtggtggaggctgaggaatcagaaaggccctagatcatggccagtcatcgacgcaacggtggagcttatggctggaagtaatatgaagagtctatatctgacaaaaaatcatctaaaattaaatagtgagataagctttgaatagctgatgtaaaattatg

SEQ ID NO: 143140 - DNA, 322 bp, Zea Mays
gagaatgatggaataagtcttgagcatctagaggacagcctgcttttgactgtcctctgtagtcctttagcatctagaggacagcttgactgtgcatctagaggacagcttgactgtcctctgtagtctctttagcatctagaggacagcagtcgctttttgactgtcctctgtagtcgctttagcatctagaggacaacagtcgcttttaactgtcctctgtagtctttttagcatctagaggacaatcctgttgtgtagtgtgtgtgagaaggtgtggtagtgcagcccctagggctataaatatgtgtccccaacccct

SEQ ID NO: 143141 - DNA, 847 bp, Zea Mays
tcggctcctgggcatcagcccccacgccagaagctagggcatcgtccccttgatgtttcccatggccgcctccagctcctcccatggcgcctctcctgtatttctctggccgttagctgcggcgctcgccgtgggcgctgccgtgcccctgtctagttctccacgtcgtcgctgagctcgcccctgccttagtccggtcgcctctgttccctcctctctgtccgtctggtggcaagtcaccgtcgaccctgccatggtgttggctgccgcagcacctgcgtccttgcttcgccggtccgcgtaggtctgaccatggagctcgcccaactccctagccacctctgctcgcccctctctatctcagttcgagcagcagcacgccggggcaaacctatgtccgcgacactcaccaagtgctcgatgaaatactgcagcgagctccacctcgatctgtgcagccccaacccgtgacgtcacaatacccttaccctctgtcgatgtcgtgcatcgcgagctcgacaaaaatctcaagcccgtggacagcacacgcgcgacccgagtttgattctgccaggttgtttaatgtgattttctatccatgcgatttgtcgatgttgtgtatatgtatggttgaacagagtacccgaaggatgaattagtagaatccgtcggtgtcacttgttaatttgaaatacaagcgagtacatatgtgtgttacatgtgtgtttataattctagtgctccaaataatttgaatgtagttagtaaatcgattgttggttctcatttggttgtttgaactctaataaattataaaatgatgaagcatttctatgtatcaagaaca

SEQ ID NO: 143142 - DNA, 1941 bp, Zea Mays
ctccatcaagttagaccatgtttggtttctttagtctagggactaaagtttagttaggggactaaaatttagtctctaacatgtttgtttctaaggactaaaattagtaaaaatatactaaatgactcataagaagactaaaatagcctttaatattctcctgctattagtacaattgaactaaatgaagggcaaatgtagaattaatatgatttagtctttttaaccatatcttgagagactagagactaaatcagtttagtctctgttttaatcctactgtttgacaatttaggaactaaataaaactaaaatagagggactcttaaaccaaacgaggccttagagtaattttgattggccgaagcggcggtctctgccctggaaggagcgcaacgcttccaggtactcagcctccccaaagtcaggccacatcttggcggtgaagaacaactccgagtacgccgactgccatagcaagaagttgctgagcctcatctcgccgctggttctgatgaccaggtcgggacaggagaactcgccggcggcgctcgtcgcgagcttgccggcgatgatcgactcgtcgatgtcgtccggactgagccggttcgcctgcgcctcccgggccagctcccggcacgcctggaccatgtcccatcgcccgctgtagcagatggccagcatcacgtgcagctgcgagttttgcctcgtggcctcgtcggcctgcgccgctgcgctccgcagagaggctggcatcttcgcggcgtcgccgatcacctgcagtcggatcccctgcctgaacgcggaagcagaacatgtaaaaaaaattcaaacggtatactgtggcactgtgctatgcaagatcactgcaggtttttattagccgacgacgacgacctcgagagcttgtcgatgttgtcgcctatcagccactcggacaagcccatcatgtagtcgacctcggcctgcagatacgatgggcgggaagacaagaacgcaccagtgcgtgtcagggtcgtcgtccgatgtgtatgcgagagtttattgaaaagcagggatcgagggcggtgccttggggcggctcaagttctcgcgggagcagacgaaggcggtgagcgcgcggatgccccaggcgcgcgacagcgcaacgacccgctccaggttgcggcccccggccttgtggccgtccgcgggcgtcagcccccgctcgcgcgcccaccgcgagttcccgtccatcaccaccgcgacgtgccgcggcagcgactcacggcgcagcccgctctggagaagcgcctcggccgcgcggtcggcgccaacgcccgtcgcatgcgtctcggcccgcgcgcgtggaggcaggaggcgtgcgcgccgggggcgagcggtcggacgcggcggcggtgctgctgctgctagtgctagcccacgagtggtagcagttgcagaggctgacgaagagtgtgggagcagcatcgtgatctgtgtacgacgaccgtcactgctctgtctacggctctctgccgcccgtgcaaagcagctccattaatatcgtcgagtgcactgccacgcaccttgttcttgtctattattgccgtcttgatctcgactggtacggtggcgtgtggacgtatgccatggcatccaagtttcaacagtcctcttcttttggagggttgaggggaatagtctttcgaggtctgggaacgtgacgaggaagcgccaaggatccagtggtaaaaggaggttacttcatcgcacagtatcgtcagaaggtacggaataccatttacgtcagtggatacgtatctggtttctggcaacaactgtactatactatcagcgtcgggtgtccgttagatctagagtcagatgcaataatggttcctgtatatgtgctagttgtggctgtcacttttcgaaaaattaaatgttttttaactttaa

SEQ ID NO: 143143 - DNA, 2845 bp, Zea Mays
gtccgtgtgcgagggtccgctcctcctcccctccgtgcacccggagggcagcggcgtctcttcttcctggtcgaatctccccgcggctgtgaataggaggaggtcgacgacgccatagcaaaaaacaaatccttggaatgctttcggagggtcggggattcgtcgccggctgcctgcactgatgcttggagcgcgcgaatctgctcaagttttgatcttggcgtgctcttgagtctggaatccgggcattcattggggctttgttctcagtttgcaaggctgcaaggccgtgctagtttgaacccatggagactactagcacaacaaatgaacagactgataggggggcgatgtgggagttggaaaggaatctcgatcagcccatggatgcagaggccggcagattgagaaatatgtacagggaaaagtcctaccctacacttgtgctgttacaacttgctttccaaagccttggtgtggtgtttggggatttaggcacatcacctttatatgtcttctccaacattttccctcatgaaattgaagacacggaacaaattattggagcactctcgcttgttatttactcccttaccctgattccacttgttaagtacgtgttcattgtcttgagggcaaatgataatggccaaggtggaacatttgctctttactcgttgctttgccggcatgcaaagataaacactattccgaatcagcatagaacagatgaagaactaacaacatacagccgccacacatatgatgagaaatctcttgctgcaaagatcaaaaggtggttagaggggcaccaattcagaaagaatgtcattcttattcttgttctttttggtacttgtatggcagttggagatggaatcctcactcctgcaatatcagttctttctgcaactggaggaatacaagtggaagagaaaaaaatgaaaaatgatgcggttgtcatcgtctctgtggtcatattgattggattattcagcatgcagcactttggtactgataaagtcagttggctttttgcgccgatagtatttgtttggttcatactcattggagtcctgggcgctgtaaacatttccaaatatgaccaatctgttctcaaggcttttaatcctatctatgtatatcggtactttaagcgagggaagactagctgggcttctttgggaggaattatgcttagcattacaggaacagaagcactgtttgctgatctctcatatttccctgtacaagctattcagattgctttcacggtggttgtgtttccatgtcttcttttgcagtatacaggccaagctgcctatatagctcagaacaaagatcatgtctcccatgccttctatttttcccttccagattctgtactctggccatcattcattgttgcaacagctgctgcaatagttgctagtcaggcaactatatcgatgacatattcgattatcaagcaagcacttgctctagggtgcttccccagagtgagaattatccatacttccaagaagtatctaggccagatatacagtcccgatattaattggatccttctggtattctgcattgctgtcactgctggatttaaaaaccaaagccagatagcaaatgcatacggtactgccgtgataatggttatgcttgtgacaacatttctcatgatccctataatgctgttggtgtggcgcagccactggaccttggtcatcctgttcaccgtgctgtcactgtttgttgaaattccgtacttcaccgctgtggtgcggaagatcgaccagggtggctgggttccacttgtgtttgctgttgccttcctcatcatcatgtatgtatggcactatggtacgctcaagcggtatgagtttgagatgcacagcaaggtgtccatggcatggatcctaggccttggtccaagcctcggtctggtcagggtgcctggtgtgggcctggtgtacaccgagctggcaagtggtgttcctcacatcttctcacacttcatcaccaacctccctgccatccactccaccctggtctttgtgtgtgtgaaataccttcctgtctacactgtgccactggatgaaaggttccttgtgaagcgaattggtcccaagaacttccacatgtttagatgcgtggcgcggtatggctacaaggacatccacaagaaggatgatgacttcgagcagatgctcttcgacagcctgatgctattcgtcaggctggagagcatgatggaagagtacacggattctgatgagtacagcacccgtgagacgaacctgtcaggcagcgccaacccaagaatcaatggcatcagcgccggttcaaacatggatctcagctacacatcccatgactccattatacaggtgcagtccccaaattatacggggaacagccaggcggtgtcaccaggtcagctgtaccataccgtgggcgacgagattgcgttcctgaacgcgtgcagggacgccggggtggtgcacatcctcgggaacacagtcatcagggcccgcagagattcagggttcatcaagaagattgctatcaattacttgtatgctttccttaggaagatctgcagggagaacagcgccatcttcaatgttccccatgagagcctactgaatgttgggcaggtgttctatgtgtaagcactaaaaccaaacacatgtagtagatgagagttcagcttcggaaccactggagagaatctagctgtgttttgttcataggtaataggagtataatagttgaaagaattgtacagcaaaacagcatctttaatgtgaccatttggagcctgatcagtagtggctagggctggacg

SEQ ID NO: 143144 - DNA, 3145 bp, Zea Mays
caacgagatgcaaccaaatccccgtccactccaccagctctgcaatccgacaagagatttgccaattatttctcctagaaaaaccgatcgcatcagtccccatcctcttcgccgtggggtcggcaggcagggcaaggctaggcagcgcctctccgcgtgtggtccgtgtgcgagggtccgctcctcctcccctccgtgcacccggagggcagcggcgtctcttcttcctggtcgaatctccccgcggctgtgaataggaggaggtcgacgacgccatagcaaaaaacaaatccttggaatgctttcggagggtcggggattcgtcgccggctgcctgcactgatgcttggagcgcgcgaatctgctcaagttttgatcttggcgtgctcttgagtctggaatccgggcattcattggggctttgttctcagtttgcaaggctgcaaggccgtgctagtttgaacccatggagactactagcacaacaaatgaacagactgataggggggcgatgtgggagttggaaaggaatctcgatcagcccatggatgcagaggccggcagattgagaaatatgtacagggaaaagtcctaccctacacttgtgctgttacaacttgctttccaaagccttggtgtggtgtttggggatttaggcacatcacctttatatgtcttctccaacattttccctcatgaaattgaagacacggaacaaattattggagcactctcgcttgttatttactcccttaccctgattccacttgttaagtacgtgttcattgtcttgagggcaaatgataatggccaaggtggaacatttgctctttactcgttgctttgccggcatgcaaagataaacactattccgaatcagcatagaacagatgaagaactaacaacatacagccgccacacatatgatgagaaatctcttgctgcaaagatcaaaaggtggttagaggggcaccaattcagaaagaatgtcattcttattcttgttctttttggtacttgtatggcagttggagatggaatcctcactcctgcaatatcagttctttctgcaactggaggaatacaagtggaagagaaaaaaatgaaaaatgatgcggttgtcatcgtctctgtggtcatattgattggattattcagcatgcagcactttggtactgataaagtcagttggctttttgcgccgatagtatttgtttggttcatactcattggagtcctgggcgctgtaaacatttccaaatatgaccaatctgttctcaaggcttttaatcctatctatgtatatcggtactttaagcgagggaagactagctgggcttctttgggaggaattatgcttagcattacaggaacagaagcactgtttgctgatctctcatatttccctgtacaagctattcaggtaacttattgcctgtatttttgttacaagctgtgaaaatgttcttatgataaccaaggagtctttcagaggccttctcacatgagtacagaaatatatccctttgcttacctgttgatgacatcatatttttgtgcagattgctttcacggtggttgtgtttccatgtcttcttttgcagtatacaggccaagctgcctatatagctcagaacaaagatcatgtctcccatgccttctatttttcccttccagattctgtactctggccatcattcattgttgcaacagctgctgcaatagttgctagtcaggcaactatatcgatgacatattcgattatcaagcaagcacttgctctagggtgcttccccagagtgagaattatccatacttccaagaagtatctaggccagatatacagtcccgatattaattggatccttctggtattctgcattgctgtcactgctggatttaaaaaccaaagccagatagcaaatgcatacggtactgccgtgataatggttatgcttgtgacaacatttctcatgatccctataatgctgttggtgtggcgcagccactggaccttggtcatcctgttcaccgtgctgtcactgtttgttgaaattccgtacttcaccgctgtggtgcggaagatcgaccagggtggctgggttccacttgtgtttgctgttgccttcctcatcatcatgtatgtatggcactatggtacgctcaagcggtatgagtttgagatgcacagcaaggtgtccatggcatggatcctaggccttggtccaagcctcggtctggtcagggtgcctggtgtgggcctggtgtacaccgagctggcaagtggtgttcctcacatcttctcacacttcatcaccaacctccctgccatccactccaccctggtctttgtgtgtgtgaaataccttcctgtctacactgtgccactggatgaaaggttccttgtgaagcgaattggtcccaagaacttccacatgtttagatgcgtggcgcggtatggctacaaggacatccacaagaaggatgatgacttcgagcagatgctcttcgacagcctgatgctattcgtcaggctggagagcatgatggaagagtacacggattctgatgagtacagcacccgtgagacgaacctgtcaggcagcgccaacccaagaatcaatggcatcagcgccggttcaaacatggatctcagctacacatcccatgactccattatacaggtgcagtccccaaattatacggggaacagccaggcggtgtcaccaggtcagctgtaccataccgtgggcgacgagattgcgttcctgaacgcgtgcagggacgccggggtggtgcacatcctcgggaacacagtcatcagggcccgcagagattcagggttcatcaagaagattgctatcaattacttgtatgctttccttaggaagatctgcagggagaacagcgccatcttcaatgttccccatgagagcctactgaatgttgggcaggtgttctatgtgtaagcactaaaaccaaacacatgtagtagatgagagttcagcttcggaaccactggagagaatctagctgtgttttgttcataggtaataggagtataatagttgaaagaattgtacagcaaaacagcatctttaatgtgaccatttggagcctgatcagtagtggctagggctggacg

SEQ ID NO: 143145 - DNA, 763 bp, Zea Mays
ttcgcctcccattacgctctgctagcgtcgaccacagatcgggattggccaggaagcagtcggtggaaacattagggtggaccattgtcgaggaggtacgagtgtgcgatcttggtgcaccagggtggagtgcgtctgggttcataacacgcgtggcgggcggcgttctcagcgacatcaagctagagcaccggcacctcgcctcgaagaaacgatgtcgcgcggtcgcctccaatcgcgggaggcggatccttgactgccgtcgagggcgtcgcggccagggctcactaggcgtgttctcagcggaaggtaggtgacgaggcctggatcgttggatcctgtttggacgatcgggattagagttggccggcgagcggatttctttgaatcgggaccgtccgttgggaacaaacggttggatccggtcgtgcgatccaacccgcggatcggccgtgaaccgtaatatccagatctaagggcgcgtatagaataacggttcggatttaattgaagataatctaacgcgtctattagggatcggacggatggggattctccataccccttcggctagcacatttgctaaagaggccccgcgcaaaacgggaaccaacccgcagtccagggattctattcactgagtcttagatgttttgcatcctagaccctgtattctctgatatttgaggcgcggtctagggaaatggaaaatcagagaaattgatttataaaatgaatttcttctataaaaacgattccaaaa

SEQ ID NO: 143146 - DNA, 171 bp, Zea Mays
ctttgtcagaactacgtgcaatctgtttgaatgcttcgaacctttgtggtggaacctttgtatgtttgaacctctgttttggaagaactagtgtgctggaattgtgtatgacttgtgatgagaatgttgtgtatgatggcttttctatgtattatgattctgtgagctatc

SEQ ID NO: 143147 - DNA, 206 bp, Zea Mays
ttggaacagataagagttttagttgctttttacttgaagctggtctacgattttcaaagtgtataacttcgttaatgccaattcttgttcaattgttggcatcattctcagctactaatgtcaataataccatccttttcctaatgagatgcatacaatttcatatcaaaggatcagaaacatcacccaggaaaatgttaatgtta

SEQ ID NO: 143148 - DNA, 644 bp, Zea Mays
tgctactgccacgtcttgccgtgtccgcagcagtaaggggtaccctagtttcagggtaccgataagcccgttgaacctcgttcttccctgctcgacctcgtcgaaccctgaatcccgaacgttaggcaaaaataagcgaggtccgtgtgcatcgcttatcaagtgctcggtcaaagacttcaatcgaaggtcgttgtcattccgtgtgtcatcaagaaatcccaagagtagggcgaagacgaagctagcagcgtgatgttcaccaagtgctcgacaaaaagctcgaacatgtcatcgatcgtcatcctcgtctatgccaaagattcaagaagattaggcgtagaaggaaataaatcactatgcgacaggagaattctcgatgtggacgaagatgaagcgcgattcgacgcaacactcaccctattttcggtgaaatgctgagctaaaaggtgtcatcgatttcgtgcttgcaagtttgatttagtatggtaagacgattcatatttccgattagcttaattattgaattagttcgatgaatgcgatgtgattattttcacgattttggagtagtcgcgttgggtaggtttgagatgttaattatgtgacgtacggtaaattagtgaatgaagtttaaatttagt

SEQ ID NO: 143149 - DNA, 1508 bp, Zea Mays
cgcgcacaggcttcttatccccggtcatcttctccttccctgtagcagcgtgctcctctgctccttccgcttcttctccctggcgctcggccgcctctggtccccagcagcggagctgcttcttccccagtcaggcgccaggccttcttctctccagctcgtgggtctccctcgccatagtcgcgcgcagttccctgctcggcagcctccctgctcgccggcagaagctcccagccgagcagctcctggtctccagccttcttctatgcgcgtcctgagctcctctggtgccgcatccggctcactgggcgcttggcctcctgctcgccgcgccctaggccctattccagctcgcccagccgagctcccttgccatggtcacgccccagctcgtcttccccagcacgccgcgctgtagctccctgctcggcgtccttctctacgcgtctgctccctcgccgtggagttctctgcgctctgcccaaccccgatgcccagtcctcgagctcggcttcttctcactgaactcgccccaaccacagccgcgctccctgccgagctccctctgctcgcgcgcgccctgcttccatggccgcgcgtccctggctcggctctgcccagcgccgctgtagccgagcttgtccctgcgcgcccgtgtttcctgctcctagacgccgcgtcctcccggccatggagttcgccggtagccaccccgtcgtgctcgtttctgatgctcgctccggccatggacgctatcgagcccgctgttttccctgttcagtactcgcgtggcttcctgctcgccagtgcgccctctcgactcgcttggccttaatccctatcgcgtcatcaacctcgccggttatggtggttcctcgtcgcgtcgtgtgtgcagctctatatacgtcaccctcatgtatcgtcgtcgagcccgtcgaacctcgttcttccctgctcgacctcgtcgaaccctgaatcccagacgttaggcaaaaataagtgagatccatgtgcatcgcttatcaagtgctcggtcaaagacttcaatcgaaggtcgtcgtcattccgtgcgtcatcaagaaatctcaagagttgggtgaagacgaagctagcagcgtgatattcaccaagtgctcgacaaaaagctcgaacaagtcatcgatcgtcatcctcgtctacgccaaagattcgagaagattaggcgcagaaggaaataaatcagtacgaggccggataattctcgatgtggatgaagatgaagcgcgattcgatgcagcactcaccctattttcggtgaaatgctgagctgaaaggcgtcatcgatttcgtggttgcaagtttgatttagtatggtaagccgattcatatttccgattagcttaattattgaattagttcgatgaatgcgatgtgattattttcacgattttggagtagtcgcgttgggtaggtttgagatgttaataatgtgacatacagtaaattagtgaatgaagtttaaatttagt

SEQ ID NO: 143150 - DNA, 622 bp, Zea Mays
agaattaacccttctatttttcttttatacagtgccgctggaccacatacgattgttgatggtaaagaagttgtgaactttgcatcagcaaactacctcggtttaattggcaacgaaaagattattgattcttgcatcagttcattggagaaatatggtgttggttcttgtggtccacgtggcttttatggaacaattgatgtccatcttgactgtgagtcaaagatagctaaatttttggggactccagactccattctttattcatatgggatttctacaatattcagtgtgatacatgccttctgtaagaaagaagatatcatagtcgctaacgagggtgttgactgtttggtgaaatgcttgggacaaagtggccagcaagaatggagtcatggaacatcgacaggaggggtgaggcagcggcaaccgatgtatcccttggacaatctggttttgacatgatgcaaatcaatctgctgtacactgtattccgcacttgcatagattgtttggttaattacaagattatctcagtgttttggtttggatttagagtacacttatgtatgaaatattgattggtactcatgtatattatattaattatattattattaaa

SEQ ID NO: 143151 - DNA, 735 bp, Zea Mays
gaaaggcgctgtttgataagaagacaaacccgtgtcctggcaagtggatacctgtagcccgtatggaccagtttcttttatcattttaccttgtctctccatgtattgctcaatttggatactgcagagagaacacgagagaaactgttgttgaggagatctgcaatttcgatatatctttatatgttatctctagtctagtgatagtacaaatctcatcttaaatgaagcttgtttgacggtctgagtgaagtcaatgtatatagcaatataaagtttgctatattgagaaaaatatttaaaagcattatgggaaacaagtgaaagaatgtgggtattattaagtatgccggggccgacatacttattttgaataagtatgccaattttcagcccctggcgtacttaattttaaaaacatctgttaagcttgtacccacatacttctcatgttgagctgtatgtcagattagtcaaaattatggaattgtaatcctctgctcttaatcttctagtactatttgggatcaatttgttgcaagctagcaaacatttactgtctactatgatatagtaataaattatacgccattactgtgttgcagtgctgcttttttgggacatatttactgtacttgctattaaatttattgagagtgcatgcccaatagtagtttgtttttacaccgtacacaatttattcttgttttatacgaacggcaaatttggtgctgt

SEQ ID NO: 143152 - DNA, 645 bp, Zea Mays
acacaaacttaattttattgtcacgataaatcactgcacagatcttacactctggctccagctacagatcaagattcactgatctaactagcagccccaccatttcattcgcagtaaagacgagaagaaactagtggaggcgacatatataggagaattgtgagctggtttacattcctaggaactgaactgaactgaacctgacgaggccgcactgctaaaaccggagcccctcaagacggcgacggcggctggcactcagttccccggcagtgtccagctgaggtcaaggccaccgatgtcgccccacacgcccgccgttgctccgtcgtcccacggcgcgagcccgtcgtacaagtccgggaccaccaccgactgccacgaggaggagaaggccgggggtgcaagcgcaacgccgccgaggtcgagctacgggaagaagctgtcgtcgctgaggaacgggaaggcggacggcaggcacgcgtccgcgagcgacggcggcggcgacgacgcctgggatgagggctcggcggctcccgcgtcgacagcaaagcgtcgtccagagatgaaggaagggaaacggagggacaagacggagctatgagcggccgtaagggcaaaataggcagattgcaacgcagaccc

SEQ ID NO: 143153 - DNA, 805 bp, Zea Mays
ctggacccgacgaatcaagcagaccatcaacacaataatgtaacaagcatcagcccagcccagccagcttccattcccaaggaaaccctccgctcctcccacgtctcccatggccgccgccggctcagccgcagcgccgctccgccggctgttcctccgcctccgtgacccgccgccgctgccctttaacacgctcctatcccgcctcgcgccacatctgcagcaaggccccaccctagccccagcaccagccccggctcttgcactcccgacctcgacgccggcccaaacgccatccgggattctccgcgacgcgctcttctccttccacccgggcctccaggcacacccgtgcctagatccgattgggggtgcaagggacgaggccggcccaggggcggcggaggtgtgggcggacagcgtgaagaagaagcgcaagcgtaagatgaacaagcacaagctccgcaagctccggaagcgacttcgccgccagacatgagggctctctcctctccggttagacaccttgtcattgagttgcgtccagtgatttcatctctccttcggttgatccgtagagcaagacagaaaggagatacgggtgaatgacaagagggctgtgtaatgaataactggttttgatcacattttctgtagcccgctcactgtgttagaagattttggttggtttcgacaaggatcatgttccacaacgagacaaacgtttgttaagccccttgttagttactgtatgcaaatggaaatgttgcgttgctcaatatatcggtctccaatcttttcgtca

SEQ ID NO: 143154 - DNA, 1572 bp, Zea Mays
cgcacacgcagatgccgaggctccctacatcgtcggcctcaggcccctccgcgacgtctcttctccggccctccgtcgaggctctccaccggggtttcctgccctcgtggcacccgccggtaccgactcctcattcggcgacaccctcgctacgatccaggcagctgtgacggcctcgcgggagcgcgagcgcgccgcctccctcgccctagagcgtgagcgcgccctaggtgccgctctgaccacccagatggtcaccacgcagcgcctcctcggccgcccgccggtcgcccctgtggaacccccggaggaccccctcgcctctgacctcgacgccgacctcatcgctgctctccacgctcaagccgcaggtctgcacaacatccgggctctcgtgtccgtggtgttggatccggcgtctccccactacccccgttggcaaggacatgtccttctcacgctgcggaggttcatcctcgacgatcacatcctcctcgaccacgacgctccgccgcctcgctcctggtgcctcatggacagtgttgtcctcttgtggctccacggcaccatcaccgttgagctccaggacatcatccgcgaccaggcggacactgcgcgctaggcgtggctcgctctcgaggaccagttcctcgggaatggggatgcgcgggcgctccacctcgacgcccagttccacctgttctctcagggggacctctccgtgggagaatactaccgccagatgaagggcctggctgactctctccgcgatctcggcgagccagttgccgatcgtaccctggtgctgaacctcctgcgtggcctcagcccccgctacggccacctgaaggctctcattaagaggagcgtgcccttccccaccttccacgccgtgcggaacgagcttctcctcgaggagctcaccatggcgaatgaggcacccactcttgcctcggctctctacagcgctcctaccagcggtcagccgcattcagggggccaggccacccgtcctccgtcgaccgggactcctacccgccctccacccgccgtcccggcggcccctcgtccgacttccacgaccgacgggggtcatcgctcccacaagggcggccgtgggggtggcggatcctctcgtggtggtccctccggtcggggtggcggccacgcgtggccgtccgtctacaacccctcgactgggaccatcgccatgtggccgggccaggcacccagtgcctcccgtcccccggcgcctgccctcctgactacacctcactacggcatgcccctgacgcctccttacggtgtgcccgtcgtgtgccaggctccgcccgcgctcctgcccccggggacacacacctcgacgtcttggtccccgccggctggcggttgggacaacgcctccctcgctgctgccttcagcaccatggcgatgaccccacccacctccgactaggtgatcgactccggtgcctcgtaccacaccactcccacgatagacacgctctctcgctctcatcccccctcccctctcacccatcctcgatcgtcattggaaacggttccactctg

SEQ ID NO: 143155 - DNA, 96 bp, Zea Mays
cctctcccctgcagccgccgccggcccccagccatcggctcctctccctaccaccctcggccgccagtcttcctttccggcgtgccgcccgcccct

SEQ ID NO: 143156 - DNA, 825 bp, Zea Mays
gaaacttacaataatcaggaacagagcctttatatagagccattgtatccttagcacagtgccgtggcttttggaacttgtgttcaagcaatatagatcaatttgtgcaagggaatggatggtttgtctatgatggtgaagcatcacttccattccatgtctgattagtcgagccgaatctaatagagctttgtttgcttgctgcaccagatatcatccctccgcaaggaattggacgaagctaaacaagctatggtggagctagaaaacaagctgaagttcaaggaagagacagctgctgctgcaatggcggcgcgcgatgctgcggagaagtctctaaagctagcagacatgcggtcgtccagactacgcgagaggctggaggagcttaacaggcagctcgaagaatcagatagtagaatagactcggtaaatcgcaatggccataggaggtacatgtgctggccatggcagtggttgggactgaactacaactacgtgcggttacctccagtggaggcagatgagacgtccaatgagatggagctatctgaacccctaataatataggtgctccggcctccacatttatacagatcccgctctttttcagtagataaaggggaacagtagacttttgttttttttggtttgggttcttgtgtagatgtttttttcctaatttattgatgcatgttttgcggaaaactgacgggtaattgtaaaaaggtaccacttgggacatacatagtagtgagatgatgagaagttcattctttgacgagactgttctggtttaagatgatggaacagatctcacttggt

SEQ ID NO: 143157 - DNA, 1992 bp, Zea Mays
cccaccctgctgtgcccggctcccgtccaatagaaatacaccgaccctgcgaggctgcgacgtcgcaagtaggacaccctccccgtcggattgggatcctcgccagtcgactggccgcggagcccatagccggccaattccgacgccatggccgaccacgacgacgctgccgtcctctcggacgtcgacgaggaccttctcccatcatcatccccctccatctcttctgcctcctcccacaaaaccctaccgcaagcccaacccctgccacagtccgatgcccaggcacaacagcagcggctgctggccctggccgcggagctcgaggaggagcgccgcctccgccacgcagccgaggcctccatcgcgggggccgagtcccgcgtcgcccgctacaaggccttcgcgcaggacgtgctccgcaagagcgacgccctcaccgccgaggccgcggactccgcgcggtccctcgccgcgctccaggccgaggccaccaccgcctcctccatgctctcctccggcttcgagaggatctccgccaaggcctccccttccgcggccgccgccccgctccccacctcccagaagtactcctccggcctcccggccctcgcgtacggcgtcctcaagcgcgccaacgacatcgtggacgacctcctagcccagatcaacgctgctaaccgcgaccgcgatcgcgcgcgcgagcagatggaacaccgcaactaccagatcgccatcgaggtctctgagctcgaggcgtcgctcgcatccaggtctgccgagggcgaatccctctccaagtcactctcccagcgagaagctgagatctccgagctccgtgacaaaatcacctctctcgaggggaagctcgatgcccagaggcccgtgctggcggagcagatcgaatgcacctcgaagctgtaccacgagatgcggcaggtggtcaagctggtcgatgctgaagctgccagtgccctgtccgattcggtttttgtctggaaggagtctgacgttgaggagagccttaaggtgtctctggaagggacgaaattggcctatgagcttgcggcaatggcccttgagaaggtcggagcttgtatcaatgacaaggagagcaagctgatgcgtttggaggacagggtggatgaactgattaaagagaaggagcacattagtgtgctgctccggagcgcgctgcaggcaaccaccagtgaggtgttaaaggttgcagaggatggactgagggaagctggcattgagattgggcttgatgagcgaaaggtgcacgggccagggaatgtggagaaggacgaggtctataccctggcaggggctctcgagaataccatgaaggaatcccaggtcaggatcattgagctccaacatcttgtcgaagcactaagggcagaatctggtttacttagaacaaggctagaaggacaagaaaaggagattggtcagctaagaaagcaaataaagcacgttgaagagaaggaaagggtggcaaatgaaagtgttgagggtcttatgatggatgtgacagctgctgaagaggagattaaacggtggaagatggcagcagaggaagaagctgaagctggtagatcaattgagcaagagtttcaaattcagatatcatccctccgcaaggaattggacgaagctaaacaagctatggtggagctagaaaacaagctgaagttcaaggaagagacagctgctgctgcaatggcggcgcgcgatgctgcggagaagtctctaaagctagcagacatgcggtcgtccagactacgcgagaggctggaggagcttaacaggcagctcgaagaatcagatagtagaatagactcggtaaatcgcaatggccataggaggtacatgtgctggccatggcagtggttgggactgaactacaactacgtgcggttacctccagtggaggcagatgagacgtccaatgagatggagctatctgaacccctaataatatag

SEQ ID NO: 143158 - DNA, 1408 bp, Zea Mays
ataataaaagtgaaattccattaccttgctgtctcggtctgtcggccatcgccggttgcgcagcgggcagcggctcacgtcgacggggaagactccggaggccacgggcgttacattctcctgccgtatttttgcgggattgaagtgacagccagggatccactcatcccctgggtggaaaaattcaggttgtggattggattgctagctaccgaacaagccctcagcgtgctaatttcaatggaatcttggtagacaccactgaacttcttggtttccaattaagttcgagcatagagatcgtcttctctcacactgagttgccagtttattccgaaggtccttcaagctaagttctgatgatggctaaggccaatggagcagtccatgcatccacgaaggaacccttgttttcttttggtgtcatagctgatgttcagtatgctgatatcccagatggtcgctcattcctcggtgtcccaagatactaccgccatagcatcactgtcctccaaagggccgtcaacaggtggaacgaacaaggcaacatcaagttctcaatcaattttggtgacattattgatggctactgcccaaaggacaaatcattgtgggcggtgcagaaggtccttgatgaatttgacaagtttgatggcccgacatatcacatgattggcaaccactgcctgtataaccttccgcgcagccagctggtgtctctgcttaagattgcaacagattctgatcgtgcctattatgacttctcgccatgccctgggttcagaatcgttgttctggatgcttatgacttcagttgccttggctggccccatgatcaccctgtgactatagcagcaatgaagctcctggatgagaagaatccaaacactgataagaacagccctgatggtctggttggtgttgataggcggttcgtgaagttcaatggtgcagttggcaaggagcaggtgtcctggctcaatgatgtcctccaggacgcatcgacgcaacatcaaaatgtcatcatatgcagccatctcccaatggatcccggggcgtcttccccagcagctctgatgtggaactacgatgaggtgatggctattgttcaccagtacaactgtgtcaaggcctgctttgccggtcatgaccacaagggtggccactctgtggactcacacggtgtgcaccaccgcacccttgaggctgccttggagtgtcctcctggtaccagcgcttttggtcacgtcgaagtgtatcctaacaggctgctgcttgtaggttttgacagaatggctgatacagaggtccgtttttgagccattaagcggctttaattcgtaccgacttctactacttctataatgtttttgtctatatagattacagctgcagcgaattccttacg

SEQ ID NO: 143159 - DNA, 1475 bp, Zea Mays
ataataaaagtgaaattccattaccttgctgtctcggtctgtcggccatcgccggttgcgcagcgggcagcggctcacgtcgacggggaagactccggaggccacgggcgttacattctcctgccgtatttttgcgatccctggctaaccaaacaaatggtggagacatggattagtgcttatgggaaaatcatccccaacagggattgaagtgacagccagggatccactcatcccctgggtggaaaaattcaggttgtggattggattgctagctaccgaacaagccctcagcgtgctaatttcaatggaatcttggtagacaccactgaacttcttggtttccaattaagttcgagcatagagatcgtcttctctcacactgagttgccagtttattccgaaggtccttcaagctaagttctgatgatggctaaggccaatggagcagtccatgcatccacgaaggaacccttgttttcttttggtgtcatagctgatgttcagtatgctgatatcccagatggtcgctcattcctcggtgtcccaagatactaccgccatagcatcactgtcctccaaagggccgtcaacaggtggaacgaacaaggcaacatcaagttctcaatcaattttggtgacattattgatggctactgcccaaaggacaaatcattgtgggcggtgcagaaggtccttgatgaatttgacaagtttgatggcccgacatatcacatgattggcaaccactgcctgtataaccttccgcgcagccagctggtgtctctgcttaagattgcaacagattctgatcgtgcctattatgacttctcgccatgccctgggttcagaatcgttgttctggatgcttatgacttcagttgccttggctggccccatgatcaccctgtgactatagcagcaatgaagctcctggatgagaagaatccaaacactgataagaacagccctgatggtctggttggtgttgataggcggttcgtgaagttcaatggtgcagttggcaaggagcaggtgtcctggctcaatgatgtcctccaggacgcatcgacgcaacatcaaaatgtcatcatatgcagccatctcccaatggatcccggggcgtcttccccagcagctctgatgtggaactacgatgaggtgatggctattgttcaccagtacaactgtgtcaaggcctgctttgccggtcatgaccacaagggtggccactctgtggactcacacggtgtgcaccaccgcacccttgaggctgccttggagtgtcctcctggtaccagcgcttttggtcacgtcgaagtgtatcctaacaggctgctgcttgtaggttttgacagaatggctgatacagaggtccgtttttgagccattaagcggctttaattcgtaccgacttctactacttctataatgtttttgtctatatagattacagctgcagcgaattccttacg

SEQ ID NO: 143160 - DNA, 465 bp, Zea Mays
ataataaaagtgaaattccattaccttgctgtctcggtctgtcggccatcgccggttgcgcagcgggcagcggctcacgtcgacggggaagactccggaggccacgggcgttacattctcctgccgtatttttgcgatcaaggccttcggcaacgaagccgtcagcttcgtcccatgcctttgcagcatcaatgtttacgcggagctccgcagcttttcttcttcagtatgcaagttgcacctgccgaaggtttgcttcattgtctatccgtgttgtacctgaaatacattttctcaatccgaaggtaaggtattttgagggccttcggctaagtaggccctcaaaatgcatgatgctcaaatagctcacttacgtaatagttcattctatttcctttcttttttgtgcaatcgacagcttgtgttgaacagttcaagtaaccatatatatgattttcatatgta

SEQ ID NO: 143161 - DNA, 1155 bp, Zea Mays
ccctttatctgttcatgactttgtgtactttttcctactcaagatagctatgcatggagctatgttcagcaacaatgacacaatatgttctctgcatattacaatatgcaactgatgggttcgattccttaaagctaacagtagtggtcactagcccttgaaaataagttttggacaaccagaatttcatagcagctttgactactgctgaagttgatctttttactcatttagattgtcattgatataaatgttattagtggtgcattgagacgactaaggattgatatctatcataagatttgtcttttctttacaagtgcggagattgcgtggttcaatgaagtactaacctatgatctatgggctaggtctttgatgagtaccttaacttgcaagatagcaaactcatacagtaatatggctgcctgtcgatcttaacaaatttcattcaggaacaaggccacgctgatgttcaaaagagttgtcagtaattcatgacatctagtatttattatatcttcttttgtgaagggctggtgtggtttatttagcagtaggtaattttgctattgaaagattaatctattatcgtaagcttggtgagtgaggtagacatatgatttatacttaatctaactgtttctctatgtgaatggatacatatagtaactcaggtagcactacaacaagcaatgtatggatgaactgaaggaaataaagaaggcagacaatcttacagaaactctgcattttgaaactgccatgattggcaaagaagctggatgcatcctttgcatttggtgttcttatcatggcaaagaagttggatgcatcctttgcattggtgtcttcttatcaccaagcggtaatgtgaagcaagttcatttgttgactaagaacggatgaacacaaatcggtgaagagttcgttgcactagagatgaaggatagataggtggaagatttcaaatatggctttaatagtattgtttccccttacaatcttcgtacggaacaagaaaaatgttgtatgtgtatactattgtaattctagaatttatttctaaataatgaatatacttgtttatagtttgtgtataggtttggtataatatataaatttttagctacaatgattacatttgtatccaaa

SEQ ID NO: 143162 - DNA, 519 bp, Zea Mays
atgcaatatttgaattttgaattatcaaggcaattaacttctgaaacattcacgccaacacgctgcaaaaacatttctctactcaaccagcgattgtcactccaaatacaacagaaaaccaacacgatctctttgtttggaatgagaaatttctacaggaaacaaatggctacaactcaagattatggacaagttgggatgatgcaaggcaagccacctcctacagccacatgcacgcagaaacagcgtgcaggtctttttatgtcacgccaacatccaaaacagattaaaactgaatgtattttagaggaaatggactactcagatcagaagactggttgtttcgacattcttgcttttattgatggtgtcagttacgtatgtttattgatttcactatttttcctgcatgaagttcaagttgatcgaaagcggagagctggctcgtctcagggagctgatcaatcccttaacaggccagtactcagtactaaactggagatcttaacccgttcctag

SEQ ID NO: 143163 - DNA, 246 bp, Zea Mays
cctcgcccgcgagtttcacagcaaggtgtctgcctgctttcctcatcggcgcacccaatcttcatcttctcgctgattcattgagttcacgccaacacgctgcaaaaacatttctctactcaaccagcgattgtcactccaaatacaacaggaaacaaatggctacaactcaagattatggacaagttgggatgatgcaaggcaagccacctcctacagccacatgcacgcagaaacagcgtgcag

SEQ ID NO: 143164 - DNA, 2688 bp, Zea Mays
atggtcacaaggaacaagcgctcagttcctaaccactacagcttgtgttgggataaccctagtaatcagatgcaaggagttatgcagctgaaagctactaacagtggaatgcccatgaaggttgcacaaagaatcgatgtttcaaagtttatgtcatacatcaaagttagtagaacacagctcaaccatataaagagactgaagcaatctggggatggtattcagaccaagcatgtttcacgtgtaattggcggccttgataaatctcatgtgaaaccttatggagctttattagaggatgaacagaggagactgcgcgagcattggctggaaatgtcttgcaatgatttacctgctgcctttgaggttcttagggaaaggaaggtgctgatggagaaatcaataaagttattaggccttgagcttcagcagaagaatgtatctgtcttgagaaaggcagaccagttaacagacataatgaaagggctaggacaacctggtgctagtgaaaatgatggtaccccagtttttcaaaatgaccaggtagaatgctcaccccaaagtatattgcaaggtgggcatgttcagagcacatctcttcaccatcaggatgatgagcagtctgtttaccatattcaccgtatgaatgtggaagatcatgatctcatggtagtcaggggtatagacataactagtcagagtgagaaaaactctgatgtgccagatcaaagtcgtaatggtatcagctgcgtagataaaggcatttactgctgtgccaacaaccctgataagcagagtgatgttctcatggacatcaaattatgtaaaggtggactggttgtttacaatcctgactgcaaaaatacgcaactagaagatcttgatggagtttcttacaaaggtccatcagttcatgcttgtgaccaagatcaggacctggaaagcatcggccatgctgttgtgaaccacaattgtcacaatagtccaaatatttcttcggaaatgagtcatccgacgacgaacgctgtaattgaccaggaaactgagaatgttatggaaccatcttgcagttcttcacaactacctaagtcgtctggagaacaaatgcatgtggaagattttctgtatctaaatgaccaagcagcaaaatttgagaaagtcagtgggcagttggcaggccctcttggccctccagagaatatgatgtataatgactcaggtgacttgcagattaaacagacttatctctcttcaggacaacatttttcttcagtttacttgaataatggcattttaagccatcagcaacctcaacttgccacaccagcttttgctttggacaatccagcatcatttattgagcctttctcaaatctgcagagcaatcgtcagcccgagacagaaaaggacattggagcagtcttctatccctttcgacacgcaactaacatcaaacagtcagcgagtttgcattgtttagtgaataaaggcttggctcaatctgcttcatttcccaggttgttgcaagagcggcatcagttaatcgatcagagtgacagtgacctctatgcacaacctcatgaggattactgcacagatgtgagttgtccaactaaagtgaaccttcatatctccgaacagcattcttatactgcttttgcttcgatggatcataggtataactggttccccgagggctgtcagtcacataataataatgataatctgttggggttgcagtcaggtaacttcttaccccaggccttaccaagtggaagcagcaccgatggagctctgttcagcaccgcatcccagtacaatcagccatcagtacacatgggacatggtgggtcaaaccgcagccaactcattgagccaaggaatcaatttggcccacctcagaattttctttctaagagtcaagacacaaaccctatgtttccggatatgtatggcttcacccagaatatagccagtggcacaagcagtcaggtagcacctatagggtctctggattgctcacattggacaaatttcatacaacaaaattctggaatgccgtctgactttacaaacaggccatctcgagggccttggaccagataactctatgacaccctggactggatgtactagattggttggttttaggcgccacctaagttggttaataaggaaactggggcaggttggaacagaatgttttccagcatccatgacttatgtcatgtagtggttttgatctgtttgaatggtgtggtttcaggaattgcttttgcaccatacctgtctgaacgcaagcgctgggaatctggagtcaaagctgaggattcccgcttttgctgtcttgccctgctgattttttttttattttgataataagctgtgccccagtttccatgtgtagtctgcctatggtgccctcagcaaaacatgatgctgtgttgttctcaattattttgttatttttttttgggttgacatgccagttatatatgaagacaagatatgtataccagtcgggatgccattttaggtatcaagagcgggcagttcgaaatgaacaagtacctttccttttggttgggaggcactaggatttctttattcaggcgtgtttacattccgtttgattagttggccgcaccgtttcgtcctaagtcacttagtgtattgactttatctaaa

SEQ ID NO: 143165 - DNA, 3996 bp, Zea Mays
ccgcgactgcagcgtcggcggctgggaccagcggatgtgcgttcctctctctagaagctccgtccgtcttcacagccttttcctcccaacaacgcataatattagctagggtttcaacgcatctgacggcggaagctagggcgtcgccaccgtcaatgtcttggcactcccgctctgttcatcaatcgcatcgacaggagccctatcctcaatcatgtctttcccgccgagctacacaccttcaggagcccatcccctcctccctcaaacgacgccgggtgacaagcaggaaaagtagtaatgacgacatgcttccaaatcactttcaacagtttcttctacttctttttgtttgccttatgatgattatctactgtcagttactcagttttatgatttgactagttactttggtttgtggagctggatggaacaatctttcagggtgcttcaccattagattgtgcttatatattgagctgaaaatttaacctatatatgtcctgttttaggtgctccatgattctctataacatccgaaataaattaggattaaagcaagaataggaagttattcaaaactcaaaagtaaagggtttccggtcttccagttaaatgaccaaatgacctgtagaatgacagcaagcaagcaaaataaacggcagacaaattgcaccaactcagagcagtgcaggccagggaagaaagcaaaatttgacacatctcattgtctagtaagtttgaagcctcatatcagtcttaaatgggatcaatatctgaggaaagttgtgccagagaaggaacaagttggaattttgtggtcagacttggcccctttcatggaaagccagaaacactgttcaggccttgctgatgttatgtatgttcctccagagattttctctcttaagagcctgaaaggtgtgctatcctatgaggcatggtctacatctcttacagaagccgagagaaaatttctcatacaattccttccaagcgagactgatgcagaagaaaatgtaaaattgttgcttacgggacaaaatcatcactttggaaatcctttccttagctggtcatcttctctttgctatggtgatattcatccggatgcactacttaacaaggagaagcacataaaaaaggatgagaaggcatatcatgttaacttgcttaattaccattccaacatggttgaaaccttgaagagttggaggaagagatggctaagttgcggtgatacagagaatttgttcagggataaccctagtaatcagatgcaaggagttatgcagctgaaagctactaacagtggaatgcccatgaaggttgcacaaagaatcgatgtttcaaagtttatgtcatacatcaaagttagtagaacacagctcaaccatataaagagactgaagcaatctggggatggtattcagaccaagcatgtttcacgtgtaattggcggccttgataaatctcatgtgaaaccttatggagctttattagaggatgaacagaggagactgcgcgagcattggctggaaatgtcttgcaatgatttacctgctgcctttgaggttcttagggaaaggaaggtgctgatggagaaatcaataaagttattaggccttgagcttcagcagaagaatgtatctgtcttgagaaaggttcgctgtgacttgtccttcaattctttttcttaagtctctaatttttgtcttgagggaagtgatttacttgaatgtgtaaaaaatacagtggatgagaataccgttgtatgcttacttctgttatgtatcttccccatttacaatgtatcatagcattcgccactatagatgagaataccatgactataaagatactgaattgtaatagaggcatctagtatgaaagccataggcagtatttcattatgaatggtgaattgccctgcagtgttatcttatttgtataagctaatatattgtcacatttttgtaagtatactttgttgtaatcttcataatgaaaataaattcttataaaaaacaatcttaatttgtttttaatacccaatagatgattatggtttatttatgtttgtttatgatgagaaggcagaccagttaacagacataatgaaagggctaggacaacctggtgctagtgaaaatgatggtaccccagtttttcaaaatgaccaggtagaatgctcaccccaaagtatattgcaaggtgggcatgttcagagcacatctcttcaccatcaggatgatgagcagtctgtttaccatattcaccgtatgaatgtggaagatcatgatctcatggtagtcaggggtatagacataactagtcagagtgagaaaaactctgatgtgccagatcaaagtcgtaatggtatcagctgcgtagataaaggcatttactgctgtgccaacaaccctgataagcagagtgatgttctcatggacatcaaattatgtaaaggtggactggttgtttacaatcctgactgcaaaaatacgcaactagaagatcttgatggagtttcttacaaaggtccatcagttcatgcttgtgaccaagatcaggacctggaaagcatcggccatgctgttgtgaaccacaattgtcacaatagtccaaatatttcttcggaaatgagtcatccgacgacgaacgctgtaattgaccaggaaactgagaatgttatggaaccatcttgcagttcttcacaactacctaagtcgtctggagaacaaatgcatgtggaagattttctgtatctaaatgaccaagcagcaaaatttgagaaagtcagtgggcagttggcaggccctcttggccctccagagaatatgatgtataatgactcaggtgacttgcagattaaacagacttatctctcttcaggacaacatttttcttcagtttacttgaataatggcattttaagccatcagcaacctcaacttgccacaccagcttttgctttggacaatccagcatcatttattgagcctttctcaaatctgcagagcaatcgtcagcccgagacagaaaaggacattggagcagtcttctatccctttcgacacgcaactaacatcaaacagtcagcgagtttgcattgtttagtgaataaaggcttggctcaatctgcttcatttcccaggttgttgcaagagcggcatcagttaatcgatcagagtgacagtgacctctatgcacaacctcatgaggattactgcacagatgtgagttgtccaactaaagtgaaccttcatatctccgaacagcattcttatactgcttttgcttcgatggatcataggtataactggttccccgagggctgtcagtcacataataataatgataatctgttggggttgcagtcaggtaacttcttaccccaggccttaccaagtggaagcagcaccgatggagctctgttcagcaccgcatcccagtacaatcagccatcagtacacatgggacatggtgggtcaaaccgcagccaactcattgagccaaggaatcaatttggcccacctcagaattttctttctaagagtcaagacacaaaccctatgtttccggatatgtatggcttcacccagaatatagccagtggcacaagcagtcaggtagcacctatagggtctctggattgctcacattggacaaatttcatacaacaaaattctggaatgccgtctgactttacaaacaggccatctcgagggccttggaccagataactctatgacaccctggactggatgtactagattggttggttttaggcgccacctaagttggttaataaggaaactggggcaggttggaacagaatgttttccagcatccatgacttatgtcatgtagtggttttgatctgtttgaatggtgtggtttcaggaattgcttttgcaccatacctgtctgaacgcaagcgctgggaatctggagtcaaagctgaggattcccgcttttgctgtcttgccctgc

SEQ ID NO: 143166 - DNA, 3733 bp, Zea Mays
ccgcgactgcagcgtcggcggctgggaccagcggatgtgcgttcctctctctagaagctccgtccgtcttcacagccttttcctcccaacaacgcataatattagctagggtttcaacgcatctgacggcggaagctagggcgtcgccaccgtcaatgtcttggcactcccgctctgttcatcaatcgcatcgacaggagcccatcccctcctccctcaaacgacgccgggtgacaagcaggaaaagtagtgctccatgattctctataacatccgaaataaattaggattaaagcaagaataggaagttattcaaaactcaaaagtaaagggtttccggtcttccagttaaatgaccaaatgacctgtagaatgacagcaagcaagcaaaataaacggcagacaaattgcaccaactcagagcagtgcaggccagggaagaaagcaaaatttgacacatctcattgtctagtaagtttgaagcctcatatcagtcttaaatgggatcaatatctgaggaaagttgtgccagagaaggaacaagttggaattttgtggtcagacttggcccctttcatggaaagccagaaacactgttcaggccttgctgatgttatgtatgttcctccagagattttctctcttaagagcctgaaaggtgtgctatcctatgaggcatggtctacatctcttacagaagccgagagaaaatttctcatacaattccttccaagcgagactgatgcagaagaaaatgtaaaattgttgcttacgggacaaaatcatcactttggaaatcctttccttagctggtcatcttctctttgctatggtgatattcatccggatgcactacttaacaaggagaagcacataaaaaaggatgagaaggcatatcatgttaacttgcttaattaccattccaacatggttgaaaccttgaagagttggaggaagagatggctaagttgcggtgatacagagaatttgttcagggataaccctagtaatcagatgcaaggagttatgcagctgaaagctactaacagtggaatgcccatgaaggttgcacaaagaatcgatgtttcaaagtttatgtcatacatcaaagttagtagaacacagctcaaccatataaagagactgaagcaatctggggatggtattcagaccaagcatgtttcacgtgtaattggcggccttgataaatctcatgtgaaaccttatggagctttattagaggatgaacagaggagactgcgcgagcattggctggaaatgtcttgcaatgatttacctgctgcctttgaggttcttagggaaaggaaggtgctgatggagaaatcaataaagttattaggccttgagcttcagcagaagaatgtatctgtcttgagaaaggttcgctgtgacttgtccttcaattctttttcttaagtctctaatttttgtcttgagggaagtgatttacttgaatgtgtaaaaaatacagtggatgagaataccgttgtatgcttacttctgttatgtatcttccccatttacaatgtatcatagcattcgccactatagatgagaataccatgactataaagatactgaattgtaatagaggcatctagtatgaaagccataggcagtatttcattatgaatggtgaattgccctgcagtgttatcttatttgtataagctaatatattgtcacatttttgtaagtatactttgttgtaatcttcataatgaaaataaattcttataaaaaacaatcttaatttgtttttaatacccaatagatgattatggtttatttatgtttgtttatgatgagaaggcagaccagttaacagacataatgaaagggctaggacaacctggtgctagtgaaaatgatggtaccccagtttttcaaaatgaccaggtagaatgctcaccccaaagtatattgcaaggtgggcatgttcagagcacatctcttcaccatcaggatgatgagcagtctgtttaccatattcaccgtatgaatgtggaagatcatgatctcatggtagtcaggggtatagacataactagtcagagtgagaaaaactctgatgtgccagatcaaagtcgtaatggtatcagctgcgtagataaaggcatttactgctgtgccaacaaccctgataagcagagtgatgttctcatggacatcaaattatgtaaaggtggactggttgtttacaatcctgactgcaaaaatacgcaactagaagatcttgatggagtttcttacaaaggtccatcagttcatgcttgtgaccaagatcaggacctggaaagcatcggccatgctgttgtgaaccacaattgtcacaatagtccaaatatttcttcggaaatgagtcatccgacgacgaacgctgtaattgaccaggaaactgagaatgttatggaaccatcttgcagttcttcacaactacctaagtcgtctggagaacaaatgcatgtggaagattttctgtatctaaatgaccaagcagcaaaatttgagaaagtcagtgggcagttggcaggccctcttggccctccagagaatatgatgtataatgactcaggtgacttgcagattaaacagacttatctctcttcaggacaacatttttcttcagtttacttgaataatggcattttaagccatcagcaacctcaacttgccacaccagcttttgctttggacaatccagcatcatttattgagcctttctcaaatctgcagagcaatcgtcagcccgagacagaaaaggacattggagcagtcttctatccctttcgacacgcaactaacatcaaacagtcagcgagtttgcattgtttagtgaataaaggcttggctcaatctgcttcatttcccaggttgttgcaagagcggcatcagttaatcgatcagagtgacagtgacctctatgcacaacctcatgaggattactgcacagatgtgagttgtccaactaaagtgaaccttcatatctccgaacagcattcttatactgcttttgcttcgatggatcataggtataactggttccccgagggctgtcagtcacataataataatgataatctgttggggttgcagtcaggtaacttcttaccccaggccttaccaagtggaagcagcaccgatggagctctgttcagcaccgcatcccagtacaatcagccatcagtacacatgggacatggtgggtcaaaccgcagccaactcattgagccaaggaatcaatttggcccacctcagaattttctttctaagagtcaagacacaaaccctatgtttccggatatgtatggcttcacccagaatatagccagtggcacaagcagtcaggtagcacctatagggtctctggattgctcacattggacaaatttcatacaacaaaattctggaatgccgtctgactttacaaacaggccatctcgagggccttggaccagataactctatgacaccctggactggatgtactagattggttggttttaggcgccacctaagttggttaataaggaaactggggcaggttggaacagaatgttttccagcatccatgacttatgtcatgtagtggttttgatctgtttgaatggtgtggtttcaggaattgcttttgcaccatacctgtctgaacgcaagcgctgggaatctggagtcaaagctgaggattcccgcttttgctgtcttgccctgc

SEQ ID NO: 143167 - DNA, 3681 bp, Zea Mays
ccgcgactgcagcgtcggcggctgggaccagcggatgtgcgttcctctctctagaagctccgtccgtcttcacagccttttcctcccaacaacgcataatattagctagggtttcaacgcatctgacggcggaagctagggcgtcgccaccgtcaatgtcttggcactcccgctctgttcatcaatcgcatcgacaggtgctccatgattctctataacatccgaaataaattaggattaaagcaagaataggaagttattcaaaactcaaaagtaaagggtttccggtcttccagttaaatgaccaaatgacctgtagaatgacagcaagcaagcaaaataaacggcagacaaattgcaccaactcagagcagtgcaggccagggaagaaagcaaaatttgacacatctcattgtctagtaagtttgaagcctcatatcagtcttaaatgggatcaatatctgaggaaagttgtgccagagaaggaacaagttggaattttgtggtcagacttggcccctttcatggaaagccagaaacactgttcaggccttgctgatgttatgtatgttcctccagagattttctctcttaagagcctgaaaggtgtgctatcctatgaggcatggtctacatctcttacagaagccgagagaaaatttctcatacaattccttccaagcgagactgatgcagaagaaaatgtaaaattgttgcttacgggacaaaatcatcactttggaaatcctttccttagctggtcatcttctctttgctatggtgatattcatccggatgcactacttaacaaggagaagcacataaaaaaggatgagaaggcatatcatgttaacttgcttaattaccattccaacatggttgaaaccttgaagagttggaggaagagatggctaagttgcggtgatacagagaatttgttcagggataaccctagtaatcagatgcaaggagttatgcagctgaaagctactaacagtggaatgcccatgaaggttgcacaaagaatcgatgtttcaaagtttatgtcatacatcaaagttagtagaacacagctcaaccatataaagagactgaagcaatctggggatggtattcagaccaagcatgtttcacgtgtaattggcggccttgataaatctcatgtgaaaccttatggagctttattagaggatgaacagaggagactgcgcgagcattggctggaaatgtcttgcaatgatttacctgctgcctttgaggttcttagggaaaggaaggtgctgatggagaaatcaataaagttattaggccttgagcttcagcagaagaatgtatctgtcttgagaaaggttcgctgtgacttgtccttcaattctttttcttaagtctctaatttttgtcttgagggaagtgatttacttgaatgtgtaaaaaatacagtggatgagaataccgttgtatgcttacttctgttatgtatcttccccatttacaatgtatcatagcattcgccactatagatgagaataccatgactataaagatactgaattgtaatagaggcatctagtatgaaagccataggcagtatttcattatgaatggtgaattgccctgcagtgttatcttatttgtataagctaatatattgtcacatttttgtaagtatactttgttgtaatcttcataatgaaaataaattcttataaaaaacaatcttaatttgtttttaatacccaatagatgattatggtttatttatgtttgtttatgatgagaaggcagaccagttaacagacataatgaaagggctaggacaacctggtgctagtgaaaatgatggtaccccagtttttcaaaatgaccaggtagaatgctcaccccaaagtatattgcaaggtgggcatgttcagagcacatctcttcaccatcaggatgatgagcagtctgtttaccatattcaccgtatgaatgtggaagatcatgatctcatggtagtcaggggtatagacataactagtcagagtgagaaaaactctgatgtgccagatcaaagtcgtaatggtatcagctgcgtagataaaggcatttactgctgtgccaacaaccctgataagcagagtgatgttctcatggacatcaaattatgtaaaggtggactggttgtttacaatcctgactgcaaaaatacgcaactagaagatcttgatggagtttcttacaaaggtccatcagttcatgcttgtgaccaagatcaggacctggaaagcatcggccatgctgttgtgaaccacaattgtcacaatagtccaaatatttcttcggaaatgagtcatccgacgacgaacgctgtaattgaccaggaaactgagaatgttatggaaccatcttgcagttcttcacaactacctaagtcgtctggagaacaaatgcatgtggaagattttctgtatctaaatgaccaagcagcaaaatttgagaaagtcagtgggcagttggcaggccctcttggccctccagagaatatgatgtataatgactcaggtgacttgcagattaaacagacttatctctcttcaggacaacatttttcttcagtttacttgaataatggcattttaagccatcagcaacctcaacttgccacaccagcttttgctttggacaatccagcatcatttattgagcctttctcaaatctgcagagcaatcgtcagcccgagacagaaaaggacattggagcagtcttctatccctttcgacacgcaactaacatcaaacagtcagcgagtttgcattgtttagtgaataaaggcttggctcaatctgcttcatttcccaggttgttgcaagagcggcatcagttaatcgatcagagtgacagtgacctctatgcacaacctcatgaggattactgcacagatgtgagttgtccaactaaagtgaaccttcatatctccgaacagcattcttatactgcttttgcttcgatggatcataggtataactggttccccgagggctgtcagtcacataataataatgataatctgttggggttgcagtcaggtaacttcttaccccaggccttaccaagtggaagcagcaccgatggagctctgttcagcaccgcatcccagtacaatcagccatcagtacacatgggacatggtgggtcaaaccgcagccaactcattgagccaaggaatcaatttggcccacctcagaattttctttctaagagtcaagacacaaaccctatgtttccggatatgtatggcttcacccagaatatagccagtggcacaagcagtcaggtagcacctatagggtctctggattgctcacattggacaaatttcatacaacaaaattctggaatgccgtctgactttacaaacaggccatctcgagggccttggaccagataactctatgacaccctggactggatgtactagattggttggttttaggcgccacctaagttggttaataaggaaactggggcaggttggaacagaatgttttccagcatccatgacttatgtcatgtagtggttttgatctgtttgaatggtgtggtttcaggaattgcttttgcaccatacctgtctgaacgcaagcgctgggaatctggagtcaaagctgaggattcccgcttttgctgtcttgccctgc

SEQ ID NO: 143168 - DNA, 1029 bp, Zea Mays
atggtcgtgttttgtcggaagcacgggcagcatgcctttctcctggaggctggtgaccgtctcgtagaggcactggaggaccggcacgaagtccatccccagatccttgaggcgctggttggtgaacttgtatcctaccaccggagggttaacctggtccttgcacttggtgggtacggggtactccgggaagagcttggcgaggacgcggcagaggtcgccgcggtgcagggtgctctcggcgcagatgtagcggccgtgcgcgtggggcgcctcgtacacccggacgtgcgcctcggccacgtccctgacgtgcacgtacgcctgcgccgcgttcacgtaggtcgtggccgaccccgtcaggtacttcatcacgtggtccgtgctggcgttcaccgtcggctgcagcagcgggcccagcaccagcaccgggttcaccaccaccaggtccagccctcgcttccgcgccacctcccacgcgccctgctccgccaccgtcttggcgtagcagtaccagttctgggtgttcttgcaatactcgaggtcgctccagcaggtgtcgtccacaggcttgctggggtcacggtaggggttcatgtacacggtgccgatggaggacgtgaacacgacgcgcttcactccggcgtctgccgccgccgccatcacgtagcgcgtgccccggatcgctggctcgatcatcatctcctggtcatcggtgaccggggaggcggcgtggaagacgccgtcacagccggagaaggcctcggcaaggctctctgggtccagcaggtcggcgcggaggaggacgaggcggtcgtcggcgccgtcaagggacctcaggtggtcgttctttggatccacagggttcctgaccgtgccgcggactgtgtagcccttctccaggaggcgcttgacgagccaggaggcaatgaaccctccagctccggtcacgcaaaccgtccgcccttgcccggaggacagctccggcggcacgggcgtcgtcgcctctgctgttggcatcctagctag

SEQ ID NO: 143169 - DNA, 4245 bp, Zea Mays
accccccacacccacaggccatccttcaccagcacacactcatctcccacacctagcctagccttgctttgtcctcctccgtctcgctctcgctctccgtctccattcccacccaccaccaaacaccaggcccaaaggaccccccgccttcccaactaagagcaccagcgcagcggggagggggaatcagggcagcaagatccgagcagcaggagtggcaagcagcatttgtagccacagctcgctcactcaattgcagctagccgcggttgcggttggactggatcggcggcagggcagggcagggcagggcgcgcggcggtggtggtagttgcagaagtgacggtcaagttttcctcgctccttgcttcggccgagactccgcctgacgctactaccaacatctccacctgaatccatctctatctacctcgcacgaacgaacagagacaggggaggggagggggggaattgaagtgtaacccaaggaaaggaaccatgatggtgtggcaggcggaggaggaggattgatccatccgtcaacccatcagacccgtccatccatcggtggtggtggtggtggctgctgttactcgctatcaccatctgctgctgcctgctttagtcttttgcttcacttctcttctttctatccttcctccccctgtctgtttgtctgtcttattgccctccctgttcttgttgctgcttgcattgagaaaagagagagagagagacagagagagatagaaagtggttgctagttgtatggtcgtccggtgggcgcgatgaccatggagcacggcgaggattgctgcgtcaaggtggcggtccacgcgcgccccctcatcggcgacgagaagctgcagggctgtaaggactgcgtcgccgtcgtgccgggcaagccgcaggttcagatcggcagccactccttcaccttcgaccatgtctacggcagcacaggcacgccgtcggcggccatgttcgacgagtgcgtggcgccgctggtcgacggcctcttccagggctacaacgctacggtgctggcatacggccagaccggatcagggaagacgtacaccatgggcactgcctgcaaggaggggtcgcatatcgggatcatcccacgagccatggctgcgctgtttgacaaaattgagaacctgaaaacccaagtggagttccagttacgagtatcgttcatcgagattctgaaagaagaggtgagggatctacttgaccccactgctggtaccgtgggcaaagcagagaatggcaatggccacgcaaaactgtctgtgccagggaaaccccctgtgcagatccgagaggcgtcgaatggagtcataacgctagctggatccactgaggtgcatgtcaccactcagaaggaaatggccgcatgcctcgaacaaggttccctcagtcgcgcaactggaagtaccaacatgaacaaccagtcaagtcgttcccatgccatcttcacaatcacattggagcagatgcgcaaaatagaccccatcatgactgcagatggaatgcctattgaagagatgaatgaagactatctctgtgccaaactacacttagtagatcttgctggatcagaacgggctaagagaactggttcagatggcctgcgcttcaaggaaggtgttcacatcaaccgaggacttctcgctctcggcaatgtcataagtgctcttggagatgagaaaaaaagaaaagaaggtgctcacgttccttatcgggacagcaagctcacccgtcttttgcaggactccctaggtggaaatagtaagactgtcatgatagcttgcataagtccagcagatattaatgctgaagagacattaaacactttgaaatatgctaaccgggcacgtaatatccaaaacaagccgattgtcaatagaaatcctatcgctgatgagatgaaaagaatgcgccagcagattgaatacttgcaggcagagcttgtttcggctcgaggaggagccacatcagatgatgttcagggtctcagagagaggatttcatggcttgaacaaacgaatgaagacctctgcagggaactatatgatagtcgcaaccggtctcaaaatgatccatgtgaacctgaaatacaaaggactttaaacggctttaccaaaagcgaagggctcaaaagaagcttgcaaagtacagatccatttgatgttccaatggctgactcagtaagaggcaaccctaaggatattgaagatgaagtagctaaagaatgggaacacacaatgctgcaggatagcatgggcaaggagttgaatgaattaaatcgacaacttgagcgaaaagagtctgagatgaaaatgtatggatgtgatactgttgcacttaagcagcacttcggaaagaaacttatggagcttgaagaagagaaaaaagcagtacagcaagagagggatagattgttggctgaagttgaaagcctaagtgctgatggccaaacacataaactccgagatgcgcagctgcagaaactaaaatcccttgaagcccagattctagacctaaagaaaaagcacgagaaccaaattcagattttgaaggaaaagcagaagagtgatgaagctgctaagaaactgcaagaagaaattcattttataaaagcgcaaaaggttcaactacaacacaaaattaaacaggaagcagaacagttcaggcaatggaaagctacccgcgagaaggaacttcttcagttacgcaaggagggacggagaaatgagtatgaacgccacaagcttcaggcacttaatcagcggcagaaattggttttgcaaaggaagaccgaagaggctgctatggctacaaaaaggctgaaagagatattagaagctaggaaatcttccgcccgtgacagttccgtgatacctaaagccattcttgatataacacagatgggtgagagatcgctgcaaaaatggtttgatcaagagcttgaagttatggtgcatgtgcatgaagtccgaaatgagtacgaaaaacaaagccaactgcgtgctgcgcttggtgaggagcttgccattttgaaacaagaagatatacgggctggtggatctagtccccaaagagggaagaatggaaactctaggacaaataccttgtcaccaaatgcaagacaagctaggatagcatcacttgagagcatggtgacaatctcttcaaacactcttgttgcaatggcttctcaactctcagaagctgaagaaagagagcgtgccttctctgggcgtagtcgttggaatcaattgcgatcaatgggggaggcaaagagcttactgcaatatgtctttaatgttgctgctgatgccagatgccaagtaaaggagaaggaagtggagatcaaggaaatgaaggaacaaatgacagagctggtgggcattcttcgacacagtgaatcacgcagaagagaaatggagaagcagctcaagcaaagagaacagacaactccaatggccactacacctccgaaaagtggaaatggcacgacgaagcactctgctgatgaccccaacacaccactgtcccctgtcgccgttcctgcacagaagcagctcaagtattctgctggaattgtaaatagccccagcaaaggagttgctgcgataaaaaaagagcaacttaagatggttccaattgcacagttgtctgcggggaagagagtttcaatagcagggcattcaggaaagctctggaggtggaaaagaagccatcaccagtggctgatgcagttcaagtggaagtggcagaagccgtggaagttgtctgaggtgatacgacacagtgatgaaacaatcacgaggattaggcccagacctccacttcttccacataaacctcataactgatgtgaaacggacttgtttttgtctcaacaagaactgacacggtttgcaaacctacacagctaactgcctgcacaagccttcactgacggtgacatgtcaatagttggtgttcgtcttcacaaaggaatctgtcaaaggaaggcgccttgtaaagtctttcttgtgctgttgtgtgatagttttgtgtgaagggtaactgaaagttgaatgggttttgtgctcgagtgatagtctattttcccctcttcttttgtttgttgatactaaaatgagaaaagacaagtgatattggtttggtttgctaggagtattgtgatgtaatgcagaaacttgttcccctatatcagtacaccctttt

SEQ ID NO: 143170 - DNA, 1430 bp, Zea Mays
accccccacacccacaggccatccttcaccagcacacactcatctcccacacctagcctagccttgctttgtcctcctccgtctcgctctcgctctccgtctccattcccacccaccaccaaacaccaggcccaaaggaccccccgccttcccaactaagagcaccagcgcagcggggagggggaatcagggcagcaagatccgagcagcaggagtggcaagcagcatttgtagccacagctcgctcactcaattgcagctagccgcggttgcggttggactggatcggcggcagggcagggcagggcagggcgcgcggcggtggtggtagttgcagaagtgacggtcaagttttcctcgctccttgcttcggccgagactccgcctgacgctactaccaacatctccacctgaatccatctctatctacctcgcacgaacgaacagagacaggggaggggagggggggaattgaagtgtaacccaaggaaaggaaccatgatggtgtggcaggcggaggaggaggattgatccatccgtcaacccatcagacccgtccatccatcggtggtggtggtggtggctgctgttactcgctatcaccatctgctgctgcctgctttagtcttttgcttcacttctcttctttctatccttcctccccctgtctgtttgtctgtcttattgccctccctgttcttgttgctgcttgcattgagaaaagagagagagagagacagagagagatagaaagtggttgctagttgtatggtcgtccggtgggcgcgatgaccatggagcacggcgaggattgctgcgtcaaggtggcggtccacgcgcgccccctcatcggcgacgagaagctgcagggctgtaaggactgcgtcgccgtcgtgccgggcaagccgcaggttcagatcggcagccactccttcaccttcgaccatgtctacggcagcacaggcacgccgtcggcggccatgttcgacgagtgcgtggcgccgctggtcgacggcctcttccagggctacaacgctacggtgctggcatacggccaggttggcatcctgctgcttcctctatcctcttcgtcggccaccaccacgcatgcctgctctcctcggtcggggtcggtcctcccctccctcaatcatttggctcgcatcccatgtgccattgatgccgtgcagccaaggagctgaaaaagcttggaccaccaagttgggggcctagccacacggaaaaggccagcagcacaacatgtggtctggggctgggatggaacacaaattacctgctttttatttttttggctccagctgtttgtgacacgatgatgatggggtcgactgtgtctccgtgctcccagaaccaccaaatgctcatcggtttcagtttcagcttcatgatgcatatatagctttaataga

SEQ ID NO: 143171 - DNA, 1935 bp, Zea Mays
atggactccatggtgtttgaggttgctgaattggatggagcaacaatgatttgtcacactaacagtaaaatgaaagggaggttcgaagttttgttcctagccttccttgtagcgttgaagatgatgagagatcaaagaagaaaacagtcagagccattttggtcttcaatggtgatgaaaaaatggctaaacatcaggccgaaattaaatgatttcagcgaagacgagtttgatacaggcagtgaggatagtgacggtactaactctggagatgataataacttctttgagatacatggaaatctcaaatacatgattagcaaatcatcaggagagaaaacaattcctctgcgaagtcttcagagaaggaaatcagagagtttacgtgttaactacatcagtaacaaagatgtgagggtgatgataggtacatggaatgttgctggaagagtgcctagtgatgaccttcgtcttgatgagtggctttgtacacaagagccagcagacttgtatgttttaggtttccaggaagttgtcccactaagcgctggtaatgtgttgggagcagaggacagtagaccaatacggaaatgggaagctcttatccgccaaacacttaacagttctcagcaaaccaggacaatctgcaaaagctacagtgctccactctcgccattactaaggcctgttgcttcaggcgatgggaaatccaaacctgaagatagagtgacaggaagtttaactcagcttagagattggcaaactagtaagagtgagcttcattgcagctggttcgatgggaccagttcattggactggccagaatatccactcgacactccatcaaaggttttggtgtcaggtacaggcttgaggcgagtcatgagtttggggttatttagctccaactttgtgggaaaccctcgaggtcttgagctccaggatgtagatttgcatgctgggatgagaaggcagtatcatagctcgggaaatcttagcatgttatggtctgaacagcaggagaagcttgatgttttaaattcacttgatcgcttatctgatttggcgtcagaagaagactcaacttttgaagacaccgttgagggctgtgctactcttgggaaaagagaatcttccgtgcatcgtgcaaattatgtgcgaattgtcagtaaacaaatggttggtatacatgtttctgtatgggtttcccgaaaactgaggcgacatgttaacaatctggaggtatcaccggttggggttggactcttgggctacatgggcaacaagggatcgatttccatcagcatgtctcttttccaaactcgattgtgctttgtctgctctcatcttgcatctggtcataaatcaggagatcaacaaaaaaggaatgctgatgtttacgagattttacaaagaacaaggttttcttccttgtttgctgctggtcgtccacaaaagattccttctcatgatcggattttctggttcggggatcttaactaccgcattgacctgccggactctgaagtgcgatatctggtgggtatgaagaagtgggatgaccttttgaagtctgatcagctaacgaaggagctagtaagtgggaatacttttgttggttggaaggaaggcttgattaactttccaccaacttacaagtacgaaaggaatacaaccagatatgttggcgagcttcataatgaggaggagaaaaaaagatctccagcatggtgcgatcgtgtgctatggtttgggaagggtaccaaacaactatcatattggagctccggtctgaacctctcagatcaccggccagtcagcgccgtcttcttggttgaagttgaagtgttcaatcaacaaaaactcgagagggtcttgaacttcaatcctggatttgtttcaaatggggattattacatgatggcagatccttaa

SEQ ID NO: 143172 - DNA, 1979 bp, Zea Mays
tctctctcccctcagtgcggccatctcctgctccctccatggcacgccctcccccgccgtgagctcggcgcccagccccaactcccagtcgagcccttccccctggtctccatagcacgtgcgccctggagctcaccgtgcccagccaaactcttctgtgcccgcgtctgctgcctctgctcggtccctgctgcgagctcgtcggcgttgcccctacttccatggctggtcgcgcccctgctcatcttcctcgtgtgcgcctgctccccatggatggctgccagcccttgttcctccatcggattgcgcttcggcccctcccatggcgcccggcggtcctcacctctgctcctctgcgccgccgttctctaggcccggcctcaagctccctcggcaccctctctcctcttctctccctcatcctcaacctccagccgtggagcttccccgccgcagcctagctccctctatccgttcccagccgcggagctcctgtgcgcgcgagttcctttggtggacgcgcgctggccgtgatccacctcaccccatcgcggcgctccagctcgctgcgcgccctgctccactatgtcgatccgcctatctccctgagctcacccctgtgctcggattttccgtctcgtccatggtgctctcctcagccgcaacttgccgagttccgcctttctccgctctccctgctcgcctaggttggatggggatccacctggtggcgtttgtggcagcgggggcttcctgcaggcgtttcatgtgtcggcgctgctggttggaaccgttgctcgtcgatccagtgagtcgtcgtcgatggatatcccctgcgtgtttacccgaaaatcaccgcgtgcgttggtcgccctatgtgctcgaccttgtcttgtcgcagaaccccaacgtcgtcgatatccagctcgccaaatgttcgatggaacgtctaatctgataattgtagccgattgtggggattttcaagtttatttggaagcggtaaggactcgtcgtttatattctatttattttacctccgaagtaattatggtgtgtgtcgatagttatttatttggaaaagcgatgccttgtcatagtagtagtgaaatggaaatgtgcccttgagcaatttctataagtattttggtgattaaatgcccaacacatgttaattgagtcctcatgtgctaaatgtgtgaaaagtgaaaatcaaggtacaaggtatgtttctagacttagtacattgttttttagtactaacatgtttatctaagtgactagaaacaatgtcgagaagagaagaaacgaattggaaaagagttggctgcgtacagccaacacctacttgggcctagcacactggactgtccggtggcgcaccggacagtgtctggtgcgctaggctggtcgatggtgaaccggttgctctcgggaaacggaaaaggcgatgtagctataatcaccggactatccggtgtgcaccggacaatgtccggtgcgccaaccagccccgaggagcaacggtcggatgcgcccgatatggaaggagattgcgcactggacctgaacagtagttgttcggtggtgcaccggactgtccggtgcacactcgacagaaggaaggaattgccttccaagttggtctccaacggctcctagctaccttagggctataaaagagaccccctaggcgcatggaggagaagaccaagcattctctaagcatactaaggcatccagactccgctcccacgcatttgcttcgttgtgttagtgatttgagctccattcgagttgtgaactccctgtgttgttctttgagctcaagtcttcacttgtgtgcgtggttgtgctgcgtatttgagtcttgtgtgtgttgctctcctcccttacttctgtgtttcttttgtgatcatcattgtaagggcgagaggctccaaattgtgaagattcctcgcaaacgggagaaagcctat

SEQ ID NO: 143173 - DNA, 1112 bp, Zea Mays
tattatttgaacttagctggattcaatcctaacacaaacttatcgatattattcgctttcactcattttggtaatgctagatatttatctagggcacttaatcggttatagacatataacaatatggctactactacggcaaggcatcgcttttccaaataaataacaatcgacacacaccatatttactttggaggtaatacaaatagaatataaacgacgagtccttaccgcgatcaaataaactcaaaaatccccacaatcggcgacgtttatcagattagacgttccatcgaacatttggcgagctggatatctacagcgttggggttctgtgataagacaaggacgagcacacagggcgaccgacatacgcgacgatttttgggtaaacacgcatgggatatccatcaacgacgactcactggatcgacgggcaacggttccaaccagcagcgccaacacatgaaacacctgcaggaagcctccactgccacaaacaccaccaggtagatccccatccaacctgggcgagcagggagagtggagaaaggcggaactcggcaagtcgcggctaaggagagcaccatgtccgagagggaaaattcgagcataggggcgagctcagggagatgggaggatcgacatagtggagcagggcgcgcagcgagctggagtgccgcgatggggtgagatggagcacggccagcgcgcgtccaccaaaggaactcgcgcgcacaggagctccgcggctgggaacagacagagggagctgggctgcggcggggaagctccacgactggaggttgaggatgaggggccgaagcgcagtccgatggaggaacaagggctggcaaccggccatggggagcaggcgcgcgcggggaagatgagcaggggcgcggccagccatggaagcaggggcaatgccgacgagctcgcagcagggactgagcagagagattgtctgggcgtggtgagctccagggcgcgcgtgctatggacaccagggggaagggctcgcctgggagttcgggctaggcgctgagctcacggtggaggagggcgcgccatggagggagcaggagatggccgtgctgaggggagagaga

SEQ ID NO: 143174 - DNA, 1145 bp, Zea Mays
gctgatcaagggaggtataggaataggaagcaacaaataaccaccaatgttttgggtgtttgtgatcgacacatgaagtttgattatgttctagctggatgggaagggtcagcttcagattcacgtgtgctacgtgatgccatgtctcgggacgatgcatttgctattccaagtggaaaatattacctagtagatgttggatacaccaatggaccaggctttcttgctccatatcgatccactcgctaccacttgaatgagtgggctgcccaagggaataacccatccaatgccaaggaattgttcaatttgcgccattcaacagctagaaatgtgatagagagaacgtttgggctattgaagatgaggtgggctatattaaggaaaaactcatattttgacttacaaaatcagattaggatcatcaatgcttgttgcatattgcacaactttgtaagggataggcaaagagatatggatgatttacttttaggccaagttgatcaagtaatatctgttgaatctcatgatgttcaaagtgaagtgagtatgattaccaatgtgcagtcatcaaatcaatggactaactttagggacaccaaagctaaccaaatgtttgatgattaccaagcgagacgtggacaatgtatgataatttttttaatatttctttttttgcaaatattgtgttgctcctcaataactctactaacctttgtaattttttttatttgtaggatatggagaagggtaagaagtcaggctcgggcaggggctacatttcttggaatgatgatatggacaaggcacttcttgacacattcgtggagtactacaacaagggtgacagatgccaaaatgggtggaagtctcatgtctacacggctgctatcaagaatgtccgagaaaagtgcaatgtggaaatcacaaaagacaacatcatgtcaaggaacaagacatttgacaagcaccacactatcatcaatggtatgctacaaacaagtggctttggttgggattggagcaagaacaagatatccgtcgatagtgattctgtatgggaggcttatgtggcgaaaaataaagaagctaatgggtacagacacaagacagtcttatattgggactcgatcaacttggtgttt

SEQ ID NO: 143175 - DNA, 2183 bp, Zea Mays
ggatttgccatcgtaattatggaattcgtaagagtagcggcgtcaatggctaatgtcattgttttgcccaagcccaaatcgcacgcgactagccaggcaaaccacagaaataaagtaattaatagtagtaataataatacaaagaaaaaaaagaaactggcgtggaattagcccacggacaggacagtagcatttaatcgggatgaatcccttggtggcgtccgcagcgtccagccgtccacccaaccactcctctcctccccggtcctcctccccttcctcggcagatccgccgccgcccgttcccatgggccagtgcctctccgccccgcgccaccgcaagcccccgcccctgcctctgtcgcccgcgctgtccgttccgccgcagatcctctcttccatcgccgacgccgtcggggaggatcacaccgccgacctccctgaggagctcctcgccctcgtcttcggtcttctcggctccggcgaccgcaagcgatgttccctcgtttgccgccgctggctggtcgtagaggccgcctcccgcttccgcctcgcgatcgacgccagggcatcgccgctcgccgaatccgccctcccccgcctcctcgcgcgcttccccgccgtctccaagctcgcgctcaagtgcgaccgccgcgccgagagcgtgggcgacccggccctcgcgcaagttgcggaccgcctcggcccgggccttcggcgcctcaagctccgctccctgcgtgcggtcaccgacgatggggtcgccgcgctcgccgccgcggccgccaacctccgcaagctctccgtcggatcctgcgacttcggggccaagggaatcgaggctgtcctccgctcgtgcctccacctcgaggagctctccgtcaagcgcctccgtggcctcgctgagtcagagcccatctccgtctccagcccacgccttcaatctctatcgcttaaggatctgtacaacggccagtgcttctcctgtttgatcactcagtcgccaaacctcaaaaccctcaagattatcagatgcgcgggtaactgggatatcgtgctccaggacgttccaagggattctctcctagccgagctccatctcgagaagctgcaggtcagtgactggggtgtagctgccttatatgggctcgaggtactctaccttgccaaggcacctgaggtcactgatatcggattagctgagcttgctgctaagtcgccacgcctccgcaagctgcatgttgatggttggaaagcaaacaggattggtgaccgggggcttgcggctgttgcacagaaatgttccagcttgcaggaactggtcctcattggtgtgaatttgacatcattaagtcttgagttgattgcaacgaactgccccaccttagagcggctcgcactgtgtgggtccgacacgtttggtgatgcagagatgtcatgtgtcgcctccaaatgttctgctttgcgtaagctgtgcatcaaggcatgtccagtgtctgatgcaggaatgaataagcttgctgaaggctgcccacgccttgtcaaggttaaggtgaagaagtgccgtcgggtgacctctgagtgtgctgagcacctccgggctagcaggaatggagctcttgctgtgaattttgacacacctggtggagctggtgagttgcaggatggtcggagtgtggatgacagtggtgcgctagacaatgccggcagtgatgttttgcccgaggatttggatgatcggataggaccagacctttcgagtggaagcagtggcaggccatcaagatggaaagcactgatgggtgctttgatgttgaggagcttttctgtttccatatttcaaagacaaccgcgtggagcctgctctacaagtcacgagtcatgaaaattggatgacatggttattccttgagccctttaaattcttttatatttgtatgttcaattaattggtgctgttatttgttgtatcactgtttgtcgttgtggatggtaccatgcttgtcattctgatttcggttaaagaatttagatatattgctagacttgtcagttggagcatacttattattaattgtcctagcaacagggattcatgcgattgcatgctgtaatcttcttagaaacaattgtttgggctgaaaaatatgatgtggaaacaagactatcagatcatttcaaaa

SEQ ID NO: 143176 - DNA, 100 bp, Zea Mays
caagaaaatataaattaacatatcaagaaacacaagttgctgctatcttcgaggttacatatcaaatcaaatacaaagacggaggtgaggatggatttct

SEQ ID NO: 143177 - DNA, 267 bp, Zea Mays
gtgctcgccgagtgttgtcggttgtaccttagcactcgtgcttgccgctggctagcgttaacgctcgcgcgcctgctcgttgtcactgcgtcgcactcgctcttcgtccatcgggcttcgcgcgtgctcgcgtttgccgtcgagctattgaacccgtccttccttgctcgtgactttgtcgttgccagagccctcactagatttgtgtcctcgccagcttgctctagacacaatctcgtcgtcgttccgtgtgtcatcaagaaatcc

SEQ ID NO: 143178 - DNA, 1421 bp, Zea Mays
ataaggaggatattatttactaatgtagaaatgtttatgttttagcagttgccttgtaatatttgtcttaaattttcgtactttccagctttagtggctcgccaactaaatctagcatggttccctgcttcatataactaaatctagcattattgtcttcttctatttgttgtacaagaaaagatagaatggaactcaaattttggtggcctaacaagtgtggagacttgaattcatatatatttagcacaaatagttctgaccaagttttttaattagtattagtttggatttagagtacacttatgtatgagttattcgacaatgcttatttattagatattgaatggtacttatctatactatattaattataatgttattaaatatatgtttatgtatatttctctttcaaattattataatatggtatctgattataaattaaagaatttactgccatgtaaatcatttcgtttaaaagtacacaaactcggtcctatagcttactgagaactttcatgacctttaattgttgatcagagagggtagcttgatagtaccatagtctttaaacctgtttttagtgtttatatatatatatatatatatatatatatgtgtgtgtgtgtgtgtgtgtgtatctacataacatgaataggacataataaatagctatatttagcgtgaagtatatatgagaatacagacttgggccggcgacatggttgaagctcgtagttttgaattgttggcataatgatttgccaatggattcattgagcgagatggcacagcaaggtgagtttctgattggactcctcaatgaactagcatgttgggctttggcacctggagcagagtcattcttcaggtcccttctgttaggaaggatttggatgcgctccttgtttgagtgctccaaatctgaaaaccaagcaggaatgtcctcaggaggcttggagccttcatgctggtcaatcttcccaagaagaaaggtgtattgagacttcaaatgcttctagtttgtcttcagctgagtctgcaaccgaaacagtagccagctgaacatgctgacatgttaatgcgggtggtcaaggctcaggattcagagcagaagatacacataaatactggtgaatgatgccatcgacgatgatgaaatgatcaaacgatggatgatgccatcgatgaaagatggaatggaactcaaatttgggtggtcgcacaagtgtggagacttgaatttatatatacttagttagtctcaatgttagcacaaacagttgatgagcaagttttcccattgtattttagtttgaatttagagtacatttatgtaagagttatttgacaatgcttatttatgagatattgaatgatatttatctatattatattaattataatgttattaaata

SEQ ID NO: 143179 - DNA, 853 bp, Zea Mays
atctccctcctccactcgggtcttcacgatgccgccgccgccacacgacatcgcacatccgctcttctccctcccctcgctctcggcggtcgacgtgcgctcccctggtgccatcgcttgtgcccggctcccgccatcgctggctccccgatggacctcgcggctagtgtggggccatggatccccgacggatcgagggtcgcgccgcctcatgagaaaaatcatctttttggctcgaacagaaaatacctgaagcttcaatttgacatcgtgtagcaatgaatgcgtgcaaggaatgctcttttacatgttgagaatgaagaaaaattagatgtcgtggaggcatcccaaaacattgtttcttctatctacaggaatgtcctcaggaggcttggagccttcatgctggtcaatcttcccaagaagaaaggtgtattgagacttcaaatgcttctagtttgtcttcagctgagtctgcaaccgaaacagtagccagctgaacatgctgacatgttaatgcgggtggtcaaggctcaggattcagagcagaagatacacataaatactggtgaatgatgccatcgacgatgatgaaatgatcaaacgatggatgatgccatcgatgaaagatggaatggaactcaaatttgggtggtcgcacaagtgtggagacttgaatttatatatacttagttagtctcaatgttagcacaaacagttgatgagcaagttttcccattgtattttagtttgaatttagagtacatttatgtaagagttatttgacaatgcttatttatgagatattgaatgatatttatctatattatattaattataatgttattaaata

SEQ ID NO: 143180 - DNA, 629 bp, Zea Mays
cagctatcagctaggaacttgtgagatgatattattgataaggattacaacacacatggatatgtgaacttaaggtgcgaaggttgacttggaagaaattgtggcagcaccagttcaggatggacaacaaccaaaatctcctacaaaagttgtttctaatgtgctatcgagctccagtgtgttcctatgcaatctggtcttcataccgcctccaagaaaagctccgcaatgacagtttctgcaaaggttcaacaactttaggatcaactagaggtcgagcaacaagaaaaagatggacttcatgaagaagtggaaaccttagagactggagcatctcaggacaccattgatagtatgaagaggtcaatgaaaggaaataacaatattcttcatcaactattaagcttcaatcgaggccaagtttttccatcttaactccgcttgaccccaataggacctgcaaccttatgactactttagtagctagttacaatagctctggatttgtagttataggattattttcaattatgcttactgtttaatactttgagttgaagttattggattatatttggattttaagttaaaggatttgcatctatatgttttgaagttatattattatc

SEQ ID NO: 143181 - DNA, 727 bp, Zea Mays
cagctatcagctaggaacttgtgagatgatattattgataaggattacaacacacatggatatgtgaacttaaggtgcgaaggccatattagttgtttgaagaacaaatttaatcgtgaaaaagtacagtatccacaatgcacaggctcacagtcctacattgcaaaggcttatatattggttgacttggaagaaattgtggcagcaccagttcaggatggacaacaaccaaaatctcctacaaaagttgtttctaatgtgctatcgagctccagtgtgttcctatgcaatctggtcttcataccgcctccaagaaaagctccgcaatgacagtttctgcaaaggttcaacaactttaggatcaactagaggtcgagcaacaagaaaaagatggacttcatgaagaagtggaaaccttagagactggagcatctcaggacaccattgatagtatgaagaggtcaatgaaaggaaataacaatattcttcatcaactattaagcttcaatcgaggccaagtttttccatcttaactccgcttgaccccaataggacctgcaaccttatgactactttagtagctagttacaatagctctggatttgtagttataggattattttcaattatgcttactgtttaatactttgagttgaagttattggattatatttggattttaagttaaaggatttgcatctatatgttttgaagttatattattatc

SEQ ID NO: 143182 - DNA, 855 bp, Zea Mays
ccgacctcttgctagggtttcattccccctctccctctcggccagcaccacctcacatcaccgtgatcctatgacagccatggcggccgaagcaccaccgtcggcttcaacgtcctcctcctcgacctcgcggctacctctgcctccagcggtggggtggtcagatccgcatagttgtacatcgggagctgcattagcttgactttgaagagcgagatcgggtatgagggcgtcctttacaccatcaacaccgaggagtccagcatcgggctttgcaatagtaattcctttctcttctccagcactcgctccacatccgctactgtcacttaattttctcaaatgcgaatgttccagacctagatttgctagtccttggtgcgctcagcgaggtgaatccttgtcccctagccccctaccaaatgtcatggtctcagggattgagggggattcgaaattttccaatgtattgtagaactatgtttacccaccccacttactcctcgattcaatttgtcactggttattgttctgcctgctatgtcctctcatgtctaaatcagttaaacttcagttttcaaactgagacgtgtgcgcggtgtgccttaggccttagctatttctttacttcagatgccactgttatgatgtacacctgtcaattccttgttaatgtgcttcatagctgcttatgcatgcagaatcatcacgctggaaaagatgtaaagtacatattcaaccttttgaacatcgtgatactgaagattgcataggatcaacttacacatatgccttccatccctccacattatttatagttaaccaacgaacctattaataccacatcgacacaca

SEQ ID NO: 143183 - DNA, 457 bp, Zea Mays
aatgttttgttaaagctaggagatggtatgacggaaggacaaaatgcgaaaactagagtacactgtgtggccggtcaatgaacttgtctgttgtaagtccctaaattccaaaatgcagaattgactcactgaccttgatatggatctcactcatggtccaatagggtatagaccaacatggtgcgctgttgtggttcgctatgagatccgtcatgcagctccatgtccacacctgtgcatcacattcacatgggtggtggtgccaaaacgccaccatggtcgtcatctccctccttgagacactggcctcaactcctcaaaccctcctgtgtagccacacctgctcccaatgtcccactcctaccccactgcagcctccaactccttaggtccccatgcctcccctctctccgcacccaccaccttcccaccatcatctcccctctcggacacgaag

SEQ ID NO: 143184 - DNA, 528 bp, Zea Mays
caggggtcggccttagatgcaggggtgctttgatctgccattagcaaaggatttagtgtgcaagaaagaaagttttatcgagtagatggtggttgtgcaaatacatcatccttcattgcaacatatagaggggttcaataccatctcaatgagtttaggaggcgtcgttcattacaaagtggttatgcaaactacagagaattgttcaaccactgccatgcaattctctgtaaccgtatagagagggccatcggtgttctaaagaaaaggttcatgattttaaaattaggcacatctcgtcccatagagaaccaaatcaagatcctagctgcaactgttgcatttcacaacataattagagaggaaaatggagacgaaagatggcttaacaaccaaccagattacatctctacaagtcaatatgttgatgttcctgagggagataccaactatctcaatgacacagaatcaattgattaaagcgctctaagagataatatcacacttcagatgtgggctgcctacaat

SEQ ID NO: 143185 - DNA, 906 bp, Zea Mays
ccgcgtcctcctaccccgcgctggcgactgcatcttccggggccgagccctcgatccggcgcgcttcgccgccggcatcgaggcaggagggcgagaagcggccgtgcggaggcgggtctgtcggcgtagagctcgcaccccttcgaaccaaggccgcgcgacccaccgcaacccaagatccaagccagcttccccctgttcgtcgccggagagtcgccatcggaaaaaggcttcgtcgtccgccgacttcgtcgaaggcaaccggcaaaaggaagagaagctcgtcgccgccgtcgtcttcgtcttcgattcggtccaccgagccagatccgcgaagagcgagccatggattcggagaacgaaaagctccgtaaagcactggctactctgctcagagttgttcaaaagcgtagttgtgacatcgttgatgtcgtcaaatcagccttccagcctttcaactcacctttggtcgacgaattgaaccgagcactagttgagattgacgacctcgccaaggatcttgaagacgtagcagtgcaaactcagtgggaggtagaaaatatggctaacagtcaagtgaaagaacatccacaacaagaggaagcagtagaggaccttctcatacaagatggttcagaagacgacctactgatagacgaagagtcaccaattaactatgaagaccttgtgggctacgacgatggtcgtgactactcaaccgacgacacatatccgtactagtgttctaggtttaacttcagtataagtattgtagcatgttcaggtctatgttaaggtgtacttgttggttggtatgatcatgcttttgggggagtttaatgttctggtctatgtaaactgaatccggttcagttactacaataattattgtgttttgttggacta

SEQ ID NO: 143186 - DNA, 2838 bp, Zea Mays
aggcataattgcaaggaaattctttaccactttctgtgggttccttccagatggagttccaatgccttgctcaaagttagaaatattaactcctgtagatctgtcattgcttataatatccagctctgaagcaacacttatactgccatctgaccttatggacatatcattgtcatgctgatacaggctccttgtcctgttgttcaatccaatgggcatgccatcatcaccttgtgggcgcacaagtttccttctgaatttgcttcggggtgacactgtttctgaattgttcctatctccagattgcctttcgcttttgttagactcagcagaaggaataggtggtctagccctccgctctggatcaagttttctctgtagtaattttgggctagtggaatttttgttcttttgcatacttacgctactattccttggcagctgctgtcttctggttgagctctcagtgaccagcagtgaactagatttttggttgttgctgctatcatcattccttccatatgatctcctgtcacaagaaacaaggggttgagaagtaggcacccttggactcaatttcgcatattgccctttggcggttctattaatcgttgaagctttccttctatcagtgctattgcttgtttgtggctgtgggagatcagatgaacctcctaatgggaagacagaagaatccactttgctgtaaaggtttgcagattttgaaggtttcattatcacaataggcgatttgaaagagctttcagcgttgctctcttcaggcatccacatgttgttggtgttacggttcagtctcatgttcgcactggccatctcttggtcatcatggtttccattatatagctttggcataaatgcttcctcccgtttcttattttctaatagtccttttgcagaatccaaaatctgtttaagtgctctaaggtctttgtttggttgctgaaaatcaagatccttcagctggttccatggtgcagcaggttctcttccgtgggctccttttgatccctttggcagttttcgtggaaggacaatcctttcttgttgcttccatggtgcagtttggacagggaacttagagttgggtaaatttcttacagttgaatcaggattcctttcttgttgaggagcatgctcgtactggtaggagatgctcaaggagttcaacatggcatcttgcttgttctcttgaacggtattgcatgcatgtgatgatgctgtactttgattatgctctggcaactcttccaaacccatgagctttgcaacaacgctaggaagccgcttgcaggcaggctgttcctgctgggtctcgaaagctgcattggacccagtaacagtgttgctgtttctgtctgcagaactcaagcttgggtccaacctagagtcaatttcacgattccaaaggtgaccttccttgatgtccaatgacaacctcggtacctccctcaattttgatgttgcttcctttccatcgtatgagaaccgaggagcatcatatgagagtcttgcatgatgaacagattcaggaggagtccacgaggcttccctgagcttggctagcactcgaagcgattcgttgatgtccatgagacccttgctttttccttgtgtactgtcatggtgaggcccattcaattgcataggttgatctccacagttggatgggtgatcttttacttcttcttcagtgctaattctgactgacaattcatggctatccttgtagattgaatccttcacaagatttcttataccaagagttggcaggctggattgaactatgggcatgttcttggacttggtaagcgcatcatcagggtagtcgagtccattgtcactgtcaaaagaactcttgagcttcggcgagctcttaaacggcctctctggaaatagcattcggtcagtggatgataggtcttgttgtgttgacctgttgccatcaagggatgagaatgacgaagagggtgatgatgaatatgaggtttgagatagttctgttgctggtgctctttggctatcagcccaagttttactcgagttcttctcctggatgcagtttgcagtaactcaagtcaggatttgtgtgccagagcaaggaagcgaacctgttggggggaggagcctcttgtgggaggaggcgagatggtggcggcggtcgaaggcctgcaagatcccggtgacgcagcccacctggcgatagagatccgggcgcctgtcctccgccaacgcccccaggtacttggccggcatcctccggttcccccttcccttctcgtggaaagagaacccggaaatgcaggaggttgccctcctttgcagcaggttacgaaggagaagaagaagaagatgtcatttgtaactgccccgccgcatttcccggaggagggacctcgccggagagggaacgctcccgggagggagaggcggtcgtgctcgtcgtacctccctgacggcgagcatccagcaaggaggccagccaccggaccgctgctgcctctcactctcagtcactgtccagctacagcccctccagctagcaggatggcaggatttccgagtggtgccctcacctccgtccgtgtcctgttcttcctatggcgtatggccaggagggaagtgcaggcaggcaggcaggctcgtgacttgggtgaggaagattacagaatatggggacctcgcattgcgcgctgggtcaaggaggcattgaatgcacgggccaccgaacgaacggggagctcccacgaaccaacaacaccctacctctacctctatgaagagcagaatgatgagaaggttccaccagctcccatgtga

SEQ ID NO: 143187 - DNA, 443 bp, Zea Mays
cccccctttgatccacttatagatccgtcaaagggtattgtgaatattctggaagttgatccgtgtgataaggaagcggtgttcttgagaccacaaaattacgagaaattcctcgccaatcccctttcccgagcttttgtaatcccagcaaaaacctccggtgttcttcttcagtccaaggaacacctgtcagagcaaccttactcagcaacatggcatagaaagcccaaaatgcggccatgaaggcaggcagcaatatgtgtagctacaagaagacattgaactgtaatgaatcaacaacagcgtattaacagagcatggtaaaagttagcaccgccactttgctgttgaacaagtcatatagaaagggtgccattgacaaatagaagaataaccaaacagcaccaaatcagaggagagctaaaaaagggcataatctgaag

SEQ ID NO: 143188 - DNA, 1459 bp, Zea Mays
acaattttgcacttccacccctagccgccacaacctttctccctctcctctcctttcagccaacgtgcggctccagcagggagcctttctccccaagcgcatagaagcatctcctggcgtcttccccttcccagcgtaggagcaagggcttcccatggcggcctcccttgtgacatctccccctacaggttccaggtcggcgcccttctctagcctggacttgtagcgcctgatgcccatcttcgccctctgctgtcgaaggcacgggcaccattttcccccatggccgagctcaacacctgccaggacaagctgcgggcccctctgctccagccatggcgtgggaccttctctggttggagctcgagcaggtgagctcgccccatggccttggctccttgtttgcttgctgcacgtacgctccctctcccatctggctttctgcccttctcaagtccggccatccccgccttgccgtggatttcctcgagcagccccacctggccgccatcctcctcagatcgacctcccctttttgtgtagctcaccatctccccatacgcgcgctagctggacgccatccgagctccgccagccggtctgcaactccctctcgctgcttcccttggacgccggagctccaaggtcgtacctccgtctccatggccgaccagcaaacctcgatggacgagctctctagcactttcctctcctatggcgcgcctgcccccatggatgaagccccagtttgccggtctcctctctgctccatggccgagggcccattccctagcaccctcctcgcatgggcaggctgcgggtgctcggcacccccctaccaaccttcgccgagttcggccacccctcctcgtccttgtgatagtagcaggtgctcgacaaaatgcctgtgagaggcttggtgttgtggacaaccccgtccgcgacgtcgtcgacccccgccatcgatgtcgcgcttcgagctggtccgttcagcgaaatgtcgagccacgtggacagcccctgtgactagtcccatttcgcttaggttattttccttgtggtttgttctacttataaaattggtcgatatcgtgtatgtacatgtgtgtaaataaaaaaaattaagcgaattatgcttgtttgatgtggtgagaagaattaaaaatatttgtctaatttatacgaaggacgcatcgacatatgattgtgtgtgccgaaatgcgttgtagtagtgattgcgtcaagttaaacggtaatgtctcgagtgcacgcaacaacatggttgtatgcgagacagggtaaaataaggtgtgctcggcatgaatgttcggtcattgtaggtagaaattttcttgcttaaatagagaggtggtgacatgccaaagtagtcatcgcttctctatatttataagtcgagtcgtgacgatgcgcattatgtgttcgttaaattatgttttgc

SEQ ID NO: 143189 - DNA, 1247 bp, Zea Mays
acaattttgcacttccacccctagccgccacaacctttctccctctcctctcctttcagccaacgtgcggctccagcagggagcctttctccccaagcgcatagaagcatctcctggcgtcttccccttcccagcgtaggagcaagggcttcccatggcggcctcccttgtgacatctccccctacaggttccaggtcggcgcccttctctagcctggacttgtagcgcctgatgcccatcttcgccctctgctgtcgaaggcacgggcaccattttcccccatggccgagctcaacacctgccaggacaagctgcgggcccctctgctccagccatggcgtgggaccttctctggttggagctcgagcaggtgagctcgccccatggccttggctccttgtttgcttgctgcacgtacgctccctctcccatctggctttctgcccttctcaagtccggccatccccgccttgccgtggatttcctcgagcagccccacctggccgccatcctcctcagatcgacctcccctttttgtgtagctcaccatctccccatacgcgcgctagctggacgccatccgagctccgccagccggtctgcaactccctctcgctgcttcccttggacgccggagctccaaggtcgtacctccgtctccatggccgaccagcaaacctcgatggacgagctctctagcactttcctctcctatggcgcgcctgcccccatggatgaagccccagtttgccggtctcctctctgctccatggccgagggcccattccctagcaccctcctcgcatgggcaggctgcgggtgctcggcacccccctaccaaccttcgccgagttcggccacccctcctcgtccttgtgatagtagcaggtgctcgacaaaatgcctgtgagaggcttggtgttgtggacaaccccgtccgcgacgtcgtcgacccccggtgaggcaccccgctatccttgctgtttttgcgtccgtagtgttcgacgatatgccaaattcatgaactcttgtgttatcgcagcagccatcgatgtcgcgcttcgagctggtccgttcagcgaaatgtcgagccacgtggacagcccctgtgactagtcccatttcgcttaggttattttccttgtggtttgttctacttataaaattggtcgatatcgtgtatgtacatgtgtgtaaataaaaaaaattaagcgaattatgcttgtttgatgtggtgagaagaatt

SEQ ID NO: 143190 - DNA, 2289 bp, Zea Mays
ctattcgagtgaaagcggcccccaatttctactgtaagcagcaatggcgctctcctgttacttgctcgccggcgcccgggcggcagcctccccttccttctcatcctccgctgccatccgccggcgggaccaccgtctgctgaccttgtccgtggttccgctttcgctctctcagcgatgtcgccacggcctccgcgtgtgctgcgcctcctccacctcttcctcatctccgccgccggcaactcccgaggagcccgacgactacgagttattggacacagctgggaattgtgaccctctatgctcggctgatgaagttagctcacaatactttgaagctaactacaaaccaaaaaatgaccttctaaaagctttaactatcattggcacagccttgactggagcagccgcaataaaccattcctgggttgctgctaatcaggacattgcaatggtgttggtttttgctattggctatgcaggtatcgtttttgaggaatcactagcatttaacaaaagtggagttgcgttattgatggctgtctgcctatgggttatcagaggcattggggctccctcgactgatgtagctgttcaagagttgagccagtcaacttctgaagttagtgaaattgtgtttttcttgcttggtgcaatgactattgtggaaattgttgatgcacatcaaggttttaagctggtgactgataatatatctactcgaaacccaaaaactcttctgtgggtgattggtattgtaactttcttcctgagttcgatcctcgacaacctgacttccactattgtgatggtatccttgcttcgaaaactagtacctccatcagaatatagaaaattgttaggtgctgttgttgtaatagcagcgaatgctggcggtgcatggacaccaattggtgatgtgacaaccactatgttgtggattcatggtcagattacaacattgaaaataatgcagggcttgtttattccctccactgtttcgttggctgtcccactggctctgatgtccctcaccagtgaagcaaatgggtcatctgagaaatcttccagcttgctgtcatcagagcaggtggctcctcggggacaacttgtactaggtgttggaattggagcattaatgtttgttccagtctttaaagctctcactggtctgccacctttcatgggtatgctacttggtcttgggattctctggatcctgacagatgcaatacattacggagactctgaaaggcagcggctgaaagttccacaagcactatcacggattgatacacaaggaattttattcttcttaggtattcttttatcagttggcagcttggaatctgcagggattttgaggcagttagcaaattatcttgatgccaatattccaaatgctgatcttattgctagtgcaattggtgtggcatcagcaattatagacaatgttccacttgttgctgcaaccatggggatgtatgacctgacttcgttccctcaagactcggacttctggcagcttgttgcattctgtgcgggtactggtggttcaatgcttatcattggctccgcagcaggagttgcttttatgggagtggagaaggtggatttcttttggtattttcgcaaggtgagcggttttgcctttgcaggttatgcagctggtataatctcttaccttgctgttcaaaatctccatctatcccttcccacgtcgctggttgagatcccttttatttcgggatcataaaagcttggcctttgtggtcattttagaatgatcacactctacatatggaggtgaacatcattattgtttccatatcttatgtaaggtccagtgtgtcggcatgtagagtattcagaatttgggggataagacagccctgagcttcaaggccagacatcagttttggacaggcttatctcgtgctgatgaactttagggtagggttgagctccttactagggggctgtttggttcgtggctaaatatgccacactttgcctaaggttagtcgttcgaattgaagaattaaccttaggcaaaaaagttaagcaaagtgtggcaagttagacatcaaaccaaacaagccctagaactgtgggttcgaaccaaagtatgccactctggatatttgtgaacctactcggcaaacaaaggagcaacttagaaatgtgcaattttgtaagaaacaatcccttgtaagctaagagtgtaataagatacagaaatcttgtataactgctgtctggtaatctcattgatggtcttgttaggca

SEQ ID NO: 143191 - DNA, 1300 bp, Zea Mays
ctattcgagtgaaagcggcccccaatttctactgtaagcagcaatggcgctctcctgttacttgctcgccggcgcccgggcggcagcctccccttccttctcatcctccgctgccatccgccggcgggaccaccgtctgctgaccttgtccgtggttccgctttcgctctctcagcgatgtcgccacggcctccgcgtgtgctgcgcctcctccacctcttcctcatctccgccgccggcaactcccgaggagcccgacgactacgagttattggacacagctgggaattgtgaccctctatgctcggctgatgaagttagctcacaatactttgaagctaactacaaaccaaaaaatgaccttctaaaagctttaactatcattggcacagccttgactggagcagccgcaataaaccattcctgggttgctgctaatcaggacattgcaatggtgttggtttttgctattggctatgcaggtatcgtttttgaggaatcactagcatttaacaaaagtggagttgcgttattgatggctgtctgcctatgggttatcagaggcattggggctccctcgactgatgtagctgttcaagagttgagccagtcaacttctgaagttagtgaaattgtgtttttcttgcttggtgcaatgactattgtggaaattgttgatgcacatcaaggttttaagctggtgactgataatatatctactcgaaacccaaaaactcttctgtgggtgattggtattgtaactttcttcctgagttcgatcctcgacaacctgacttccactattgtgatggtatccttgcttcgaaaactagtacctccatcagaatatagaaagtatgctttctgataactcatctgtcatggctacacattatctagtacttctttgactattccgccattttactcatgatgatcttatcctagcaccactgtacatatgtaatatgttcattatacacttgctttgtatacttgaatagctcctaggatcaatattgtgtatagcatctttctactcaagcctagtggttaaggctttcgagtagcacctccaagtcccgggtttgattccccccgggggcgaattttcaggatcaatattgtgtatagcatctttctactcaagcctagtggtatagcatctttatcctgtagcagcttagtagataatggaccatgttcaaccttgcaatatttactctgtgctcttaaaatagcaccatgacatccctgtgctcttgctgtgatcctcactaagtcagggtttgaaactgtt

SEQ ID NO: 143192 - DNA, 78 bp, Zea Mays
cgagataaacacctctcctcatacacagagcctttgtcttcctccctgcatatgttatgtttattatggcatcgacat

SEQ ID NO: 143193 - DNA, 276 bp, Zea Mays
atggacagggagctgctgctcgcctgcagcaagggcgccgagttggggaggctgagcgcagggaggctagaaaggagggcgccatgggaggcctgggcgccatgggaggagcttcaacagtggggtccgaccacggtcagcgaggggcgagctgcagagggtggcgccatggggagggccctgctctggcgtgctacggcgttccagggagcagagtggagggaggcaaccttggctcagcaggagcagcccttgcctgcagcaccaaccggctga

SEQ ID NO: 143194 - DNA, 402 bp, Zea Mays
atgccacacctggcatcaacgccctcctccccctctgctcccctcccagatctcgtgatccgctgccgtgatccattgcgaggccaccatcaacgccctcctccccctccactcagctccctcccaggatctcggcgcgctttcgtcgccgccttgatggtccacggccgcacccacatacgccctcgcctgcccgcacacacgcttctgcctacgcccacctgtgtgcatagacgtgtgcccccgtccaactcttctgcgcccaatctttacccgtcgtccgcgccgttgttccatcctcacacccacgcccgagatccacatgtgccgcaccccagccatgctccggatgctgcaccgcccttccatcctccgcatgcagcaccatgtggcccccgccct

SEQ ID NO: 143195 - DNA, 1398 bp, Zea Mays
atgccggcgacggcggggcgcgtccgcatgcccgcaaacaaccgcgtgcacagcagcgcggcgttgcagactcacggcatctggcagagcgccatcggatacgacccctacgcgcccgagaacgacaagcaacagccggggcggccttcgtcctccgtctccgccaacgccgccgccgcagctgccaacgacgccaacgcagccgccagcgccgccgcagcttccggatccggctcgggcgatggcaacgcctacaccagcttccagggccttctcgcgctcgcccgcatcacaggctccaactccgatgagacacgcggcgcctgcaagaagtgcggccgcgttggccacctcactttccagtgccgcaacttcctctccgtcaaggacctggacctggacgacgccgacgcccaggccgctgcacaggcggccgcgcaagccaagttcgacgagataaaaaagaaagctgctgccggtggggatgcagatgatgcttctgatgatgtggaagaggacgaggacagcgattcctctgattcagacatcgaccctgagctggagaagataattgctcagcgcgagcgctccaggaatggagcaaggtggcccaggaaggaaaagaagtcgtccagccaccaccataggaacagcagcagcaagagaaaatcaaagcacacaaggagtaggagtgatgatagtgaggaggatgaaggcagaagaggccgggacaggaagaagatgtccggcagatcgaagaagcatgaaagatctgatgaggctagcagcgatgacactgattcagatagacagaggcacaggaagagcaggaaggacaggaagaggaggagccaccgcaggagtgacgacacgttggatgagaaggatgtatctggaggtgaagaaaggaggcatcaacgtcaccagcggagccatcactggagggatgcatctgactgtgacaatggtgacagtgattctgcacatgacaagaagcaatccagcaggcggaggaggcattgccagtcagaaaacagtgggctagatgaggatgagcgacatgaccaccggggagcaaagcgatcacggaagaatagggaccacaagaggagctaaagaggagcattgaattggctctgcttttgtggtatttgaacaatcagcttttggggtatccttgtatgagatttttgaggtgataccaagtactgggaaattaatcatctcaaacaactagatatttttctccatctcaagctcaggctggcaattataatgctatggatcgctaaatcctgatgaatgattgagtgccgattcatcatccagattgtgttgtatgatatacatttgaaacgagttattttgcatatatatattggtgtatcttgactgcca

SEQ ID NO: 143196 - DNA, 1680 bp, Zea Mays
acccttccttttccggttcgactttcgacctttcgacgcgttccccaatccagctgaaatcaatccctgatccccaatccccgtccaccctcccaacaaaccctaactctacccctcaaccgagcgcaaccggcggcgatccaagatgccggcgacggcggggcgcgtccgcatgcccgcaaacaaccgcgtgcacagcagcgcggcgttgcagactcacggcatctggcagagcgccatcggatacgacccctacgcgcccgagaacgacaagcaacagccggggcggccttcgtcctccgtctccgccaacgccgccgccgcagctgccaacgacgccaacgcagccgccagcgccgccgcagcttccggatccggctcgggcgatggcaacgcctacaccagcttccagggccttctcgcgctcgcccgcatcacaggctccaactccgatgagacacgcggcgcctgcaagaagtgcggccgcgttggccacctcactttccagtgccgcaacttcctctccgtcaaggacctggacctggacgacgccgacgcccaggccgctgcacaggcggccgcgcaagccaagttcgacgagataaaaaagaaagctgctgccggtggggatgcagatgatgcttctgatgatgtggaagaggacgaggacagcgattcctctgattcagacatcgaccctgagctggagaagataattgctcagcgcgagcgctccaggaatggagcaaggtggcccaggaaggaaaagaagtcgtccagccaccaccataggaacagcagcagcaagagaaaatcaaagcacacaaggagtaggagtgatgatagtgaggaggatgaaggcagaagaggccgggacaggaagaagatgtccggcagatcgaagaagcatgaaagatctgatgaggctagcagcgatgacactgattcagatagacagaggcacaggaagagcaggaaggacaggaagaggaggagccaccgcaggagtgacgacacgttggatgagaaggatgtatctggaggtgaagaaaggaggcatcaacgtcaccagcggagccatcactggagggatgcatctgactgtgacaatggtgacagtgattctgcacatgacaagaagcaatccagcaggcggaggaggcattgccagtcagaaaacagtgggctagatgaggatgagcgacatgaccaccggggagcaaagcgatcacggaagaatagggaccacaagaggagctaaagaggagcattgaattggtaattcatattcgatgatgttatcgagttcctgtagtcatcagctggtctgttgtcttctcataagttggaaacatttgaaatatgatgcttaatatgtgtaacaatataacatgttggtgtattactgtatgtctgaactatacgtcgagtctattatgtgttgatgattcaataattgatacattgacaaggattttttaatattatgcgttcagttagccttccccctcaataatactgcataagataactagtattagaacttttttcatacattgatggaaccagctagctgccaagtttattgagatggaccttataaagaattggattaggccctatagtaactgcttttatttttaagggacatgtttttttatggagtgatggcttaggtta

SEQ ID NO: 143197 - DNA, 402 bp, Zea Mays
atgacactgcagcacacacggcatggtgtgctgcagcgatttagtgtcaaggcaaggtcagagaagcggcgtcggcaaggcctgagctggaaatcgggcgagggagaaggagctcgcagggacgccaaggtgagggagcagcacgccagggaggccgagcagggagcatgtgctacagcgtccggcgagcagaggccctgggcacgagctgaagctgacaaggggcgagctcaagcatggagagcatgtggggaagaagaggccgatggccacgggctgggcgcagcttgctgtggacagaaagcgagagataaggctgacagggagatgtgcataccacttgagaagataaggctgggatttaggagctcgatgagaataggtacgcccaccacggtctaa

SEQ ID NO: 143198 - DNA, 514 bp, Zea Mays
gtcagccttatctctcgcttcctgtccacagcaagctgcgcccagcccgtggccatcggcctcttcttccccacatgctctccatgcttgagctcgccccttgtcagcttcagctcatgcccagggcctctgctcgccggacgccgtagcacatgcttcctgctcggcctccctggcgtgctgctccctcgccttggcgtccctgcgagctccttctccctcgcctgatttccagctcgggcctcgccggatgccgacgccgcttctctaacctagccttgacactaaatcgctgcagcacgccataccgtgtgtgttgcactgtcatcgttcgctatcctcatccttgccaattttcctcgtcgtttctcggctacaacctcgtcagctcctgcgcattgtgcacgtcttgtgttcgggtcgagccccaggattttgaggaaaaggaagctctagtgcatcaaccggtgaaataaataaactggtggtagtcatggtccttgcgaaatccgag

SEQ ID NO: 143199 - DNA, 1664 bp, Zea Mays
gagagaggctcgatggcgatcaggatgccggcgctcatcttccgccgccgggcggccgccgcagctccaaagccgatacaacagtacctcgctggtctatccaccgcagtggagcacgttattccagaagataacggtcacattgccggtggggaggagaacaagaagcggtgggtggagcttcctcccttcgcaccactcgacgccaacgccaccgctcgagctatctctcggggagatggtggggaaggagcatgctccaatgccacggctatcaggtgggtccgacactgctgcccacacgtaccagcgtcgctggtccagaagctgttccgcctccgcaaggtgaagaagaatctggtgactgctgatacctcttcaacagacagtattactctgcaactccggttgagaagggtttcagcaaaagatgaacttgtgcctggtgatattctctttctacctgttaacattcaagaatcttctgttaccgagaagaccaagaaatttggtaacaagaatgagattgattttctacgtgaccttgaaatctacaaggatagagccatcattgtgctcaacaaaccacctggaatgccagtacaagtccacaggcttgatagggattgcagtggcgtccttgttctgggaagaactcaatttagcgcttcccttatgcatgctatatttcgtgagaaaactgctgatgctttaggtgatggtactcaacaagtactgcaaagaaaatatgttgcacttgttattggaagacctaggcatcccaagggtttattgtcagcaccacttgcgaagaatcaaggaaacatgtttgacttgccattgggatatggtctgcacactaacctctataaaagctctgtcgcccccatccattgctctgatgaagaaaggcaccaaatagacgaagtcttggcctgccacatcaaagagaggtggcaccgacggccaaggcaaaggcagacctctcggtgctgggaggaggttgtattacaagatggcaggtcagagcgtctgactgtttgcgctggttcaaatactgcttctgttcaagatgctttgacagagtaccgtgtgattgagtcttttcctcaagggtacacttggttagaactattccctcgaactggaaggaagcatcagctccgagtccattgtgcggaggttctgggaacacccatcgttggggattacaagtatggacgccaagcacaccagaactggatgcctctccccatgccacaaacaatcgacaaggaaatgctgaagaagaggaagcttccctttggtcttactttgggcggtggaagcgtagctgagcagcagcctcagctgcatctacactgcaagcagatgatccttcctgacatctcagcagctatgcaacagctgcggtcttcagatgctgaccacgatttctctgatctggagaagctgagctttgtcgcgccattgccattgcacatgcagttaagctggaagattttgttgtccgtaggcaagtagtgttgtcatttcttctttaggcatgcttgcttgctgtgctgtaataactttataactgcgaggtttgcgttaagacgtcgtagaaagcttaatttgggctgttggagcagcggacctctaatgaggtgaaagatgacatc

SEQ ID NO: 143200 - DNA, 1508 bp, Zea Mays
aaatccgaacccccccgctcttggtcagagggggagtaaagcaaacaacggcggacatggtgcgcccaggaaaagcgcttgcggcgccccagctcctcctcctcgtgttcctctgccagcagctgctcctgccgcagggttacccgtgcaccgagcacaccgttcaaacggatgatggctttcttttgtctcttcagcatattccacatggcagaaatggaattgcagataatactggacctccagtttttcttcagcacggtcttttccagggtggagatacatggttcataaactccaatgaacaatcacttggatatatccttgctgacaatggttttgatgtttgggtcggaaatgttcgtggcacacgttggagtaaaggccactctactctctctgttcatgataagcttttctgggattggagttggcaagaccttgctgaatacgacgttttggcaatgttaagctatgtatatacagttgcacagtccaaaattttgtatgtgggacattcacagggaactatcatgggtttggctgcgtttacaatgcctgaaacagtaaagatgataagctctgctgcgcttctttgtcccatttcttaccttgatcacgtcagtgctagttttgttcttagagcagttgccatgcatcttgatgagatgcttgttattatgggcatccatcagttgaacttccggagcgatatgggtgtacagatattagattcgctgtgcgatgatgaacatttggactgcaacgatctgttatcttcaataacaggtcaaaactgttgtttcaattcatctcggattgactattatttggagtatgaaccccatccgtcatcaacaaaaaatttgcggcatcttttccagatgatcaggaaaggcagcttcgcaaagtacgactatggatggtggggaaacctaaggcgctacggccagctgcgtcctccctcattcgatctaagcagcataccggaatcactgccgatatggatggggtatggaggccttgatgccctggctgacgtaacagacgttgagcgcaccatcaaagagctgagatccacgccagagctcttgtacattggtggttatggccacattgatttcatcatgagcgtcaaggcaaaggaagatgtttatgttgacttaatgaggtttctcagggcccagcagggaatgcacagtagctattaggacgcacgtcacgtacgccttcaaataaatgcttatgctatgatgacagtacgaccatgtaaatacggacacagcatagcatgtaaatacaaacagtctattgcattgcatgtaaagtggtgtgtggattgttctccatttgatgtactgctttctgagtacagtacacatgtacatcagtacatgtaacatgtgtatatgacaaaaatgtagcacatgcaacttggcttatttcgtgccgattgtgtgcttgcatttggggaggaaatcgagttgcaaatacataagactatctct

SEQ ID NO: 143201 - DNA, 1822 bp, Zea Mays
gaaatatcgggtatgcatgcacttgggttgcgtctggtcggacgggtgcatctaaatccgaacccccccgctcttggtcagagggggagtaaagcaaacaacggcggacatggtgcgcccaggaaaagcgcttgcggcgccccagctcctcctcctcgtgttcctctgcctcctagccggtggagcccgcgcatccccgcccacagacgcgctacgccgcgtctccccgcgcgcgggggccggtggcctctgccagcagctgctcctgccgcagggttacccgtgcaccgagcacacctataactttgttgcaggttcaaacggatgatggctttcttttgtctcttcagcatattccacatggcagaaatggaattgcagataatactggacctccagtttttcttcagcacggtcttttccagggtggagatacatggttcataaactccaatgaacaatcacttggatatatccttgctgacaatggttttgatgtttgggtcggaaatgttcgtggcacacgttggagtaaaggccactctactctctctgttcatgataagcttttctgggattggagttggcaagaccttgctgaatacgacgttttggcaatgttaagctatgtatatacagttgcacagtccaaaattttgtatgtgggacattcacagggaactatcatgggtttggctgcgtttacaatgcctgaaacagtaaagatgataagctctgctgcgcttctttgtcccatttcttaccttgatcacgtcagtgctagttttgttcttagagcagttgccatgcatcttgatgaggtaatatagcattcctaaacaaatccaccaaataaatgtccataacttgtgaatcaagtatggtgcccttttaccacagatgcttgttattatgggcatccatcagttgaacttccggaggtaaattgacacttctttgcccgactttccttttttttccttgggtgtaattataataatttttaagttactccttgagcagcgatatgggtgtacagatattagattcgctgtgcgatgatgaacatttggactgcaacgatctgttatcttcaataacaggtcaaaactgttgtttcaattcatctcggattgactattatttggagtatgaaccccatccgtcatcaacaaaaaatttgcggcatcttttccagatgatcaggaaaggcagcttcgcaaagtacgactatggatggtggggaaacctaaggcgctacggccagctgcgtcctccctcattcgatctaagcagcataccggaatcactgccgatatggatggggtatggaggccttgatgccctggctgacgtaacagacgttgagcgcaccatcaaagagctgagatccacgccagagctcttgtacattggtggttatggccacattgatttcatcatgagcgtcaaggcaaaggaagatgtttatgttgacttaatgaggtttctcagggcccagcagggaatgcacagtagctattaggacgcacgtcacgtacgccttcaaataaatgcttatgctatgatgacagtacgaccatgtaaatacggacacagcatagcatgtaaatacaaacagtctattgcattgcatgtaaagtggtgtgtggattgttctccatttgatgtactgctttctgagtacagtacacatgtacatcagtacatgtaacatgtgtatatgacaaaaatgtagcacatgcaacttggcttatttcgtgccgattgtgtgcttgcatttggggaggaaatcgagttgcaaatacataagactatctct

SEQ ID NO: 143202 - DNA, 1645 bp, Zea Mays
gaaatatcgggtatgcatgcacttgggttgcgtctggtcggacgggtgcatctaaatccgaacccccccgctcttggtcagagggggagtaaagcaaacaacggcggacatggtgcgcccaggaaaagcgcttgcggcgccccagctcctcctcctcgtgttcctctgcctcctagccggtggagcccgcgcatccccgcccacagacgcgctacgccgcgtctccccgcgcgcgggggccggtggcctctgccagcagctgctcctgccgcagggttacccgtgcaccgagcacaccgttcaaacggatgatggctttcttttgtctcttcagcatattccacatggcagaaatggaattgcagataatactggacctccagtttttcttcagcacggtcttttccagggtggagatacatggttcataaactccaatgaacaatcacttggatatatccttgctgacaatggttttgatgtttgggtcggaaatgttcgtggcacacgttggagtaaaggccactctactctctctgttcatgataagcttttctgggattggagttggcaagaccttgctgaatacgacgttttggcaatgttaagctatgtatatacagttgcacagtccaaaattttgtatgtgggacattcacagggaactatcatgggtttggctgcgtttacaatgcctgaaacagtaaagatgataagctctgctgcgcttctttgtcccatttcttaccttgatcacgtcagtgctagttttgttcttagagcagttgccatgcatcttgatgagatgcttgttattatgggcatccatcagttgaacttccggagcgatatgggtgtacagatattagattcgctgtgcgatgatgaacatttggactgcaacgatctgttatcttcaataacaggtcaaaactgttgtttcaattcatctcggattgactattatttggagtatgaaccccatccgtcatcaacaaaaaatttgcggcatcttttccagatgatcaggaaaggcagcttcgcaaagtacgactatggatggtggggaaacctaaggcgctacggccagctgcgtcctccctcattcgatctaagcagcataccggaatcactgccgatatggatggggtatggaggccttgatgccctggctgacgtaacagacgttgagcgcaccatcaaagagctgagatccacgccagagctcttgtacattggtggttatggccacattgatttcatcatgagcgtcaaggcaaaggaagatgtttatgttgacttaatgaggtttctcagggcccagcagggaatgcacagtagctattaggacgcacgtcacgtacgccttcaaataaatgcttatgctatgatgacagtacgaccatgtaaatacggacacagcatagcatgtaaatacaaacagtctattgcattgcatgtaaagtggtgtgtggattgttctccatttgatgtactgctttctgagtacagtacacatgtacatcagtacatgtaacatgtgtatatgacaaaaatgtagcacatgcaacttggcttatttcgtgccgattgtgtgcttgcatttggggaggaaatcgagttgcaaatacataagactatctct

SEQ ID NO: 143203 - DNA, 1078 bp, Zea Mays
gatgcggacgctggtccagtagcagccatcgtgcaggcgagagttcaggaccatgacgtctggaacacgatcaccggacatgaagtaggaccggatgagctgccggaaacctctgttccggagggaatgcaagccgagatagttcatgctcatgttccagtggccgttgaagatgcttgtgatccttagagtccctgccccaccaatgggattggtgaacactgcatcaaactggcgtgtcacagcagacgtgtccgtgatgccgaggacgaaggtgaggaggttccggatggtgtcgacgtggttagagtcgccccagaagaagagccacttcccgtcaaggcaccaccacgacgcatcggccacaaagagcttgaaggagcagtgcgccgagtacacccacccgttgctctccagcgcgccgagcggcccgtcgcaccacggtgccttgcacgggtggtccaactccaagcaccggtaccgccccgctgcgtctgacgcccaaccaccggatacggtcaccagatgccaatgggaaatttctaggatccggctgggttctaggattcggctgggttctgtgccaggtaccttgctggtgaatagatagaagatgcgacacaagctgcggaggaagggggcagatccgaggattttaggaagatgttgggatggggtgctggatccgcttcgagcatggcaacggttaccgcagcaggccaggcgggcaccgcggaggccgaggtcgagaaggcggagtagtacctggcgccgcgtgtcgcggggagcgaggcgaggatggcggggcgacaccttccatcgatggagcgcgggcgcgatgatggcgggagcggcgatggaggatccctggaagggcgcgacggagagcagggcgggcggggcatggtgcaccaggggagaggtcgctcgcgcgagggcacacgggggcacaactccatggagagggcggacgcggagagagcctagcgcggcgatccagggcggaggatgtcacggacgcgggatctggacgcggattgcgggagagagcgacgattgcgggagacaggcgggggcg

SEQ ID NO: 143204 - DNA, 97 bp, Zea Mays
tatggcgctttgatacacatagtgtacatattaaatcatgtcatccatatcaaatctaatgttcctttatgttttgtatatttttgcaaagaacatt

SEQ ID NO: 143205 - DNA, 2575 bp, Zea Mays
cactgacagattggagcagcagcaaccggcaggcgcggaaggtgcagcggagataagtagtgtgattcaggtttggaccggaccataccaggctgaggcccattaatgatgcaatttgctgggcttctttattttctccgtgcttccatcctcttctccgtcggcggggagaagtgaaatgccgtggagatgggcggcggcggcggcgacgagaaagctcaccgggatctctcagtcgcgagtttcagtagcctttaccggccgtcttctctaccgctcgttcggaagcgactccagtgaaagccgcaagaggtcactgccacggggggtcgtatcgatcggggccatcagccttgctggaggtctcgtgctcagcgccgtcaacgacctcgccatcttcaatggatgcacaacgaaggcaattgagcatgctgctgacaaccctgctgttgtggaagcaattggagtgcctatagtcagaggaccgtggtatgatgcttctcttgaggtgggccatcgacggcggtctgtgtcatgcacattccctgtatctgggccacatgggtcaggatttctccagattaaggcaacccgagatggagaggatggtctgctttcgtttctgcggcatcacgactggaagatcctattgctggaggctcatcttgaagcaccatcagatgatgaggaccagagaaagctggttaaggtgaatcttgcaagcagtggccgtggggaagatggcgatccagagagtggttaatcttttgtactgaattccatggtgagtggaagatcgtgtcatctgaatggactccaaatattaaatgacacgtagatctagggaagcagatgttttttgctccaaaaatagcagcagggacggcagcaacctgcaagcacgcgggcaatatgctatttgtggccacattggcccagttttggcgttttggcgggtgcgtatggtcgcaacatgacaaccggatcatttgtgtttgttgttgccgccgctgcttctcccgttgccaagcctccatccaattggatagtcgcttcgtgcggtcccgtcccctcgccggccggcggagctcacggcttgccgctgcattgccatcgtgtcacttgtacacaatccaccaatctgattggattcggggggatgcttgggcaaattcgagaatttgctcaggcattcgttccgattgcggctagctagctgatcgcttaatcactcgacacgggcaaatttgcacggcgacgacgatgggcatcttgtgttgtttccagtcccacaccagcgatcacgctgttgcttcgtccccggctacctcttcgtcctctgccccctcgtcgtgccgaaacaacgatcgccgtgctccccccgagcggcaggcccccggcgaggagaagagcaggaggaggaacgacagcgtcgacaacagcaacctggtcgacctcgtcaacgacatcgtcgccgagtcagtgagctaccgtcacaggcgtgtggccgaggatatcctcaagatggaaaaggcgggcaaggtcacggcgcgcgccttcacgtacgccgagctgtccgaggccacgggcggcttccggccggagtcgctgctgggcgagggcgggttcggccccgtgtacaggggccgcctggggtcgtcgtcgggcccggaggtggccgtcaagcagctggaccgcaacggcatgcagggcacgcgcgagttcctggtggaggctctcatgctcagcctgctcaagcactccaacctggtgacgctgctgggcttctgtaccgacgccgaccaccgcatgctcatctacgagtacatgccgctgggctccctggaggaccacctgctggacctgcccccgggtcgcgcgccgctcgactgggcgacgcgcatgcgtgtcgcgcagggcgccgcgcgcggccttgagtacctgcacgacaccgcgcggccgcccgtgatctaccgcgacttcaaggcctccaacatcctgctcgacaccggcttccgcgcccgcctctccgacttcgggctcgccaaggtcggccccgtcggcgacaagtcccacgtttccacgcgcgtcatgggcacctacggctactgcgccccggagtacgcgctcacgggcaagctcaccaccatgtccgacgtctacagcttcggcgtcgtcttcctcgagatcatcaccggaagccgcgccatcgacaccaccaggccgccagagaagcacaacctcgtcctctgggccgccccacggttcaaggacaagcgacggttcgccgagatggccgacccgctgctcaagggcgcctaccccaccaaaggcctctaccaggcgctcgccatcgcagccatgtgcctccaggaggatgccaccatgcgccccgccatcagcgacgtcgtcaccgcactcgactacctcacggtcgcaggcggaggcgccgctgccaacgaaccaccggctcccaatcccaaccagcagcagcaacaaacagacattatcggccacgccggcgagcaagcgtaacatcatgtctcatcgaaaattgttaattaagcgcagcgtg

SEQ ID NO: 143206 - DNA, 674 bp, Zea Mays
cactgacagattggagcagcagcaaccggcaggcgcggaaggtgcagcggagataagtagtgtgattcaggtttggaccggaccataccaggctgaggcccattaatgatgcaatttgctgggcttctttattttctccgtgcttccatcctcttctccgtcggcggggagaagtgaaatgccgtggagatgggcggcggcggcggcgacgagaaagctcaccgggatctctcagtcgcgagtttcagtagcctttaccggccgtcttctctaccgctcgttcggaagcgactccagtgaaagccgcaagaggtcactgccacggggggtcgtatcgatcggggccatcagccttgctggaggtctcgtgctcagcgccgtcaacgacctcgccatcttcaatggatgcacaacgaaggcaattgagcatgctgctgacaaccctgctgttgtggaagcaattggagtgcctatagtcagaggaccgtggtatgatgcttctcttgaggtgggccatcgacggcggtctgtgtcatgcacattccctgtatctgggccacatgggtcaggatttctccagattaaggcaacccgagatggaggtttgttttcagttttctcctttgctgtgccctgaatagtcacattatacaaaaacgatggtgttgtgtaga

SEQ ID NO: 143207 - DNA, 363 bp, Zea Mays
atgaagaaactcgttcaagacctctcagtaattgaagctgcactcaggacatcatcaaagctggtggtaagttcaaatgggaaacgggttaggaggttacatccattgccacacaaagaattgaaagattcaaagaaaagcactgttttggtcgaaaatctacctccagatttctccatggagagtattcaggaaaaaatcgcaacagtgggcaaattttcacaggctcatgtacttattgaatatgaagtagtggaggctgctgagaaggcttgtgcatcacttgctgttttcacttttttgctgatagtttggacctttcttcttgaactattcatatgctgggagcttgagactgaatag

SEQ ID NO: 143208 - DNA, 2384 bp, Zea Mays
atggcgtcggcgaagctgctctacattgtggtggttgacgaagacgcctcctccttccgatacacgcgctccctcctccacagcaccctccagctgatgggatgcaagcgacgccacgccttcgaggtccggtgtaaggtgttcgatgtcatccggggtgaccaacagggcctcggcgacacggccacctccgcccgggtgcggaggtacgaggtcgccgaagcaaccccgaccacaagttcccgtcagttccagttcgagctatacaagcgccggaccaccgtcctcctccccagggacctcttcctcgacctcgtcctcgacctcgacgccctcgccctctacaagttcgtcgcccccaaccagcgcaccgatctcatgctcgcctgcaggattcgtgaacgaaaggaatctatcacagttctttgcggaactagtggcaagtctactctttctatgttgctgggaagcaggttaggaattacaactgtagtttccacagattcgatacgtcacatgatgcgaagctttgttgaagagaataaaaaccctcttctctcggcatcaacttatcatgcaggtgaatgtcttgacccagtagcagttgctgaagcaaaagctaggagtaaagtaaaaaaacgctcaggcgtatcaagcaactcaaatattgattatgcgaaaagtggggctcttaccgaaaaagttgatgggaaatcaatcgggaagaagcaaatggccatcgaaggttataaagcacagagcgagatggtgattgattttgattgatagtttggaacggttaattactgcatgggaggacagaaaagaatcagttgttgtcgaggttgttcacttagccttaattttgtgatgggtctaatgaggaaacatccttcgataatacctttcatgatctacatatctaatgagagtaagcacacagagaggtttgctgtacgtgcgaagtacatgacacttgacccatcgaaaaatatgttaaatacatcagcaacattagaactatccaggagtacctttgcagtagagctgacaagtacctagttcccaaggtcaacaacactaatgttgatcagagtgtggcttcgatccatgccactgtctttagctgcctccgtaggcgaggtaatggagataagttatatgatcctgaagcaaatactgttgctattataaatgaagagtacaaaaaccaatgtgtggctaattccatgagttccaaggggatgtttaaattgatccaacggcttggatcttgaagaaagctcatggccatcattaatgttgatggttgtgtttctaaggcctggccagttgagtccagtggagatggaaaacgcagttctgacaacagtaataagaatccaatttatggacctctcaatatttgcagagcagagtcagtcaatctgcagtttggcacctttgggataagtgcctgccctactgatacgggctgtacaagtgaagctggaaatgccgatgaatcatatgcaaatgctgctgaaggcagtagcagacatgttctttcttcgtctggttctccgaagaagtcggatggtcattgtaaagagatcaaagagtcgtcagcagcatattgcagcgatgaagtagaggaagaagaagctgatgtacggcctaattcagggagtgatgaggacctaagtgaagaagacaacagggaggtcgatgatgagttgcttcactgcactctatgctccgaatcccatcgtaagcatattcgtggatgtctgcatgacatatggaagggtctgtcgatgaggacggcaacaggtccgatgagaaatatgacgacctggccatgctggacagtttggagaacggctgtttaactgacgatggcgtgttttattctggtttaagcaaaccttcaagcagcaagttctttagtcgcaatcaacgaagccacagcatgccaaagaaacacaagagaagttaggtactggtgttcctgagacggcacactcttctgctgctgcaatcgctgtcggtacaagcatcaagcggcatgccgctaggaagtggaagcgctcgctgagtgactcaatcccgttcgcggccacggagtgctccggaattggtgtcagtatgcaagggatcgccgcccgtgcctgggctccagatgagaggtagctgatgcggtgatgcctgatgagctgcacaagacatactgtcattttttcgagcataaattgcaaaaaggaaatacgaatattatttccgtggcaccatggatgcgaaaaaggtactaggttgttgattttgtaggtgtgatggtggtttgtgcaatgaacccactttttagatttttttgtttgcggaataaaatgagttgatctattatt

SEQ ID NO: 143209 - DNA, 999 bp, Zea Mays
ctaacttggcgggactgcgggacatcgacgcatcccatatctataggcacaatggagcactacgactcctatctatgcagcggcagcatgcatagctacggcggcgttggcggagccacggacgcggcgttggacgccggcggtgacgacatgcagcgcctgctcaacgcgctcatggacgacatggctgccgagtccgactccttctccgacgacatggaggcagcctcctccgagtcctcgtcctccgcctgctcggccaacagccagcaggaggccacccggcggccacagcagcaaccggacggtggccacagcaacggtagcaacaagagctccaagaagcagcatcagcagcaatcgccggctccctacatcggcgtgcgcaagcgtccctggggcaagttcgcggccgagatccgcgactccacgcgcaagggcgcccgcgtctggctgggcaccttcgacagcccggaggccgccgcgatggcctacgaccaggccgccttctccgtgcgcggcgccgccgccgtgctcaactttcccgtggagcgcgtgcaggagtcgctgcgcgcgctggcgctctcttccgcctcctctgccgcgggctcccctgtcctggcgctcaagtgccgccactccatacgcaagcgctccccgaacaagaacaagaacaagaagcaggagcggcagcaacaggtggccgtggccgccgccggaccacagcagccgccgtgccccaccagcgttgtggagctggaggacctgggcgccgattatctggacgagctcctccgggtgtcatccgagttccattggcaataacccatagcgaatggcggtcctgcgaggtgcaagcgaaagcgaggttgatgggttggggatcgagttcagttgtcatcacaaatacagaatgcctgcagattgttgcagagcactcctgctctgctctgtccttgctcgccaattgcgaatcgacgacgagttgcaactcttctt

SEQ ID NO: 143210 - DNA, 635 bp, Zea Mays
cttggccgccgcccccctgcccatctcctcctctctccattgttgcagccaccaaaccctagccgcccccaatcccctcctcccaatgtgccaatccttgccgctcgaatcatcgtcacgtggtgcgagtcttcaatcgttttggtggagggaagaagggaggaaggaaagggggagaatccaaggtggtcgactcccagatcgttcttagggatttgcccaaacttccggtgaaggcacctaatttctgctttgggaatagagggatgtagcagcacggccactacacctttaataaaggaaccaccattttataatgttgttaatcagagttggacaagtctagtgaattgctttgttcttggttgagcgtttattttggggtgggctgagtttcttatcccatttgttttgcttcagttgggtcataattaagttttaccacttttgcatttcagtttctactatgtgaatcatatgtctttatatcttgtatgagcttcatgtttcccctccttgttatgactagttttcaaaggaggtgctgccgcattttgctatatattctttctttattacttctcttgtgttgagtaagtttggtgggtggggtttgtggtattatccattgtgtg

SEQ ID NO: 143211 - DNA, 1418 bp, Zea Mays
caccgccaccgccaggggatatttcctggccgatggctatcttctggaggatgcgacctcacagtgtctctacctccctcccatgcttcccatggccaccgtgcccctggtgttttcctggccgcgccctcttcctcctcggcgcagctctttctctctctgttactcagctccccacgcgcgcctgcatccctgctcggattttgttcgtgccgagctcaatttctggccatgcacgggcgcagccggaaggcgctggtggccgtggccgcgatggttgggggccggccgtcgtgtgcccctgcagcgcaccctcgtcttctccccagcgtccggctgcagcccagctcggagtttcctccgtccatctccagctcgtcgaatcccctctgctcacacatggcgctcagatcttcatcggccatggcgcctcgtcctcgcctcctccggttcctcgctccatggcgctcggctgcttctactccctcccctgttcgcccatggaagccgcgcccttgccgagattctccctgcgtcgcgttccgagctcccgtgctcgcgcgcagccccatgcgtcggctccagctcagccaccggcccacgttttcccccaaccctggcgtgcatcgccatccctcgtcagcatggagatcctcttgtggctgctccacctcgaccaaggacgcagcgtctgcatgaccctcggttcttgcgtgccttggatttgtggcgcccctgcctctgctccatttttcccctgctcgctgcaaacagccgagcagctcggcgcgaagctccctcgtgtacgcacccagccggagtcccttccacccgtgcagctccctgttgcgtcactcgccggtgacggtagggctgaccgttggcagctctccatcctttggttgtgctcgctgctggccctgtggagagctccttgcttcatcctcgccatggacaccatcctgcacgcgcacgccggttgctgtcacttgtgtcagtttgccaaacttgtagctctatatatgtcggcgtttcgagaccggggtcactagaccgacgagtgaaatgtcgccgcgtgccccagtctagattggtcggcacgagacggagcgcgaagggggaaggagacgggcgtgagaggtggaaatcccgcggccttcgtgtttgtcccgcgcccaggttgggtgcgcttgcagtagggggttacaagcgtccacgcgggagggagtgagcggcctcacgcgagcgcctgccccgtcctcttccccgcgcggccaaccctctgtaagagggccctggtccttccttttataggcgtaaggagaggatccagatgtacaaaggggagtgtagcagagtgctaacgtgtctagcggaggagagctagcgccctaagtacatgctatcgtggcagccgg

SEQ ID NO: 143212 - DNA, 444 bp, Zea Mays
atgacgccctccgaccccggcacgcgctcccgcaccaacaccgatggacccgcagcagtccacgccgccgcgcccaagccggactacccaacgcggcgactgtctccctgctcagcgatttcacagcaaccgcaagcgttgcctgtcccttccaccttggcgtcgctgccctcctcgggctcggcatgggcggggagcgagggcggcaccgaggtggattggagccatgaaggccatcgtcacgtgggcctcgtcgacgtcctcgtcatcatgtttaccgcgggtgggaagcagggtcggcacggaggcagcggaggcggattgaagccgcggagggtcggggactgcgggggagaaagaggaggcgtcggcgtgctagcggttgggagcacagccgtgcgggtgggtcgcgggatcggacgactggcgggatcggacggttga

SEQ ID NO: 143213 - DNA, 681 bp, Zea Mays
ttaatacaaataaaattttttactatttttaaaatctgttttatgttttctggaaacgatttgcactggcggttttattacgtcgaccgccagtgaaaatcgattttcactggcggtcttcatgcacacgatatatgtagcatttaaccctggcatatgtcaactcgccaccgggttattaagaccagatcaggttcacgccaatcgagagcacagatataccatcatccagcctcttagcacggagatgaagcagtagaccacggcgagctggaaatgcgacacgatggagctcggccaacagacagcttgcgtgcagggactagcttggctgcgtgcggcatgggcgagcagggagatccgggcgagcaaggagcagcggctggacgccatgagaggacctgcgcacagggatggaactccacggaactccacggtgaccatggctgcagaaagcggtgacggagcggagcagggaacttggcgcggcttggggatggcgaccaagcagaggagagaccaaggacgcgaggatggagatggatgagcggctgccttcggacatgggggcgagcagggcgcggcagaaagctctaaaccggcgtggccatggcagagctggacgcgagctccgagggagccaggacgaggtcgtggccggacgagcgcagcagggaggag

SEQ ID NO: 143214 - DNA, 1889 bp, Zea Mays
ctgattatatctttgagacccggatctgatagtatcaaaatatcaactttttgtttttgcaaatatgggagtttgaatgagaaaaaaaaataaaaaaaatctcacgtacctatctcctacggccgcccttggctggagatttttctttctcccactattcaccgctctctctccctccgtaatcttcatccgtggaagatttttccccacccccgcttacctcctgcttcttatcctagaatgcagcagccgtcttcctcatctttgcaacagccactagcccaagctccatagccgtcgtgcctcctctgttgcttcttctgctatacagagcgcctatctccaattctccatttcctacgtgctgcaggagctcggtctctgctccagcacggttttcttcttccctgctgcgcgcactgctccctagagctcaccgcgcccagccgttcttccctgcgcgcgcgtctgctccctggccgtcaagttcctctgctatgagctcgccctactcccaaagcgcgtctctagttccctgctcgcctagctcggattgagccgcgcgcccagcgctccctctgtccgttgccatagctcggaacttcctggtgctcgctcagtctgctcgtcgaatctcctccgtgctcccatggcgccccggcgtttctcccagccgagcacttcttcttcccacaaccgcgcccttggtccccgccatgaaattccctgcatgctcctcaagttcccagcgccggccgtgcctggccagatctccctccagctcggccccgccctctgcgtgtgctcctccctgctcagttctcctgcgtgccgcgcgcccttcgttcctgtctcacgcgcgctagccagcccagagcttccctgcgcgcgcctggatcttctccctcccaggcgttcggctgttcgaaccgcgtccagccgaacggctcctcccacgcgtgctcctccatcctccttgtgtccctggttctttcccctgcgctcccaaccgtcgaagctccctacactcgcccctgacctcccatggctgtatgccccatctcagctttgccctctgttcggcgtgtttgcccctgtagagcccgcccagcctccattttttcccagcctggatctccctgctcgccttgctcctccggcgccgtggttttctgctcgcttggccggccatggtggctatgcatgccttctggccgtggatggttctgcccaggccaccgtcgcgcccagagaaatggtgcgcgtccctgcgcctggttttcgtttccgtcgcgccgatctgtgctccgtcctggccatcttctctgcctccgatctgtggcgccgtcgcaagctcgttagccactattgtcttgtccacgccagcacgcgttcatggtcgcgtcggccaaattcaccaacgttctattaccaattcgactatcatcgctgttgcgtgcgctcgcgctctctatcccctggtcgacctcgtcgtcaggcttcgccttgcaggtcgtcgttcttcgctcagcaaggtttcattctaagcgccgcccttcaagttcgcgtccttggcggactcgcacctccgtgtcgtgtccgctcgtccatgctgtcgacccgtgaggacacagggtctcgctagagtcgcgctgccgttgacgcaacgcagggtctcgctctttttcgtgctcgaccttacaagtctccaactcgtcgacatcctttgcatcatggaaaaatcctgagagtttgaataaagcaacaaatcccatgtgatgcaacatttgccaagagctcgaccggatgtctaaactgagaaccgtcgtcgccctcacggttatcaaatcgattcgatcatggtgagccaatttattattttgtgatta

SEQ ID NO: 143215 - DNA, 275 bp, Zea Mays
gtggcggctgagctcctcgccgccattgaaattcgggcgctagtgccggtttggggccctctggtggaaatgggatgatagcccagcgcttgcgacagggattacgtccggaaacaccctggtgcgccggcggaactccgccaattcctggtcggagttggtcatcggaggtcgcgaccgccgtcctcgctgctgaccacaacctcgccgtgccggtgcgcaaggtcacgaggatctgaagaatcatcctggtacctagaatctcaagtgccagg

SEQ ID NO: 143216 - DNA, 584 bp, Zea Mays
tatttggacttcccattaacgctacgaaatataaccaaggaacaggcgcaaccaatttatcgaacaaatttgcaaatcagcttcctggatggaaggcagacttgatgacaagggctgggagaacagttcaagtgcggtttgtgcttactgggatgctcatctacttagcaatggcaattgatctcccaacttatatcacaaaagcaatcgataaaatccgaagaggctttctttggagaggtcgcaaagagataaatggggggcattgccttgtttcttggagcaaagtttgtcggcctcttgatttgggtagtcttggtatttcaagcattaaggagctgagttgggcgttgcggatgcgttggttatggctgcaaaaaacggagcctaatcgaccttggtcatccttgactatccaagttccggacaaggtccaggccgtcttcagtatggcgatgcaaacggaagttgggaatggtgctaatactcttttttggttggatcgatggattcaaggacagagggtggcagatagtgtgcccacttcttcaagttgtccgaaaagaaaaatcaatacaaggaca

SEQ ID NO: 143217 - DNA, 114 bp, Zea Mays
atgcgcggaaaagaggttaattacgcctattttgatttgattgtgaaccgtccggccatatctaataccacaaatagtgatcaacacttatctttgaccaatctgaaacaatcc

SEQ ID NO: 143218 - DNA, 1593 bp, Zea Mays
tccatttcctgcggacctcgcatcgccgcggtcagtcgggtcaaacgtgggcgggaggcaacaggcacgcgcgcacacagcaggccaggccaggaccaggaagccgcgtggagatcccgtcgatgactcgattccactggcacaccagtccccggtcgagccgccagggtaggaaggcgggcagacagaacccggcgtcgcgtcgtccactcttccccgaccccgcggccaagtccctatttatgtacgccggtccagttcgtgcaatccacgcagaagcaaaagtctttcccttctatccttcctcccccctgatccatcccattcggccaccagcgacagcgatgggctcacgctacgaggtggaggtcaccgtgggctccgcccgggacctcaagaacgtcaactggcgcaacggcgaactcaagccgtacgccgtcgtctggatcgactccggtgccaagtgctccacccgcgtcgacctcgacaacggcgagaacccgacgtgggacgagaagctcctcgtcccgctcccgcccacctcccgcctcgacgacgccgtcctctacatcgacgtcgtccacgccaacgccgccgagggcgtcaagcctctcgtcggctccgcacgccttccgctccgcgacgtcctcgacgacgccgggatagggggcaaggcctcgcgcaatctccgcctcaagcgcccctcgggccgcccccacggccacctcgacgtccgcgtagccgtcaaggagccgtccaggtactatgaccccaatccctacccggcccccgcgggctacgccaacgcgggcactcgtgacccctacggctcatccgcggctgctggcggctactacggctccggaggaggctatggcagcggcggcggttacggcggcagtggcagctacggcgccgcgcagccctacaccgcggcgcctcctgccgggtacccttccacctatggctccgcgccgcctcctcagccgggatacggcgctcctcctgtcgccgctgcttacggcgctcctcctgtcgccgctgcttacggcgctcctcccgtcgatgctgctaccgctgcgtacggaaccagcgccgttggtgccgacggcaagaagaaaaacaagatggggatgggaacggggctggcagtcggcgcggcggccggcgtgctcggaggactggcgctggccggtggggcgagctacctggaggacaagttcgaggagcgcgtgtcggagagggtggaggagaacctggagagggaagattcgtacgggggcggctacgacaactatggcggcgacgacgactactgatcggatctgatcctcagctcccatcatttgcctggctgctgcgcttgtcttctaccttcaccttcgtttcttccgggtgtcctaaataaatatttacttgatgaaccgcaaattagataatgttctacgttgtggtttattgcggcggtattcatgctgagattgtggtttgagagatcctcgtttgcgagttgaaaaaatgccgaatgaattaatcccaccgctaggtgtgtattgaatcggatcatacatagagctaagtttcgatggattc

SEQ ID NO: 143219 - DNA, 886 bp, Zea Mays
tatttatttaaatcatgaaatacgttttactaatttatccaaaataggattttgaagtattacaatactctagtattcgacctaatccatatatattgagatggattggagtgtaattaatttaatttacaccctaattcatcttaatacacgtaaattcaggtgaatactaaaatatccaaccaaagcattatccaccccggagctcctcgagggcgattggagtgtaaattaatttaatttacaccctaatccaccttaatacacgtagatagattgaggtgaatgagtttaccacacaggagctcctcgagggcctacagaatttaccatctgtcaagggatttacattacatccatgtctgaaaacaagtcgctaacaacaagaagcatgagctaggtgatgagctcgacgccgaagtcccagagcctcttggccaactccatgtccttggcgttcgcgcttggctcgtacaggttacagtcgcagaagtacttcccggacacgcccttcacatgcgggtggagtgccaaatagcatgtagttgccgcaccctgttcaagttaaaagcaaaccacattcagagcccaaattgaatactagactggcagactccatctaagctagtactagctgcaccgtgtagccaagagcatatgattacatgatacgggcagcacagcacacataaaactttgcctattgctggtgaaatctagatttgctttgcctaccacaaagccagtcaacctggcacagatcagatcacaaactttcgtaagcactagtggagtggggttgtagctctacagcgggctgttaagttgcacagcacaggcacatcgatttgctttgcctaccaaaaagccaatcaacctagcacag

SEQ ID NO: 143220 - DNA, 201 bp, Zea Mays
gcttatatttctaatttttgttttttattttaaatttaaaattgaagtccaatttagagatgagttaaattttctatttcaaccataaattgcaataaacaaaaactcaacatgaatgcaaagcatttttattaattaatttatccatttaagcaaatgaaaattagtaggaatatttcatgtaagatgttttacaataat

SEQ ID NO: 143221 - DNA, 1263 bp, Zea Mays
atggcgccccagcgccgtgatcgttgtcggtcccctgcacctcaccccgcacctcacccctattccctacgccgcgttcccggtaggatccacaatcctatcagaattgttcctgctcctccgctgcacattctgaaaagaactaccatttctaagccccataaggctgcagagctattgtcagcagagagtttatgggagcatgggctgtgcgcaagcaattttgaagcgtcatggatctcaaagacctggaagaaaggagtaggcaatttaagtgttgaagatttcttggaccggtcgcaaaattttgcaaggtcagtgggaaaggtgcagatgcagaagatttgcaaatgccttagagaatgtgctttgaatttgttagatttcatgagagggaaaatggacacaacgaagctgaagacccttttatttgggcggcttagcccagacgaattagtcagcaaacctcgtctgaagcatgtcaagagaaaaaggaattgggaacggaccccgcaagggggaagatgtgtgctccagaagagtgcaaagcatgctggtagtgctactggcagtgattcattacccactcctaacaaggtcttgcatcatgcactccattatcgagttgctggccatcagtctagcattcatcagtttgtgcccattattcgatggccacgaatcattccttctggttttggctatggattatcgcttgggattccatcagttgctcctcaccttggcaagggaatactgggcaagccaccaatcattccttctggttttggctacggattgtcgcttgagattccatcagttgctcctcaccttggtaacggaatactgggcaagccaccaagtaatataacacccttagatcaacggagctcaactcaactagtgcacgtacggaatccacaccagcatacatgtcagcaatcatgtggcggagctatggagccgagcagctccggcgtggcttaatgataaggtccggtgatgagcagctctagtagcggttaggagtttgaggttagatttagggtgtgtttggtttgacttttggctttggcttttgccccctaaaagttaaaagccaaccaaagggctggatacaggaagcagcttttttctaaaagccgactttctcgtagtgtaaatctgaaagcacccctgaacctgcttttagtggcttttcggatggaactatgaaaacatatatcgaagaatttttaacgacttttagtggttttcactaaa

SEQ ID NO: 143222 - DNA, 90 bp, Zea Mays
tttcttccacaagctaaattcaaatccaaattagttctatgttcaaactcacattcaagtgcacgatcaaaatttctgcatgagatgcat

SEQ ID NO: 143223 - DNA, 1183 bp, Zea Mays
ggtgttccttcgccatggctactctggcggccatctcctccgtgtcttatgacacagacaccgattccgactcctcgcggttactctctctctctaatttccccgtccaaccccaagttcaatctactccatgggagacgatcgatttggttcccttctctctctctttcggggtgctcgccagaatggggatcgcatttctgctagcgcgcgctgttgctgttgtggggaatgattttgctctttccttgttgcaggtgcagcgaggcaagcacatgggattctcaagtgttaagcaggcatgctgaatgtctggagctggaggagttgactgcaatatcagtcaatcccagtctgcttccagctttgaatcagttgcttctcgaggcgtatgccattctacgtcccaagccgcttgactatgaccagcgcaacaccttggttgatgtcttcaggaagatggtgaatcaaagatttggtagcaacagtgggtctccggttgtggaaccatttggatcattcacgatggatttatttactcctcacagtgacctggacctctctatcaattttagtgctaatactgatgagcaatatactcgcaagcaaatgatctctattatcaagaaattttccaaggttctattttcttatcagaggagtggaattttctgtggggttttacctattgtaagtgctagggtgcctatactgaaggttattgatcgtggcacaggggtcgaatgtgatatttcggttgaaaacaaagatggcatgacaaggtcaatgatcattaaatttgtttcctcacttgatgaaaggtttcagatactaagttacttggttaagttctgggctaaggtacatgatctgaataccccaagacaactaactatgagctccatgtcaattatttcactagttgctttccatttgcagtgcagacccggcatcctccaatattgcctgcgttctctgacttgttaaaagatgggttagattgcgaaagcattgagaggaatgctttacggtttagggattttgggagtagaaataaagaatctgtcgctgaactgtttgtatcattgataagtaaagtgagtaactataaggttcatcttctacttatgtttgcggttgaggttacttgtcataactgaatatatataaacatgttttataa

SEQ ID NO: 143224 - DNA, 1149 bp, Zea Mays
ccttcgccatggctactctggcggccatctcctccgtgtcttatgacacagacaccgattccgactcctcgcggtgcagcgaggcaagcacatgggattctcaagtgttaagcaggcatgctgaatgtctggagctggaggagttgactgcaatatcagtcaatcccagtctgcttccagctttgaatcagttgcttctcgaggcgtatgccattctacgtcccaagccgcttgactatgaccagcgcaacaccttggttgatgtcttcaggaagatggtgaatcaaagatttgcctagatgtaaaccaggattcctacagctcatcgtaaacaggagagtaggcctcatatgcagcagcagcaacagcaaccagaacgctattctgtaacagctggtggacttgcacgtgggacctattctccagtttgtgaggggctgcaaagatcccggtttgcatttggtctgcaaataattttttccattgatttgacctttatctaacacaaatttcaggtagcaacagtgggtctccggttgtggaaccatttggatcattcacgatggatttatttactcctcacagtgacctggacctctctatcaattttagtgctaatactgatgagcaatatactcgcaagcaaatgatctctattatcaagaaattttccaaggttctattttcttatcagaggagtggaattttctgtggggttttacctattgtaagtgctagggtgcctatactgaaggttattgatcgtggcacaggggtcgaatgtgatatttcggttgaaaacaaagatggcatgacaaggtcaatgatcattaaatttgtttcctcacttgatgaaaggtttcagatactaagttacttggttaagttctgggctaaggtacatgatctgaataccccaagacaactaactatgagctccatgtcaattatttcactagttgctttccatttgcagtgcagacccggcatcctccaatattgcctgcgttctctgacttgttaaaaggttactctatgatgcttgttctttgtttttccttttactggcattattctgctaagttttcaactgaaaccacggataactttctatattgtcattcttgcagatgggttagattgcgaaag

SEQ ID NO: 143225 - DNA, 220 bp, Zea Mays
ctccaatttagatgcaacaaacaaaatattcccagcatgatgcaataatattttattattcattttattattttgaattcaaatttgaatctaggttcaggattcacattcatatgcacaattataacaacacttccgcatgcaaaatataattttatgttatttatttcccatctcatttatttatacttatgcttttaaatgtgcacacaaaatatgt

SEQ ID NO: 143226 - DNA, 396 bp, Zea Mays
atggttgcaaagatccaacgtgttgctgctgtacctaggcgccatgcatcaagcataggggaaactcggccatgggaaagtgctggcatgggaaaggcagacagcagaggggggctagggttggagagggaaggagatgggagaggggctatccatggcaacaaaagagggggctggcgtccacaccatgggaaggagcaaggagggcgctggacagagggcaggggcgagcttcagggaggggcgtcggccaccaggaaacaggaagcaggggcgcacgctaggatggatgtcgagcagatcttggaagccatggaaggtgaggccgtcggccatggggagggaggagggagggacgaccatggggagctgcagggaaggagctcggctgggtga

SEQ ID NO: 143227 - DNA, 224 bp, Zea Mays
ttgaaagtagcataacaagggaagcatatagtttatacaggatataaaagaaagataattgccatagtataatcaaaatgcaacggtagaaaaaaaacattcatgaccagacaaaagatagacatctcagcccaccaaactaaacagttcaactaccatgaaagattagaatgtaataattccctagacttgacccttcctgtttaacatcattaaaaaaacag

SEQ ID NO: 143228 - DNA, 273 bp, Zea Mays
atggagctcgaagccgagctcgaggacgaggctgcacgcagacagcgtggccagcgcgagatgggaggcgaccatggcacgcaggagcgaggaaaacttgggcgtgagcagaggcagcatcacggtagtggtgaacggctggggaaagaaagagcagcgggcgcaggagaaacagaagccaagcgcaagagagagagaaaagcagttgggcaccatgggattaaaggactccacatcggtggatacggagaggaagccaacacctgtgattga

SEQ ID NO: 143229 - DNA, 122 bp, Zea Mays
ttttttatagatttttctgttttcttttttttatcgaaaatcacagatatttttggatcgagatttttagcgacaactaaagggtcgacgcgctatacggctacacatctcattctccgaag

SEQ ID NO: 143230 - DNA, 182 bp, Zea Mays
ttttggctaagctttctcaacctttcttgttgcttattaaatatacttcaatttgtataattggctcaagtcataattttaaatttttcatacccttttccttattttcttgaatttttctcatagggctcacttagggtttttattagggttgcacattcttacctttttaaaagactcaa

SEQ ID NO: 143231 - DNA, 370 bp, Zea Mays
atggatgccatcatttaagaaatttgccgcttgatgtgtggatccgccgtggctgccgtcaggcatagacaccaagaaccggacctcggtggtggatcatcggggtcgcggaggtctactggatggggtctagaagtatccgggcaagtcgtctctgggaaccctgcttattgctcgccgatatgttttcaggcgtcgcgatgcagctgtgtgccgtggctgggtctcattgccgtctcaatcgagggtaagtcttctcctctggttcgcatgcgagtccgcttcgtttcaatgtctgctaggggggaaatcgacgctcaggggcgggatgaatcgctcaccaccgcgcgctaccgtggagagctcgggt

SEQ ID NO: 143232 - DNA, 1938 bp, Zea Mays
ctctagaagcacttgacgcctagactcgacgccaagggtttgggccggccgagacagcttccaatggcgaaggtttcggaaagggatgcttagggtttcgtgaccaccgacggcgctcttctcatcgacctacggcgacatttgcgaccgcatcagcaccgaatagcgccgccgcgaaggtgtatacaggcatacagtggatgatggcggcatggggaggcgtctcagatctagcccgtgcagaagccggggatcatgggagagccagcgtggatcggcccacggtgacaccgggaacgctcgagagggtgcggataccgcaatctcatggactgcatcagaggttctgccagcagtgcagcaggttcctggaccacttgatcatctccatggtttgttggcattggaagaacttctgtgcaggggctgttatcaagaaggtaactgttttactcatatacatccagttcatccaaagtgcagtctttaaacctgttattagtgttgataatgttgattctattctgtcgcacattgttgtgaacagcttggaaataccttgcgagatgaaccactcaattgacaagcgatgcaggataaataatttgtccacaagcatgattgcattatcccagctggcttcagttttcaagcaggacaacagtgttgtgattgccaatcttgatgctgacaagcacactgacttggctgaaaaatatggtgtttctggtttccctacattgaagttcttccctaagggaaacaaagccggtgaagattatgatggtggccgggacttggatgactttgtcaagttcattaatgagaagtgtggcaccagtcgggatccaaagggccacctgacttcagaggctgggcttgtgccaagcttgaatcctcttgtgaaggagtttctcaatgctgctgatgacaagcggaaggaagtcctctctaaaatagaagaggatgttgctaagctcagcggttttgcagccaagcatggaaagatatatgtgacagctgcaaagaagatcatggacaagggctctgactacactaagaaggagactgagaggcttcaccgcatgctggagaagaaattcttgtgtatagattccaagttcacacagcaggagttgccagcttgcaagccgattcttactccaaaatgggtaggcttacgagttgtgaagattatgatgctactggttacgcctaatctttatggcaatttggtggctaacacagctgcaggtattgttggagggacgggcatcatgcctggagatagggattgcagctaattctttattatttgttgttttcccctctgaaaaaaattgttctggcatagcgtttcatttctgtaatttattacaaaaaataatattttgggcatgacttatctccctttgttcctacattgttacatatttgtaaagactttgtggcatatggaacttcttggagctttttgctatggtcttcatcaagttttctaccaatgacttatctcccgccaccccgacccgctcatcaaggccaacgacaccatcaagatcgatctggagaccaacaagatcatagacttcatcaagtttgacatcggcaacgtggtcatggtgactggcgggaggaacatcggacgtgtaggagtcatcaagaacaggaagaagcacaagggcagctgagaccatccacgtgctgcttggagctttttgctatgtctagttttctcctatttgttgtacaggaaaacatagaatagaattcaaatttggtggtcgcaaaagtgtggagactttaattcatctaaagttaggcttaacattagtgcaaacagttgtattttagtttagatttagagtacagttatgtatgcgttgtttgacaatgcttatttatgatatattgaatggtacttatttatattatatt

SEQ ID NO: 143233 - DNA, 603 bp, Zea Mays
ctctagaagcacttgacgcctagactcgacgccaagggtttgggccggccgagacagcttccaatggcgaaggtttcggaaagggatgcttagggtttcgtgaccaccgacggcgctcttctcatcgacctacggcgacatttgcgaccgcatcagcaccgaatagcgccgccgcgaaggtgtatacaggcatacagtggatgatggcggcatggggaggcgtctcagatctagcccgtgcagaagccggggatcatgggagagccagcgtggatcggcccacggtgacaccgggaacgctcgagagggtgcggataccgcaatctcatggactgcatcagaggttctgccagcagtgcagcaggttcctggaccacttgatcatctccatggtttgttggcattggaagaacttctgtgcaggggctgttatcaagaaggttaatttcgacagaacaatctcacacaagtgtatatcaaatttcatggtcaaatgtttacttccaaattcattggataaacttggttaattgtatgaatattcatatacttttttgggctatgtcaacgaattataaggacctgcgccgacctatttccaaa

SEQ ID NO: 143234 - DNA, 300 bp, Zea Mays
atggggcggcctctgcagtgtgtgtcattgcagtcaatagggccatcagcctccgccaggtctgacagactggaggagtggccgggtgctgcgctacgggtacggctgagcggacggaaaggtctctttgcaaaattgtcagttgacgagacactattgcagccgtacagtgtgtatgtggtccggaggaaggacaacgactactactacgctgccgccgacaaggacaacgacacaacttgcaatggcacacaggccgagactttcaggcccaagatccaccggttcctctccaactga

SEQ ID NO: 143235 - DNA, 947 bp, Zea Mays
gccccagctgattctttcgtggagcatcagtttacttggccgtgcagcttatctcgctgctcccagtacacttgcttcacccatgcattcaccgtcatccatggatccacgcagcatctctccagccgctcggactccaccacgcccggtcgtgcgctcgccctgcttcctgttcccacgctcgtccttggttccatggccggtgctccctcaagcttagtttccatggccgttcgtcctggccgcggttccctggcatccgcgcgcgcccatctctctgctaccgccctcccatggacgcgcgcagctccccatctcccacgcgcgcccctgcttccctgttctctgttcccggtgccggatttcctgcgggctccctctcccacggccgtctccttcccctagcaattggctgccgctgcatcacgcccagaaagcgctcgaccgccgttcccagcgtcggcttctccagtctgccctggctcaacgcttggacaccgggtccactgtgctcgtccgtgccccggactccatggcgttctcgcctccatgctagctccagccgagtcttttttcccatcgagctcgccctcaactctacagcgccgtctagcccgtcgtttttctcgtccagtgctcgcgcggttttacccgaaccgcgctgccgtctcctagttgccgtgctgccagcactcacccagcttccttgttggccgcgcctctatactctactcctaccggatgtcgcctccgtcagcctgtcatcattcaggcgaatatcaaatcaaattgagatatggtgagctgattcactatttttactattagttttatattagttttatgatcgtgaaataagacgcttgatatgtgtataaagtttaagttagaaatacatgtaacatcctaaatgtcgattttatgttacgtcgggagatctatcctaa

SEQ ID NO: 143236 - DNA, 838 bp, Zea Mays
actgcaagcagtttcgcgcgcacgacaacacaacggaggagaactgaacagggagcttcgcggcagcacgcgcaggaacaacggaccacacgcgacgcagccatggaggaacagggagcagggacgctggtgctggagacgcggcatcgagtggcggagtttgtgaacaatccagggaggccgacatggttgaagacaggaggcgagctgggcgagctcgaccaccagagagcaagacgtgacggcggatccgcgcgtgcggaaagctgaagaccaaatcgagctagggccgagcaccggtcatgggaagcggacggtcgggcacaggaagctgggagaccgctgcactggaactgggcgccgtaggaatagcaggagaggagcgcgcggcatgggcgcgagctcggaacttgacgcagcagccatggagatgggcgctgatcgagcaggggaaacgggggggtggggggcgacgactggagaaatgaagctccacggcgagcagaggcgcggccgaacaggaagctccggcgagctgcagatggccggaggcgcgagcacggagagcttgggcgcgagctgcaatggcgagcagggtgccggacgagcacagcaggaagctcggaccaggggcgcgcgagctcagagagcagctgctaggcgcgcgcccagggggctggggagggagacccgcgagccggaagccgagcagagggaggaagatgagaggggcgcgcggcgagcagggattcacgagctggaagaagaagctgggcgcagtgcagaagactgcgcgcgtgataaaacggaacagggggcggcgggatttttcgcttga

SEQ ID NO: 143237 - DNA, 182 bp, Zea Mays
ccgcctgccatggagctcaccgagccctccggagccgaggctcctgctcccagcgtcgcgatccccagctcctctgctcactcggctgctcgcgctgtcgccttgctgctcgcccgtccgcgcgacacttcgtctatggccgctgtccgccgtcgagttcctgtacgcgcgcctctggttcg

SEQ ID NO: 143238 - DNA, 99 bp, Zea Mays
ctcaagcagtgtacctatttttgatatcagctccacgtcaaaacgaatggcatcacaacctcctcgatccaacactagaatttgggatcaggaggaggc

SEQ ID NO: 143239 - DNA, 115 bp, Zea Mays
ggcaactaaatccactttgctataagcctcttgaatttgcgacttttaatccacttactatttttacactaaagaaaaaagataattttgtgctgttagcacgcgcgaatcgcac

SEQ ID NO: 143240 - DNA, 267 bp, Zea Mays
atgctcaccgagtgttgttagttgtacctcagcactcgtgcttgccactggctcgcgttaacgctcgcgcgcctgctcgttgtcactgtgtcgcactcgctcttggtccatcgggcttcacgcgtgctcgcgtttgtcgtcgagctgttgaacccgtcctcccttgctcgtgacttcgtcgtcgccagagccctcattggattcgtgtccttgccagctcgctctagatacaatctcgtcgtcattccatacgtcatcaagaaatcc

SEQ ID NO: 143241 - DNA, 267 bp, Zea Mays
gtggtggccgagtgttgtcggttgtacctcagcactcgtgcttgccgctggctcgcgttaacgcttgcacgcctgctcgttgtcactgcgtcacactcgctcttcgtccatcgggcttcacgcgtgctcgcgtttgtcgtcgagctgttgaatccatcctcccttgcttgtgacttcgtcgtcgccaaagccctcactagattcgtgtcctcgtcagctcgctctagacacaatctcgtcgtcgttccgtacgtcatcaagaaatcc

SEQ ID NO: 143242 - DNA, 123 bp, Zea Mays
atggctggcaagggtgatgggcccaaggaacccaaggaggagacggtgacgctcaagatccaactgcactgcgacggctgcatggactgcatcaagcgccgcatctgcaagatcaaagacatc

SEQ ID NO: 143243 - DNA, 468 bp, Zea Mays
atgagcaggaccgccagagatgcttgggacagaagcagggtcgagcagggagggatccacgaccttgggcaccgagagccagtggcattcgacgtcgagtaccgaggaggggcgcaagcaccatggccaagaagatggggcgaccgcccggtgaggagcctagctccagggagccgtgcaagggggagttggagaccgagttgggggtggacgcgagctctagtagggagatgcgtgggaggaaatcctgggcgccatgagggagccacaggagaggagcttggctgggaaagggatgagggaggggatccgagctggggcagaggtgaccagcgagctcgccatgggagggactccgagctttggtcggcgctggggacgatgagcagtgggcgcgaccagggagatgggcgccgacagaggagcgcaactgcatgcagggagaagcgactggcagtgggaacttga

SEQ ID NO: 143244 - DNA, 624 bp, Zea Mays
ggcgctgactctggtgcggtgcgcgatgagcctttcccttgctgctgttgcttccgatggacggtgctgcagctgcaggaggaagtagggaaccggcggccaacggttccaaacctgaggagcagcagtttgatcccagccgaatgatcgggatagttaaaaggaaggcctcaattaaagacttggccacggcataccatgctgaatgtatagcatcctgtaaagaactcctgcagcttcagagaaagtgggaggaggagcagcaagttgaagccaaaatgcctgaagaaccaagatcgttggtgttcaagacctcgaagcataggaagaagtagatttaggagactagtttttacttcctttcaaaagaacactttttggctctgtcaactgctgtgattgttagcttgaaagtaaactaaacgccgggaaacattgccttaaggtgggtttatactgtaaaacttcatttgccttttaccatttgctcttttaattaatattttcatatttttttttacaaaaaaacatttttttcatctttaaaggcttataaaataaatgctaacatgttggatccttttacagttttatccaacaatgaaaacaattacatatctcact

SEQ ID NO: 143245 - DNA, 823 bp, Zea Mays
atgtcttccgctccgctgcggcgctgactctggtgcggtgcgcgatgagcctttcccttgctgctggtaatccctaaacaacaaacactgagtgaacacaaccacccaatctgcatcgaagcaaagcttttctactatccaaatcgactcccttttctggttgggttgaatttatcgggtggtgtctctagttggatggatttattttaagccctaactcgggcagtgtgtctactctctacgcagttgcttccgatggacggtgctgcagctgcaggaggaagtagggaaccggcggccaacggttccaaacctgaggagcagcagtttgatcccagccgaatgatcgggatagttaaaaggaaggcctcaattaaagacttggccacggcataccatgctgaatgtatagcatcctgtaaagaactcctgcagcttcagagaaagtgggaggaggagcagcaagttgaagccaaaatgcctgaagaaccaagatcgttggtgttcaagacctcgaagcataggaagaagtagatttaggagactagtttttacttcctttcaaaagaacactttttggctctgtcaactgctgtgattgttagcttgaaagtaaactaaacgccgggaaacattgccttaaggtgggtttatactgtaaaacttcatttgccttttaccatttgctcttttaattaatattttcatatttttttttacaaaaaaacatttttttcatctttaaaggcttataaaataaatgctaacatgttggatccttttacagttttatccaacaatgaaaacaattacatatctcact

SEQ ID NO: 143246 - DNA, 736 bp, Zea Mays
atgtcttccgctccgctgcggcgctgactctggtgcggtgcgcgatgagcctttcccttgctgctggtaatccctaaacaacaaacactgagtgaacacaaccacccaatctgcatcgaagcaaagcttttctactatccaaatcgactcccttttctgttgcttccgatggacggtgctgcagctgcaggaggaagtagggaaccggcggccaacggttccaaacctgaggagcagcagtttgatcccagccgaatgatcgggatagttaaaaggaaggcctcaattaaagacttggccacggcataccatgctgaatgtatagcatcctgtaaagaactcctgcagcttcagagaaagtgggaggaggagcagcaagttgaagccaaaatgcctgaagaaccaagatcgttggtgttcaagacctcgaagcataggaagaagtagatttaggagactagtttttacttcctttcaaaagaacactttttggctctgtcaactgctgtgattgttagcttgaaagtaaactaaacgccgggaaacattgccttaaggtgggtttatactgtaaaacttcatttgccttttaccatttgctcttttaattaatattttcatatttttttttacaaaaaaacatttttttcatctttaaaggcttataaaataaatgctaacatgttggatccttttacagttttatccaacaatgaaaacaattacatatctcact

SEQ ID NO: 143247 - DNA, 748 bp, Zea Mays
atgtcttccgctccgctgcggcgctgactctggtgcggtgcgcgatgagcctttcccttgctgctggtaatccctaaacaacaaacactgagtgaacacaaccacccaatctgcatcgaagcaaagcttttctactatccaaatcgactcccttttctgttgcttccgatggacggtgctgcagctgcaggaggaagtagggaaccggcggccaacggttccaaacctgaggagcagcagtttgatcccagccgaatgatcgggatagttaaaaggaaggcctcaattaaagacttggccacggcataccatgctgaatgtatagcatcctgtaaagaactcctgcagcttcagagaaagtgggaggagtattgatcacaggagcagcaagttgaagccaaaatgcctgaagaaccaagatcgttggtgttcaagacctcgaagcataggaagaagtagatttaggagactagtttttacttcctttcaaaagaacactttttggctctgtcaactgctgtgattgttagcttgaaagtaaactaaacgccgggaaacattgccttaaggtgggtttatactgtaaaacttcatttgccttttaccatttgctcttttaattaatattttcatatttttttttacaaaaaaacatttttttcatctttaaaggcttataaaataaatgctaacatgttggatccttttacagttttatccaacaatgaaaacaattacatatctcact

SEQ ID NO: 143248 - DNA, 392 bp, Zea Mays
ggcgctgactctggtgcggtgcgcgatgagcctttcccttgctgctgttgcttccgatggacggtgctgcagctgcaggaggaagtagggaaccggcggccaacggttccaaacctgaggagcagcagtttgatcccagccgaatgatcgggatagttaaaaggaaggcctcaattaaagacttggccacggcataccatgctgaatgtatagcatcctgtaaagaactcctgcagcttcagagaaagtgggaggaggtccgtagccttcatcttccaaaatctaacatttagagaagtattttcctctgaattgcttatagcactgtaattcaagctttgtttcttgtgtatttgcaagacaaatagcggctcttaatccattttgcatca

SEQ ID NO: 143249 - DNA, 285 bp, Zea Mays
cagtttcacttgcaagcaagatggttgaatctgctaagtttcaggctgtccagacgcgcttttatgaggggaaagaaccgattcagttctttgtgattatcaatcagtgcgggagtgatgtcgctgtggtgcttttgaacctattattagaatgcatcaatcaaactcgccttcagtctagtggcgttgtactcccatttcaacaaactgtaaatgatctagttgtgaatgatattataattgtgatgcttttgtgaatatataattgtggtgcttttgtgttaa

SEQ ID NO: 143250 - DNA, 516 bp, Zea Mays
atggattctgttgcgatgcggaaagtcagagacggcgcggtgctgcgagaggcggtggagctcggcttggcggtcggcggccatgcgcatgacgagctcgaggcgcgcttggcggccgcggatcctgggggcgtccctgcgagcgtgttcatggacgggggacggtgggggtccggtgtcgtcgtcacggtcgcgggcagccatgtggacccactccctgacgaggcgcacacggtcgcgctcgatctcgcggagccaggaggacgaggaagaggaggcgcgcgagatctggacggcgggcgcgcggcggaggaggtccggggagccctcgcgactggatccagcgtcccagtcgctgtcgctgcggggctcggagggctcacggcggcggcgtggggtcatatcgatgccggaaacagggggagctggagaagggactgggacgtcgcccatcgccaccggccgcgacgaggcatggggcggcgggaagctgctgctgactggattgggctatag

SEQ ID NO: 143251 - DNA, 464 bp, Zea Mays
taaagctgctagccgcctgtctcgctgttcctcatgcccagcaagccgtcgtgctcagcgtactttctccatgtggttctctcgcttcatcggctttccacgtgttagagcacgtatggtttggatatatacataaatgcaggagaaagtccaagaaaaatgggcatttaatgtgttcgtgtaaaatgaagttgcttagcaagttttggatgattagatgagttctaaggataagtagctccctggtagttatggcttgtggtgatagcttgtaattgtaattttgtaatgcttcgtaataccttccttgctagtagcatatacacaggcattcataatcatggcatttcatgtagagtaccaagaagaagtgatttgtgaagaaggagcatgttccagttctactgatccagtggtggattccatctaactgcttatcgtaatagatctcagatttcctcctg

SEQ ID NO: 143252 - DNA, 115 bp, Zea Mays
ttatttcttttctaatttcgaaatttctaatatttaatttcaaattcgtgagtcattatcaaagtttaaatgcacacacaaaatataccaacatgtatgcataagttcattttgg

SEQ ID NO: 143253 - DNA, 1935 bp, Zea Mays
attattaagtttgattgaccattctattcccgtgcaggtccagccgtccagcatgtatttatttacttatcaactcttttgaaaccgcagagtttcatttatgacatcataagtacagtacagtagatacacacactgagctgtgagctcactctttttcgccgttccccttctcttcccatttcgcatcgcagagctgccagttcagacaggccgttccctttctttccaattgagatactggtgactaactcagaaggaaaggaaggagcaggcaagcagagagagagagcaacctgtgcagccacggcggcgaaggaggatgaagaggggaaagtggtgccgtcggggaggacaacccagccggcctcccttgcgagcgcggcgatcacctcgttgatgtcggcgcgcgcccgcagcctgtagttgccgtgctggcgcaggcccgccaggatccgccccgtgatcgcgcgccgctgccgctcccgcatcttggtccgctccttctcctcgcgcgcgcgccgccggtttgaggtccctcccgccctgccgccgggcgtccacacggccgggctccgggggtccatatagtacccgtcctcctcctcctcgtcatcctcctcctttacccatatctcctcgtcgtcgtcatcggccagccccgcctgctgcatcccaccggtctgccgggatctcgatctcgtgccgcgggtgcagatgcggaagaggggaacgggtgggaggagtaggagcagtagggccgctcgcgcgtgcgaggcgtgcggcggcgtgctgctgctgaacctggtactgggcgagtgatattgttggcacggacgcacggtggtcgcgtgggagcgacacgtgtgggaggatggacggccgcgatggccaggctccgcgcacgtttggagcggttccgcctcgcatcgcccccctcactccaccaagcctggccaggggaaggaacgaggaagaaggattggcaccgcacatggggcacatgtgattgggcgtgccgctggctaccgttagtcagttacccttttcccatgttagaccatgtttgttttgtgccgatccatagaaattgagagggattaagtcccctacaaatcaaaatcttctctaatccctaacaatccccctcgattcatacggtttttggatcaaacgaacatggcctcagtgggcgccgcgcacggcccacacatgtgtcatgtgcacgcgcctctcggtcctaagggtgtatttgtttagcgggttgatgtaggttggaacgggttcaattcataacaattcatgtttggttcaaaatgctcgtgggttaggttggatccagatcgaaatacttcttaaaaacatgggttctaaggattcctcaaaaacaagagaaccatttcgactcacttactttccaccctcttgtcacacatgtcttatccactctagactagcacaggggcgtgtcgccactacagggggaccccgccgacctaccctacgacgttaatcccccgcatgcctccagtcgtcggtcccccacgagtctgccctccagcgtgctggcctccatcagcgccgtcagactcctccaccggcttgctgcgcctcccacaatcagtcccccgctggcctgccctccgatgctgtcgtgttcttcggtaggcacaacttgcgagccttgctagtgctgtcgtcgaacaggcaaaggtcagtgctcgtcatcgcctagacaagcctgctagtcatggcaaatgttaaaaaaatcactgaagtgtatcttgatgttgttgggatgttctttaattatgactgaaatgtaacagttagacctcatcactaaaatttatggcttggttaataatggctttaatttatgtatatattgtgcttatagatttctcaaatattaaaatagtgtcggtttcattt

SEQ ID NO: 143254 - DNA, 355 bp, Zea Mays
atggggcgccatggccaaaattccaagccacgccaaggtgatctagcccataaactaaatggatcaacgcgcagaggaggatgtggttctttaccggagatgagggggccgaataggctgtccacacaaacaggacgcttcacatggagctcccgcgctggtgatctggccaccggtccaatcccgccaggcgaggccgtgagagacctcttggtggacccagccatccccacggcccactccctagggatcaacatcggctagccggagtccccggcggcggctccctccacgaccaacatgcttctgccgcctagcccgatggtggatttggataggtgttttctggaattgg

SEQ ID NO: 143255 - DNA, 368 bp, Zea Mays
ccgcagcgctaccgcgagttcaacatcgcccaggcgcccccgtactcggtttcaggccattgcaccaaacgcgcatctctaaagtgccatcgagtttcatctcacctcacggtggccagggatcttcgaagaatagaactccgccgccgtggtttggcgccgtgaattaccctgcgctaacccgttaactcgcgccatttccggtcgagttcacacgcgtactatagagctcccagcagaaggagtgtaaattcaagatgaagtggttgtggaagaggagtttgctccagtgcctattcatcaagtggatcgagctatctaactggttattgggtagaagatctagaacctcttcactgcaacaaagg

SEQ ID NO: 143256 - DNA, 2132 bp, Zea Mays
ctcaaccctccattcaaggacggattttggtgggtggcttgtgcgccataaataccccacatcaggagcctcttttggtgcgcgcgctgtcactctagcgtgtctttctccccttcctgctttccctctccagctctcatacacaaacacacggagctagcagcacggatcgagagaacaatggaggaaacaagcaggatccctgggtacttcaagaacaagggcatcctgatcacgggcgcaacaggcttccttggaaagatcctcgtggagaagatactgagggtccagccggacgtaaagaggatctacctccccgtgcgtgcgccggatgctgcatcagccaagaaacgggtggagactgaggtgatcgggaaggagctgtttgggcttctccgagagacgcacggcaagaggttccactccttcatcgaggagaaggtggtcccgttggccggcgacatcatccacgagaacctgggcgtggaggggccccagctgaggcggatgactcgggagctcaacgtcatcgtcaatggagctgccacaacaaacttctacgagaggtacgacgtggccctggacgtgaacgtgatgggagtgaagcatatctgccagttggccaagcagtgccccaatctggaggtcgtcctccatgtgtccacggcctatgtggtgggggagaagcaggggatgatcctggagcgggcgttcaagcagggcgagaccctgcggatggagacggagctggacatggacgccgagctgcgggtggccagggactaccagcagcaggtcgccggggacgacgccgagcagaagaacgagaggaaggccatgaaggagctgggcctcgccagggcccgggagttgggctggcccaacacgtacgtcttcaccaaggcgctaggggagatgatgctggcgcgggagctgggcggcgtcgtccccgccgtgatcgtgcggcccagcatcatcacaagcatccataaggagccgctgccggggtggatggaagggaccaggaccatcgacgccatcctcattggctacgccaagcagagcctctcctgcttcctagccgacctccagctcaccatggacgtgatccccggggacatggtggtgaacgcgatgatggccgcgacggtggcgcacgcgtccgcccccggcggccacaaggaggagtcgccgacggtgtaccacgcgacgtcttccctccgcaaccctgcgccgtacgcggtgctgtaccggacgggaatccgctacttctgcgaccacccgcgcgtgggcaaggacggccgccccgtgcgtacccgcaaggtgcacttcttcggcaccgtcgcagccttcaccgcctacatgctgctccgctacaggctgccgctggagcttctgcgcctgctcagcctcctctccggcggcctcctcttctcgcgcctctacgccgacctggaccgcaagtacaggttcgtcatgcatctcgtcgacctctacgggcccttcgcgctcttcaagggcatcttcgacgacgccaacatggagagactcaggatggccatgcctgtcgccgaccggctggagttcaacttcgacccaaacaccatcgactgggacgactacttctacaagatccacattccaggggtcatgaagtacgtcctcaagtagcagctacatgcactgatcgccgtcgttcgtactacctacatgtacatcatgatccatccagattagtactattaattaattaaatccaccaattggcgcgcgtttgtatacacattgctatatattgttgctacgctcgacgtggatcccacccatcctctctattcctcatcaaaatgtatccagttattagcagctctgctttagctaccactacgtacttctgctctggcttgtttatttagtgttaatttagcaggacctgatgatgatatactcatcctgtgtgttgtcatgtcagtcactgttggttaattgattatacttaagcaggtcgttgcataatcattgtggagaccttcattccaaagatagttctcctatatatatacaacatgcatttttgtggttctttcttggcgaccaggtcagatcggcctcgtcttgagaaaccttatgtg

SEQ ID NO: 143257 - DNA, 2021 bp, Zea Mays
ctcttttggtgcgcgcgctgtcactctagcgtgtctttctccccttcctgctttccctctccagctctcatacacaaacacacggagctagcagcacggatcgagagaacaatggaggaaacaagcaggatccctgggtacttcaagaacaagggcatcctgatcacgggcgcaacaggcttccttggaaagagtaagcattcctcgtggagaagatactgagggtccagccggacgtaaagaggatctacctccccgtgcgtgcgccggatgctgcatcagccaagaaacgggtggagactgaggtgatcgggaaggagctgtttgggcttctccgagagacgcacggcaagaggttccactccttcatcgaggagaaggtggtcccgttggccggcgacatcatccacgagaacctgggcgtggaggggccccagctgaggcggatgactcgggagctcaacgtcatcgtcaatggagctgccacaacaaacttctacgagaggtacgacgtggccctggacgtgaacgtgatgggagtgaagcatatctgccagttggccaagcagtgccccaatctggaggtcgtcctccatgtgtccacggcctatgtggtgggggagaagcaggggatgatcctggagcgggcgttcaagcagggcgagaccctgcggatggagacggagctggacatggacgccgagctgcgggtggccagggactaccagcagcaggtcgccggggacgacgccgagcagaagaacgagaggaaggccatgaaggagctgggcctcgccagggcccgggagttgggctggcccaacacgtacgtcttcaccaaggcgctaggggagatgatgctggcgcgggagctgggcggcgtcgtccccgccgtgatcgtgcggcccagcatcatcacaagcatccataaggagccgctgccggggtggatggaagggaccaggaccatcgacgccatcctcattggctacgccaagcagagcctctcctgcttcctagccgacctccagctcaccatggacgtgatccccggggacatggtggtgaacgcgatgatggccgcgacggtggcgcacgcgtccgcccccggcggccacaaggaggagtcgccgacggtgtaccacgcgacgtcttccctccgcaaccctgcgccgtacgcggtgctgtaccggacgggaatccgctacttctgcgaccacccgcgcgtgggcaaggacggccgccccgtgcgtacccgcaaggtgcacttcttcggcaccgtcgcagccttcaccgcctacatgctgctccgctacaggctgccgctggagcttctgcgcctgctcagcctcctctccggcggcctcctcttctcgcgcctctacgccgacctggaccgcaagtacaggttcgtcatgcatctcgtcgacctctacgggcccttcgcgctcttcaagggcatcttcgacgacgccaacatggagagactcaggatggccatgcctgtcgccgaccggctggagttcaacttcgacccaaacaccatcgactgggacgactacttctacaagatccacattccaggggtcatgaagtacgtcctcaagtagcagctacatgcactgatcgccgtcgttcgtactacctacatgtacatcatgatccatccagattagtactattaattaattaaatccaccaattggcgcgcgtttgtatacacattgctatatattgttgctacgctcgacgtggatcccacccatcctctctattcctcatcaaaatgtatccagttattagcagctctgctttagctaccactacgtacttctgctctggcttgtttatttagtgttaatttagcaggacctgatgatgatatactcatcctgtgtgttgtcatgtcagtcactgttggttaattgattatacttaagcaggtcgttgcataatcattgtggagaccttcattccaaagatagttctcctatatatatacaacatgcatttttgtggtt

SEQ ID NO: 143258 - DNA, 872 bp, Zea Mays
cggatgccgcacagcaacctcgccgtttccgagcccgaccccgccatggagctcacggcgcctcctgctgctcaaccttgggcgccgtcgctgagctcgccctgctcccttgtgcttcctgctcgccgtctctggccgtctggcgagctggctgtcctacccgtcagggtggcgcgtgctccatatcccatggcgcccggtcgcccctctctgcttgtcttcgccgtcgggccagtctctagctcgctgcgccctcgcctcctttctttgtttatgcttctctcttctccctcatcactggttcactgtgatagcgcaggttgtggtggtacgtccgtagatgtggtttgagccagagtttggtgtgtgcgaccccgagcccgaggaagatcctaggcaccctcgtcggtgcggacgacgattgaatcggagattcccccgtggcggctctcagctctctttctcggttcacggaaaaaaagcaggacgtgacggcggcttccgccatgcgcgcaatttcgttgaagggagagctgaccagcggaccccacaatgtagtgagtcagcggcgcgcgcaagccacggagcaagcgccgactgcccggtcccacctgtcagggtcagcggccgatatgcgcgcacgcgggcggaggagagggtttgggccgcgcagatgacttcgggaatgggccgagctgaaggactttgggcccaggcgcattcactactttgttttttctttttattttattttctccattttttatttcccaattccattttaaattcagatttaaaattcaaatcatgtgccaaattgtcctcacattatattgtgaaattagaagtgccaattttggagatataatttt

SEQ ID NO: 143259 - DNA, 1270 bp, Zea Mays
gtcccggcctgccctcttcccataccggtgctcatctccctgggttgaagccgccgcacagccttcatctccccgcccagcccctctctctggcgagcttgacctggcatcgagctctagcggtcctcctccgctgccaatcgttggaccttgcccctgctgcgacgtcggcggctccccacaccctctcctccctggctcctgagcttcaaccttggagcttgtgccctctctgctcgccggcgacctgcgtcttctccagccaagccatagccaagctcctctccatagccgacgcccttgccctcctgctcgccatggctggccatcggatgccgcacagcaacctcgccgtttccgagcccgaccccgccatggagctcacggcgcctcctgctgctcaaccttgggcgccgtcgctgagctcgccctgctcccttgtgcttcctgctcgccgtctctggccgtctggcgagctggctgtcctacccgtcagggtggcgcgtgctccatatcccatggcgcccggtcgcccctctctgcttgtcttcgccgtcgggccagtctctagctcgctgcgccctcgcctcctttctttgtttatgcttctctcttctccctcatcactggttcactgtgatagcgcaggttgtggtggtacgtccgtagatgtggtttgagccagagtttggtgtgtgcgaccccgagcccgaggaagatcctaggcaccctcgtcggtgcggacgacgattgaatcggagattcccccgtggcggctctcagctctctttctcggttcacggaaaaaaaggtagggagatagaggatgcgtggcgactgagaccccgtgatagcttttatccacccttgcgagatccccgcagcaggacgtgacggcggcttccgccatgcgcgcaatttcgttgaagggagagctgaccagcggaccccacaatgtagtgagtcagcggcgcgcgcaagccacggagcaagcgccgactgcccggtcccacctgtcagggtcagcggccgatatgcgcgcacgcgggcggaggagagggtttgggccgcgcagatgacttcgggaatgggccgagctgaaggactttgggcccaggcgcattcactactttgttttttctttttattttattttctccattttttatttcccaattccattttaaattcagatttaaaattcaaatcatgtgccaaattgtcctcacattatattgtgaaattagaagtgccaattttggagatataa

SEQ ID NO: 143260 - DNA, 270 bp, Zea Mays
atggcgcctgggcgtaaaactacagcaaaatcaaccaaaccaacagaagtgccactaacagaatatgagaaattgagagctgagaatttgatgaggaataaccaaaagttgcaaagacttggtgtcactacactagcgtcaatacttaaccatacttctgcaaagagcaaggttgacactcatgaaaaatctggatctttgtatgaggtccaggaaggtgaaggttctgaagatgaggaagtcaatcaggtgcacttgaggcaaccatag

SEQ ID NO: 143261 - DNA, 373 bp, Zea Mays
ctggtttcaagaaatgacgagcaggtgggatgagactgcaaaaggcttccattcttggccggaagaggaagacaaagctgcctgaatgagttttaaggtgatgtgcgctgctttgatttgctagcaccgtgagcaaaagagaaaagtgaatggcagattaaatctggatgtactatgatctgctgtacattgtgcacttgtgtacatcagctctgatcagtccgtcctttgtaaggaaaatgaacactgtcttaaatcatgatatcctgtttggagcaggtgtcatgattttcagcagggtatcttgaatgagtttggagaatcttgaatgagtttgaatcatgatatcctgtcttaaatttcacatgttttc

SEQ ID NO: 143262 - DNA, 902 bp, Zea Mays
ccctctatcagatttttatctgccgcgccttctgattttttttccaccgtcggaggcatacgtcccctgccctcttcccatatcggtgctcatctcctgggttgaagccgccgcacagccttcatctccccgcccagcccctctctctggcgagcttgacccggcgtcgagctctggcggtcctcctccgctgccactcgttggaccttgcccctgctgcgccgtcgatagctcaccacaccctctcctccctggctcccgagcttcaaccatggagcttgtcccctctctgctcgtcggtgacctacgtcttctccagccaagccgcagccaagctcatctccatagccgacgcccctgccctcctgctcgccatggctggccatcggacgacgcacagcaacctcgccgtttctgagcccgaccccgccatggagctcacggcgcctactgctgctcagccttgggtgccgtcgctgagctcgccctgctccctggtgcttcctgctcgccgtctctggcgagctggctgtcctgcccgtcatggtggcgcgcgctccatctcccatggcgcccggccgcccctctttgctcatcttcgccgtcgggctgggatattccttggtgctacaactgggaggtgctcgccgagccctgtatcactggttaagcgtgcctgcccacaccgtcgtctttgatctctcgctccggtctccttgttcttcatcgcttgccaggtgttcggtaaaatgggtgaaccggtgaacgtcgttaattttatgttttcgagtcaaattactatctggtgcttatgggtgtttttgtgtgtgagattggagaaaggagatcctcggattttgtggatgatgaagtaagatccatgtgacgttcgccaagtattc

SEQ ID NO: 143263 - DNA, 455 bp, Zea Mays
cagcaaaggttgcctcggcacgtcgccatgtctgtctgctcgtagcagagatgggtatagttcatgtttgcaaaagtgaatcttcacattcaagctgcagtacaggaaacaacaatatacggaaggatggtatatgctttcgcctagaagcaggctttttaaatggacttttagaggctggtgccagtgccacagaaagttcaggtttttccaattgtcaactaggaaatgacgtctcttcagaataacaacaattggtattctggaaaagatgttccttccatcaagtggtccatggcatgcgaataacgagtttgtttctgctgctctcaaaaagttaccggaaaatgaacatagcaggcaattgcacagtgctaccaatgatgtgttatccaagcttcacgtggtgatgcgtgcagtagataatcttcacttgaaacacatgcagttagcag

SEQ ID NO: 143264 - DNA, 833 bp, Zea Mays
acaaatgtggtctagcccaaaccacaagaacaattgtgtgaagaacaaacttaatcgtgagaaggtgcaatttccacagtgcacaggatctcaatcatatgttgcaaaagcttatgtagtgagacaagaaaaatataaagatgtcgaacctagtgcaattgatcttttcaaggagatgcattgcagcaagaaaaaaggatttagtgaagttgttcagaaagccataggtgatatggaagcaatggtggcaacaccagctgaagatggacagcttacaaagtctgcaacagaagttgtttccaatgtactgcctggttcaagtaaatttcttcacaatgctggccttttgccctcctccaagagaagcaacacagggactgtttcagcaagaatgcaagagcttcagtctcaattggacaatgagaggcgagaaaaagatggacttcgagaagatatggataccttaaaagccaagtcacaagcatctgaggcaaccattgctaatcaatcaactgagattgcagatttaaagaagtccttagcagaaaatagcatcctacttcgacagatattaagtattagtcgtgatcagctgaatccttaagcatgcttgctaagatgctggtgtcaaccatcctgaatacacatctcacaaaactgtggacctctttttatccttatgtttgctatatggaactgcaacttacagtctattatatgtgttctcttgctatagagttttagtacttgtctggttaaagaattatgaaccatgttcttttgtgtgttggacatattatgcttgaaatatatggatgttggaaaaagttgtg

SEQ ID NO: 143265 - DNA, 117 bp, Zea Mays
ttttttgctctatttacttttggtccattttattttgttgtacctcactttattttgaattttcaggaaataactcttgaccatgtgaaggcagttgactttcttggagatggtttt

SEQ ID NO: 143266 - DNA, 95 bp, Zea Mays
gtgggctctgctccacctcgtcgttgactcttcatctccagttcgtgcacatcaagccatcaacaatcccacgatgtctccatcttttgtttgcg

SEQ ID NO: 143267 - DNA, 102 bp, Zea Mays
atggccagctttggagctctttgctgctctatccatagagttgtagcttatggccactataacaaagttgtagatctgttattggaatacaagtttgattaa

SEQ ID NO: 143268 - DNA, 670 bp, Zea Mays
gccccttcggccgagcgtcctccctgccggagctgcctccaacgccggcgctccttcaggttcttccatggcggccgccgtcgaactccgtgcgcgcgcctgcttctatgccgcgacccccagttctctgctcgcaacggcgtgtcgagcttccgcgtcgagctcctctcttccgtgccggtcgtcgtctccgagccgattcttggctgtcgtagtatttttaattattcggttgcgtctgtggtcgtcaagcgtgtctgttgccgtgaactcgcccctggtgcccactctgtctctggtccacgcttccttcagctcggccaggcggggcatcgttccgtgctatgctcgtccaagtcgctaccgtcaagtcgtcggggtcgctcaactcgccaatcgcatcttggccgattgtcaattttctattcgccatggtacaacacagctgttagatccgatctccaaaccgccatggcatccgtcgtcctctggtcccagcccgacctatccgtgcgctcggtcttcatccatcgggcttcgcgcgtgctcgcgtttaccgtcgagctgacttcgtcatcgccaaagccctcactagattcatgtcctcaccagctcactccaaattcggtctcgtcgtcgttccgtgcgtcatcaagaaatcccaagaatc

SEQ ID NO: 143269 - DNA, 670 bp, Zea Mays
cagcccgacctatctgtgcgctctctcttcgtccatcgggcttcgcgcgtgctcgcatttatcgtcgggttgttgaacccgtccttccttgcttgtgacttcgtcatcgccagagccctcactggattcgtgtcctcgccagctcactccaaattcggtctcgtcgtcgttccgtgcgtcatcaagaaatcccaagaatctggtgaagatgaagctagcagggtgatattcaccaagtactcgacaaaagctcgcacaagtcgtcgatcgacatcctcgtctacgccaagcccctaagctgtgaagacactctggtgctggccacacgtcaccagctcaacaaaaggaatacatggatatttggtcaagaatagaaactgtgtgcctcgctcgccagacgggtgtgatcaatgacgtcgaccagaaaccgtcatcgtgcttccaactatcgcgtcgaagtagtcagggtaagcaaatttgttattcttgttagtggatggatggatggtttggctaggtatgatatttattagattgcctgagtcactttggtaatttggtcgatgtcgtaggatgaaagaggtctcaataggtctcagtgtttgcgggactgtaggtgttaaaaatgggaagttttactaatatatatatgatacacaggttaaccggt

SEQ ID NO: 143270 - DNA, 435 bp, Zea Mays
gctcacccaaccatctcccatggcagccacgtctccctctctcctccctcagctcgctggtgcttgccgcacagtctcgagctccccatggtgcgcggtcctggtccagcccctgttcttctctcttctcctccaccgcatccttctccctagacaccccttcggccgagcatcctctctgccggagctgcctcaacgcccgcactccttcaggttcttccatggcgatcgtcgttgaactccgtgcgcgcgcctgctcctatgccgcgacccccagttccctcccatggtgctcttcctcggccactgcttccccagccacgagttccccctgctcggcatctcctcgagattgccttagctcgatgcccagtttctttctccatcgcgccctgctcgatttcacccctgtgtcgcgtgccctggcatctgcgt

SEQ ID NO: 143271 - DNA, 132 bp, Zea Mays
tttatttattttattttattattaccattttttttctatcaatttttgggctttacacttttgaagccttgtacgggagaaggtgtaggaccccgctgaattggtctcaagcaggagagagggaaatatttg

SEQ ID NO: 143272 - DNA, 590 bp, Zea Mays
atgcctgcaaccatgccaggttaaaagccccctttcagagttctgtcgtatggtgtccgaccatcttttggctgaaggggaactaccaatttacgttgtcttgcccgatgtctgccttttcattttgctatggatgaagcagacaactccaaggcttagctaatgctatggtaaagttgtgggagaaaagttctattgctaaaattgctttgaagagaggagtatagcttaccaccagtgagaggatgtcgaagatattaaaaaattaataggcgttgtgatgctttcaagaaacaatgagtttatagtcttctacaaaggggaaggatttcttgtcctcataacttgcaaaggcgctactagagagggaaaggttagcaaagtcacttcatgatgaagaggaagcacgacgaaaatcaacgtattatttttgaagtgctgagacatatgtgcaatctactgtagctggtactataggagagactctggacgctaactctaaatatggaagtaaagttgatgaaaatcatgcgaaagaatggtaagagctgttgaagctgcaagacatgttgaagatgcaattcatttta

SEQ ID NO: 143273 - DNA, 199 bp, Zea Mays
cagagacaaggccatggagcccatggcgattgtgacggtgaccgggggtgtgttgggcccggtcttcgtgctcctgtcgcgcatccagcctgtggtcgacttcttccggcgtctctgcgactgcctccgccacccccagcgtcgccctgccaggccgctcagggcgccatggtataagcatgccgcgtcagaggagtag

SEQ ID NO: 143274 - DNA, 801 bp, Zea Mays
gttgtagcaatgcagggtaggtatagaaaagtaacagcctctgcccagtcaagcttcatcagcctaggattgcttcgtcagcaacatgcgaggaggtcctatccaaacccaattaccgacatactaatcaacaatgagagtattgctaaaaaaccagcgagaaggtactattcacaacccaatactaccacaacaatcaacaatgatagctctattataaaggcaaccatgaatcaacataagaagaggccttatagaaatccgaatactgcagcaaatggtattgtagatgacttagaagatgagcatttcgatgaagtatttaaaaaaatggcagcaaaggttaatgggactgggacgggtaacaatatgtttgattctgataatgacagtgagaattattgtaatgaaagtgagtctgattatgaacatgaaagtgaatacaattctgaacatgagaatgagaactctaaagccatgaaccatgaagttgacaccttaaccagatctaataatgaagaggggagggagaactctgaaggtgcttttgaagaagaaaacacaagagaaaatatggtattcaagaaaaagcatgcattgtttaaaggagatagacagtcgcatcgagtcaggccacgaaagaagcttaaatccatgaaccatgaagttggtaccttaactagagctgataatgaagaggggagagacacttgcagggcacatattcagaacaataatatggacaccttaaccaaagctgataatgaagaggagagggacacttgtagggcacatatttag

SEQ ID NO: 143275 - DNA, 483 bp, Zea Mays
atggcatgttgcgcacatgaagcaaacaaacgcggcgaggacgcagagcgcggggactgttcttcaatgacgagaatactggaattggatgctggtggtcgggacagagaagcgcacggcccgggaagcttcgacggcacgtacagcgagggagttcgacgcaggagggcgagcagggcgctccggccgggcgagctgagaagcagtccgagcactaggaagctgcgcgcggcacacagggactggcagggtcgagcggccgggttgggcaccggctcgcatccttgcagggaggccacggccatggggaaggggaagatggctgtgcgagcagcgaggagcgccatggagcatcgtggcgaggaggagaacggaggggtggctgggtgcgtgccttgggagcttcaaggccgagcgagcgcagggagaacaacgccgtggggaagagccgctcggctgggcgtgctcccgcagaagaaatag

SEQ ID NO: 143276 - DNA, 110 bp, Zea Mays
tcggatacgaaacacctatttaatccttctcgcataacctatatcgttaagcctaaacttagctacacaacacgacgatttcacagtcgtggacacaatcaccacgctac

SEQ ID NO: 143277 - DNA, 104 bp, Zea Mays
cgttaagcctaaacttagctacacagcacgacgacttcgcaatcgtggacacaatcaccacgctacatgtagccccgtattccaacaaagcgtcaattaaatac

SEQ ID NO: 143278 - DNA, 239 bp, Zea Mays
tttcctctccctccctctcccaacgccactctccctactccctccctctctctatctccctctctctagctcctcatgcatcagcagcccccctcccatggagctggcgaccgagtcctcccatgctcctccctcaccttggcagctctcccatggcatcaccccctcctctacgacaacaaggtgtaggtgagctccgggtcaagaacttgtgtgctgaaatttcagattcttgcact

SEQ ID NO: 143279 - DNA, 119 bp, Zea Mays
caaacttgttttgttagttagatgttgtcatactccatctaagaaaaatataaaacttatatgttgttcactgttttcttggtatgttaattaatcttgttaactatgaaaaagatgat

SEQ ID NO: 143280 - DNA, 87 bp, Zea Mays
atggccaagctctcccctacgacagcagccgctgcctacctcgcccaggagcgcggtcctgagcgcccgcgccttgcagggctctag

SEQ ID NO: 143281 - DNA, 578 bp, Zea Mays
tagcaatcagcagctcgcgcctccacgtccggctcacgtagacgcactaccgcaaacgatggccaacgcggggctgcgtgcataccgcgaggtgctgcgcctggtgcggcggctgccggcggagacgcagccctactacgccaagtacgcccgccagaacttcgtcaactatcgcgacctcgccgccgacgacgatctcggcgccctcctccgccgcgcctacacccactccacatgggtcctctccaagtactcgatcgacgcggggaaagtggcggtgcggctcaaggacttgacagacggccacgctgtgatgtgacgcacgcaaggtgttcgatcatatgccgctcttggcttgaggattgagctcagcttcgatttgtgtttgttttggcacttgcatcactctggttacttggacgctgtatggaacgatgcaagttaacaactcatgctcatttgtcatctcccttttgtcatgcctgtgtatgccagcccttttcaattcaaatcaactttgtgggagcttcgaattacctgctcttttcaattcaaatcaactttgcgggagctccgaa

SEQ ID NO: 143282 - DNA, 413 bp, Zea Mays
gggggggggagaaaggggagtaaaggagagatccctgcctctgtcgtaagccactttgtgtgacttcaaaacagtattgttgccttcgcttccccagactataccctggaaacgcccaagcctctagccaagtgtcttcacgtgtctggtgaccacgtcgccgacgcctcaacctcacgtggccagaacgtagtcgcgccaccacaaatcgtcgtcgtgtttagtttcatcgttggtcggccaacgtacgacttccccgagcagtttcatgcacccaccgagaacttggactatcagaattcccagaagaagaagaagatgaaattcaagaagtggtttctgaagaggagtctgcttcagtgcttgctcatcaagtgatgggagccatctaactgggtatttaatagagggat

SEQ ID NO: 143283 - DNA, 108 bp, Zea Mays
taccccaaaatattgaatccgatatcatctggtttaatccgtctacatctcgctcccgtgaagcttgcgggcacctaatcttccttccccttctctatttgtcacgac

SEQ ID NO: 143284 - DNA, 280 bp, Zea Mays
ccaaggttgaagatgacgaactcaaactccaggacgcagcttggggatgagcagagagagaaagaagcaaggaccagggcaagccatgggagagaaggggcgggagagagaagcgtgtagagagagagagacgcgcgcggcaaacagagaaagaacgagctgcgcagggaagaagaaaaaacaagggcgccatgggggaaaagcttcagggaaggagcacgcttgcgagcaggatcctcgacgagggagctgaggcaacacgcggcaaggaaagcaggcg

SEQ ID NO: 143285 - DNA, 427 bp, Zea Mays
ggtgttggggaaaataccaaaaatgacgggtgatggagctggcagatgacgatggtgctacggcgaagcgaataaggctagacgacggcgtggtccgtcgcgagagaacgccagcacacagcacggcgaatagcgggagtcaatcggcgagattgaactacggcacgatgcgcattaggaacaagcgcacacggtagcgaacacggtcgccgagccaaacggcacagggccaagcgacgaatgcgttaggcgaggtcgcgactatggattacggcaaggtcggcagggaagatcggcaccacgatggcaacaattgtcgcccatcaccaacagcacccgcacgaccaccaatccgggaccaaagaacgacgtacgacgaggtcgaggacgagctcagacacggggaacaggaagcagcaaccgagca

SEQ ID NO: 143286 - DNA, 169 bp, Zea Mays
aacttacccttatgacatccgacttgaaaccacgaaatcgacgcctttcagctcagcatttcaccggaaatagggtgagtgctacgtcaaatcgcgcttctttgtccacatcgagaattcttcggccgcgtactgatttattttcttctgcgcctaatcttctcagatc

SEQ ID NO: 143287 - DNA, 1493 bp, Zea Mays
tgctgtgttaatcgcgcctcacatgcagatgagctctcaacatcccgaatacatacggcgcaattagtgctccatgttatcgccgctcaagggcactgaaaccgttatgaatcagctaacaattcatccaaacaaagcaatcaacaaccttatgtaagtatctgagcttctagatgcacggcacattaattgtctcgtcctactgctagcaccagaccgctgtcttcttgagcacattgaggtcttcggatttctccgggggtggccgcgcgcagcaccggcaatgtcgtcatgcaagcggtacttgccgtgcttgatattgttgttgctgcacggaggacgaggtgcggtggccgggaaggtgtcggcaatcgtcgtgttcggcgactcttccgtggacacggggaacaacaatttcatcccgaccatcgcgcggagcaacttctggccgtacggccgcgactacgacgatggcctccccacgggccggttctccaatgggcgcctcgccaccgacttcatctccgaggccttcggcctgccgccgtccatccccgcctacctggacaacaactgcaccatcgaccagctcgccacaggagtctccttcgcctccgctgcgacaggcctcgataacgcgacggccggcgtcttgtccgtgatcacgctggacgagcagctcgcttacttcaaggagtacacggaccgcctcaagatcgccaagggcgaggcggcggcggaggagatcatcagcgaagcgctctacatctggagcatcggcaccaatgacttcatcgagaactactacaacttgccggagcggcggatgcagtatactgtgggcgagtacgaggcctacctgctgggactcgccgaggccgccatacgccgcgtgcacaccctcggcggccgcaaaatggacttcaccgggctcacgcccatgggctgcctccccgccgagcggatcggcaaccgcgacaaccccggggagtgcaacgagcagtacaacgctgttgccaggaccttcaacgccaagctgcaggagctcgtcctcaagcttaacaaggaactgctgggactgcagctcgtcttcgccgacacgtaccagctcctcgccaacgtcgtaaacaggccggccgactacggatttgacaatgctgtgcaaggttgttgtgggacggggcttttcgaggcaggttacttttgtagcttcagcacatcaatgctatgcgaaaatgccaacaagtatgtattctttgatgcgatccatcccacggagaagatgtacaaattatttgatcttcctaatagaaatgcggcatggacaggtctatacggccatgcctgtgtacaatctataatgcacatagacacacctaccgctcctccacatacaactttgattgttgaaaccatatcatatacaattttaaattatagcacgtgtactataaattttatcttatagatcaatgttgttgtcacgaacaaaa

SEQ ID NO: 143288 - DNA, 3809 bp, Zea Mays
atggaggcctccgcctccgcccgcagatccgccgctagccccgaccccggcgcgaagaagccgcgcctcgcgcagccgccggcacgggaccccagatcttacgccgctgccgccgccgcctccaatggcggcgcaagcgccgccgagcaagcgctggttgacgagctgctcggccagtaccggaccgcgcttggggagctcaccttcaattccaagcccatcatcaccaacctcaccatcatcgctggcgagaacctccaggccgctaagcccatcgccgccgtaatctgcgccaacatcctcgaggtgacctttgtctttgactcctcttacgctcgtcaaactgccgtctccccttcttcctcaattcaccatgtaaaagtaactctaaggcgccaagcatccactggcgcttcgttttcaaaacagtgtggtaaaatcacaaagttgaaaaacaagggatttcagaaagttctactacaaactgaagtttatgatacaccgtcttgtacatatgaaaaatatgtccatgcactggttccaagtgaacagaaactaccatcgctgtatctgcttgacagtattgtaaaaaatattggaaaagattatgtcaaacatttctcagcaagattaccagaggtgttctgcaaggcatataaacaagttgatccttctatacatcatagcatgaggcatctttttggaacatggaaaggagtgtttcctctacctcctctccaaacgattgagaaggaacttggttttcagtcatctaccaatggattatcaggtgctgcaccatcaaggactgattctcaatcgccgcgtccatccaatagcatacatgggatacttggaagtggtgctaagacagctgtaattgctgatacagacgatgatattgagagggctaataggctaggtactgaaagaagtgcagggagacgattggatgctcctaatgctagacctaacatagagcacattcagagggacccttttagcaatcctattcatgaaaaacttgcaggtagagatgtgaggggccttggattctccaacacttcacagcaggctgttgtgggaactggtcaagttcgctcaaaacccagaggccaagatggaattgggggaccctattatgcctctggtgttgtgtcttctgaagaaaaaattgacaagcgcagcaacttttatacaagcaaggatgttcggccatcaggatctgtacatttcgatagtgctcttcttccaactcgatcaattaatgctaatagagttggtaggccttcatcaaacaaaagctggaagcactctgaggaagaagaatatgtttgggatgatgtaccctctaaaacaacagaatatagtggtacccataatataataaaaggagaatggatgtctgatgatggcaatgctaagtttgcaagcctccaaagtgctaaatgggcagatgcaggacctgtggaatgtatagatcccaagacacataaagttgataatgtgtcaagatttggatttgcagcaggtcaagaaagaagaatttcagcatacatggatcaggaagagtaccttcttggcaagcgtgaggtggaagctagaattgatagggaaattaggccctatggacaacagttcccagcagctcgagattcctctctctgggtgtcccaggaaaaagcactccccgacaatgggttggacccttgggtatcaaagttttcaaatcagccagcagagatgtccatttgtactggcaccatgccagcaagtatcatatcatctgtacctgttaggttatcaggacactatgctggaaggtcaaacctagatactacaaatagtgtgccaataagatcaactgaggcttttgggcagcagaagcatagatattggtcatcttcccctccacaagctcacccaccttcatctactgcaccctttgcacgtcagggttctccaaatcatgacgagtctgatttttatccttctggatcattttctcaattgggccaagatcctcaagaagaatatagccagagagcattgcctgtacttgctaaaggttctcatgttgtggttcacaatgatgaacttactcagggccaacctagtctacaggcaaccctgcagacacaaaagtaccctatcatacagtccaagtcacatattaatccatctgatcaattgcaagcaagctttttgtgtgaaaattctccatcactgttcagaccttccattcagcttggagaagtatctttacccagtgattccacccctataagctcagatctgacaagtgctagtaatttgttggctggtctcataaagagtgggttcaaaccaagtaaccacagtgatgcacagcctcttggtccgagtggctcacttctagtggcttctttatcacttcaaaatgctgctggtgaaaataccattttgcagacacagacaccaaacacttctcgtccaccattgccaccaggtctaccaccacctccatcaacacagagtgcagagaaagctgcgccgctctcgagtcttctcagttccctggttgcaaagggattaatctcttctcctgcctctgattcatctgatgctgtcatttcacagccaaataaagaatcaagcataaatggtaaagatgtcgcagcttcaggtgtgcctttgccagctctgaagtcttcatttggtaaggtgtcatcatctaattctgattcatctgccccaccaaacgcttcgttacccaaagctatcgaaattgagatgggtgacctcattggcctggagttcaagccagagaaacttcgcaagtaccatgagcatgtaattagctacctcgatgaccaaagccatcagtgtaaaatgtgtggtaataggttcgggcttgaagaactgagtttgcacacatcaagctgtgggccaagggagtcaaggactatctatactggtatcgcacctaagagatggtatcctagcaggaacatttacattgatggatcacatgaaattgaggatagcgctgaggcttctgatgcaggtttaggttctgcagaagtgtgtgagtttatggtccatgcagacgagaggcaaattatctgtgcactgtgtggggaaccatttgatgacgtatattcttttgagaaggggaactggatgtacaaggatgcagtattcttggattatgccaagggtaaaaatagctgcggaaacaatgttaagggtgaagagcatgtgcctatagtccatgtaagatgtatgccaagaggctcaaacgatggcatggacgttgactagaatggttgttcacagaagccaagttctcgaggggcctagaggtggatgaggctgaagctggtgtttgcacgaggcaatgtgcatcatcaggtggtctgcggcaactgggcttaagacatacatgtaagatgcttggtggaggtggcaggcgttatcagaaacaaatcttgcgaagatctgcaaccatccatggatttaaccatgccctttacaaagtgcttacacaaagaataaagccccagaggagcacttcggccatgcggttcagaattatcaaaatcttcatatttttggtctccatctgagaaggggctgggtctttatgttgatacaaagagagctttgcaagaggatgtcaaaagaatgtatgatttctttacgtggaaaaggggtatgatatcccgcatgtaagttgagcactgctgttttctgacgatacgtttcttgactgttaggaatttttgcactacgaaactgataatacaacatgatagaggcaggactaa

SEQ ID NO: 143289 - DNA, 606 bp, Zea Mays
atggatgcttctcaggcatctaatggggagcttcacactagcgtgctcaaccactatgctataaacgtttgcaccatagtaggacctcagtacccattttatggaggaggagctggcaggaacaagacctcaacccaagcagtcacaccagtagtctgctcctcaggttttgctggtctcacgcttcttatcataggtgacgagagcaaagtcaagaaggaaatacttggccccttgccccctcccctctcaagaattgttgcggtagatgaaactgaagagggtcttcaaatatccatttgggggcagcaaaactcgagacaacaactacgtagcgcgtcaagatggccatcgggcagcacggaggctcaacttttgaatctattgaagcgccatgatcaagaatacaatgttgatgagatcagcatgaatgacaagctcaccaactgtggccatcagataactattatggaatatgccggatttcctttccccactgttgccttgaaggtgtacacatctgacttaacatcacttttcttatggacctgtccaaggtgcaaaggctacacaaaggcatttgttggagttatgttgaacccttga

SEQ ID NO: 143290 - DNA, 246 bp, Zea Mays
atgcacaagctggcgcagatcctcctcccgggcctcgccgccgtctgcatggacggcaccacgggggacccgttccgcagcccgtccgcggtggtcgtggacctccgcagggagacgagtcggaggcgaaccaggacgcgcccggggccgaggtgcccaccccacacgatgcaccccctcgccgccgccgtgaatgcatccgcaccgcaccccccgacatacctcaccgtcgcccacccctcgtga

SEQ ID NO: 143291 - DNA, 231 bp, Zea Mays
atggcggcgcgggcagcggtcccaacgcacggccccttagcggcgcgggcaggcggccctggtgcgcggtctctcccgtacggcatggacgcgtggcctgggcgacgtggcctgcctgcgtggcaactcagcgtggcctgcctgcgcggcggcccggcgcggccagctcgcggcgctcgcggcatgccagcccgcccggcgtggcgcgccccacctcctcgtgccccctag

SEQ ID NO: 143292 - DNA, 476 bp, Zea Mays
gattttggtcacgaagccaccgtaggaggcgtatgtctcctacactcttctcataccagtgctcactctcaggacgccatgccatctcctccaccggtagccgcccctctctactcgttctcatcgtcgggccgacatctagctccctgcgccctccccttcctgccatgactgacgcccctctctccatggtgctcgcccaacctccacttccctgttccagcatctcccttggccgccccaactccttccatggacgccaatagcagcagcccactccttcttttgttctccatggatgaaagcccaagcatctgcgtctcccctaggtttttgcacaatcgcagcagcacctcttaattctcactcgtctgttgctcgatgttatgtgcagcaggccacgcgtcatcatagccgtgtttggaccactccggtgccggcgtcatccattctcggtgagagcccgcgatattttt

SEQ ID NO: 143293 - DNA, 848 bp, Zea Mays
ggtgcgtgcctgatgactaacgatgtacgacggaacttctaccggcaggatgaagctaggaaagcactggaaaatgccctagggaagaaggctgagtttgacaaatggggtgtggaaattgaaaggaggcaaaggggctaccctagagatcctgctgcttgtggtggaggatggtcaggaggaggcagctggtttaggcggcttactggtggaggtttctgggatgcagcaaaacaaactgttcttacaatccttggcattatcgcggcgtttttcctgattgcaaacttcaatatactggtggcttctgttatcaattcgttgttgcttgtgctgcggcagattcggcgcatactctccttcatagcttactgtgttttccagggcgcattggttgaaaggtctggaccaaagtcaagtacccttggccttagcaatgtggctggagtgcctgtgaaagaaaaggctggaatgtctgcgaaagaaagagtagttgggaaatgggcaatggactgaagtagtgcacagttatgtcttgtgagcaactctctctgtttcaatgtatgtacgacagtagacatgttacaataatttctatgaaactatgaccttttaaatgaaatatgttgtgatgctagtcaatgttagaaaaaatttgaccaaaaggattcctaaaatcagacggagtatttcttgttcagagttttgcagacactgaaatgttgatgtttgccgaattgtttgagatgaagaccgtgattagtggttgttcagagttttgtatcagcgttgccactcaatatgaagtacgagcattcgtgttttaagttgtttttattacgtgtaac

SEQ ID NO: 143294 - DNA, 321 bp, Zea Mays
ggtgcgtgcctgatgactaacgatgtacgacggaacttctaccggcaggatgaagctaggaaagcactggaaaatgccctagggaagaaggctgagtttgacaaatggggtgtggaaattgaaaggaggcaaaggggctaccctagagatcctgctgcttgtggtggaggatggtcaggaggaggcagctggtttaggcggcttactggtggaggtttctgggatgcagcaaaacaaactgttcttacaatccttggcattatcgcggcgggcgcattggttgaaaggtctggaccaaagtcaagtacccttggccttagc

SEQ ID NO: 143295 - DNA, 4116 bp, Zea Mays
gacatcacggcgccaagtcggccatctgttcaggcgcgtcacgtggttgcagccatggaagaggtggagaaaaggctgactgagaagttccagcaagcatgggaggcgtcgactgccactctcatggagctgtcgaagaagatggatgggttggacacgctgtcgaccaagatgtccgagatggagaagcgacagatggagcatgagaagatcacacagtacgtgcaggcaaaaatggatctctccatgaagtctctggcacaggtatcccaagatcaagcgcgactatcaaatgtggtggcgaatgcaaaccgaggagggagcgtcgcgcagaggggaggaactggtgacgggttgatgggagctcatccacaggcaataccacccagtttccagacatcccagaccgcccctcatgtgtctcatccgacaggaggttcagggaaccattcgtcaggtgaggaggcaagatttggacaagaagaagttaacagaagaggaatagagtcggatcaacatcaccgaaggacttggctacccaagtgggatttcccggtatttgaaggggaagaagctagggtatggatagataattgtgaagcctacttcctgctataccagattccagaggagttcagagtaagcgctgcctctctccatcttaagggtcgtgctgctcactggtaccaatcatttcgagattctgtcgggttcgtagattggattcagttcaagttggagattcggaatgaatttgatcttactacacattcagacaggatgttggaattgttaacactaaggcagacggggactgtgttggaatataagacacaatttgagaaacttgtctattgcattaggttgtttgacaaggctgtgagtgagaccttcttggtgacacaatttgttttgggtctcaaacatgagttgaaggttggggtggagatgcaatttcctaaaacagtggctatggccgctcaactagctttgaaacatgagagtttgcatagcagacacactgcaggaacaagaaaagcagtgggagtaaagggggttcctccagtgggcttcaaagaaggtacagagtctcaaggagaattatggaaggccaaacaattgaaggactataggagggcaaatggactttgttttaaattatccctcaatgctatgagtggcactaacaacccaagatgtgtgagaatacaagcattgatcaaggaccagttaatccttcagttgttggattcaggcagctctaacactttcataagtgagctagcctgttctaggattgggtgtgaaactcagaatatagagcctgttgcagtgaaggtagcaaatgagcagatcatctactgccagaagaaggttgtccaattgaagtggtggtgtggtgggaaaacctttactgtagatgcatttgtgttaccagccactgcatatgatatggtactgggaatggattggctggaaaagtttagtcccatgttatgtgattgggatagaaaatgggtggaattcagttatgaaggagtgagaatcaggctgcaaggggtgggcaataaatctgcagctctgttgccagaagcatcccatgagcaaatccagaggtggcacaaggggaatgaaatttgggcagttgcattgctacaacaagtgacaccagagttgaaggtagtcactggtcaagtccctgagtgtgttcaagaggtgttggaccagtttaaggaagtgtttaaaaccccagattctttaccaccctcaagagaatatgatcatactatctctctgttgcctggaactacacctgtgaatgtaaggccctatagatactcaccattacagaaggatgagattgagaggcaagtccaggaaatgttgcaagcaggaacaatcactagaagtgtcagcccctttgcttctcctgttttgttggttaagaagaaggatgggagttggagattttgtgtggactatagaaaattgaatgatattacagtgaagaacaaattccctatgcctatcatagatgagtttattgatgagttagcaggagccaaggtgttttccaaattggatatggctgcgggttttcatcagataagaatggcagaccaagatgaaatgaaaacagcatttaagactcaccatggacacttccaatttagagttatgccatttggtctcacaaatgcaccagctacatttcagtgtttgatgaatgctgtatttcagcaactcatgaggaagtgtgtcttgatttttatggatgatatattggtgtatagcccttcactggagacacatgttgttcatctacaacaagtttttcaagtattagaaacacatcagttgtatgcaaaaaggagcaaatgtgcttttgctctcactcaaatagaatacttggggcatattatttcagacaaaggtgtgtcaactgacccttctaagacagaatcaatgagaaggtggcctactccaaagtcacacacggaacttagaggatttttgggactcacaggctattacaggaagtttgtcaaggggtatgggatactggcaaaacctctgacggtactgctgcaacaaaaacagtttggatggccaccatcagcacaaactgcctttgaggctttgaaggatgctatgattaccactcctgttcttgccttacctaatttcagtgagacatttgtcattgaaactgacgcttgtgacactggcattggagcagtgttgtcgcaaaagggacatcctgtggctttttatagtaaagctttaggagtgaagaacagccaactgtcaacttatgagaaggaatttcttgcaatattaatggcagtagagaagtggagatgttatctgagtagaggaccttttgtgattcggactgatcacagaagtttgtgtcatcttcaggatcagactttggcaacggatatgcagaagaaagcaatgaccaaattggccggactgcaattttcagtacaatataaaaagggagcagaaaataaagctgcagatgccctttctagagtggcccataatatggaattgtcggccatttctgcaacaactcctgtgtggcttcaggagataacaaattcctatgagttggatactcatgctcaaagtctattggcagaactggctgtctctagtccaaatgagcaagggtttgaattgaagaatgggctgatttacaagaataacaggcttgtagtgggacaaaatgtggggctgcaaacaaagttgatttcagcctttcatgcatctcctttgggaggacattcaggaatccaggccacctatcaaagggtgaagaagttatttctttggaatggactcaaggctgatgtggaacaatttgtgaggcaatgtcacgtgtgtcaacaagctaaacacgaacattgtaagtacccaggtctgcttcagcctttgcctattccccaaagttcctggcaagacttgtccatggattttattgaagggctacctaaatccaatgggtattctgtgatcttagtggttgtggatcgcttgacaaaatatgcccattttttagcagttaaacatcctttcacagcttcacacattgctcacttgtttttctctcaagtggttaaactacatggattccctcataccatagtttcagacagggataaagtgtttaccagcacattttggcaagagttattcaaattgtctggaactcagttacatctcagttcagcataccacccccaaagtgatggtcaaacggagcgtgtgaatcaatgcttggagatgtttttgagatgtgctgttcacaattccccttctcagtgggcaaaatggttagactcagcagagttgtggtacaacacatcctatcatacttctataaagtgttctccatttaaagctttatatggagttgagcctaatttgggatgcattcctgtcactgactctttgaatccttcagaagctcaactcaccttgcagcaaagacaggaattcttggaagtaatcaagacaaatttggcatctgctcaaagcaggatgaagcattatgctgatctgaataggtcttttagacagtttcagattggagatctggtttac

SEQ ID NO: 143296 - DNA, 183 bp, Zea Mays
atgtcgcctgcgcggcctcctccgccttccgctcgcctccgcgccttcccccgcgatggagtcctcacctccttctatgccggtcgattccccagtatccctggatgccttaatcgccgatcctgcggccgcgccggccgcgtgtactgcctcttctctggcggtgataaccgcaagaaacag

SEQ ID NO: 143297 - DNA, 407 bp, Zea Mays
ggtggacttccggatcgttcttagagattttgcccgaacttcggtaaaggcacctgatctttgctttgggaaagaagggatgtagcagcacgaccaccacacttttaaataaaggaataactgattattaatgatgttaaacaggaagggtcaagtctagggaattattacattctaatctttcatggtagttgaactgtttagtttggtgggctgagatgactatcttttgtctggtcatgaatgttcttttctaccgttgcatttttattatactacgtcaattatctttcttttatatcctgtataaactatatgctttccttgttatgctactttcaagggaggtgctgccggattttgcaatactttctttctctatgtgttgcataagttttgtagaaagg

SEQ ID NO: 143298 - DNA, 985 bp, Zea Mays
gcctccatggccaagctcctctgatgcaggcgcccagcctccccaactcggcacccctcaagcacacgggaccgcagcgcctctgctctcccatctaggcgccccttcccctaagcggatccatggtgctaggagaatcacctcctcggcaggtgctccaacctggcgtccatgacgccagtgctctgcacaacgtccccctcccccaggctcctagcacgcagagcatttctctaggtccgagctcgagcagccgctcccctcaacaactccctcaacgccggcctcctctgccccaggtccggtagccctccccaaccaagcttctcccatggcgctgctacctccaggatggagctcgacacccaaagaaattccccctgggcgctggaggcgccaagctcgcgctggagcacggcaaggcttgaccgacgccctttccatggctagctttgagcagtgggtcgagcccctcttcttgccatggcacttgacccctgctcttctctgccccacgacgcccagcctttctacaggagcaggcgccctctgcatctccctggcgcaggaaatccctaagtgcaggcgcccaggactcccatggccgctagcctctccatgcaaccgagctcccttacttcccagccatggacgagcctctggtgtgcatcgagctcccccatggtcgagctcccctctgttgctgtggccagcgactccttcaggcgggtcttcatcctgtcgcattggacgccgctccttttccccggccaccgtcgaaccagcatggacccgatctacgctgtgcagcagcgccggtccacagcagcagcctcgacatcccctctgcgtcgcgcccttagcgtgttcgatgtaatgccgcagcaagcagcagcagcgatgcccttcgctgtgtcacgctcgccaagtcgggcctcactccgtcgctctgtgcagcatttctgcgtcgtcgtcaaaacccatg

SEQ ID NO: 143299 - DNA, 342 bp, Zea Mays
atggcagggagatggggagggagccagctggaggccgagctcggcaggcaggacgacgacgcgagctgtggggagctcgacgaggagtcgaggaaggggagaaaggagaagcaggggggacaagcagcaggcacgacggccatgggcgatggggctcggggaaaaccatggcgcgagcaggaaacgggaggagggagctgccgcggggaagaagacagcgcgaggaagatagggatgaagctgtggccgtggaagacgcagagaccaggggcgcgcgcgattttatccagagcgacggctgataaagcaacaggagcggcgggattttttttgttcagctga

SEQ ID NO: 143300 - DNA, 219 bp, Zea Mays
atgaagctcgactcagggatggctagaacagcggcgttgggctcaggtggaatcgaggttaagcagagcctaggcatgaccatggcagggagatggggagggagccagctggaggccgagctcggcaggcaggacaacgacgcgagctgtggggagctcgacgaggagtcgaggaaaagggaagaaaggagaagcagggggaacaatcagcaggcgtga

SEQ ID NO: 143301 - DNA, 2529 bp, Zea Mays
taattgcaagtttggtgcttgacaccgcgttcctgttcctaccatctaccaacacctgcaccgcagaaccaaacctagctgcgcttcctccagatctcggcgctctggccccatggccaccctcgttactagctccagtctctccgctcaccgcccttgcgccctctagctccggatcgcccgcgcacacgaggccatggagcccgcagccgaggacgttgcagccgccgcgccggactcgtgggaatcggccgacatcgacgggcccataagccggcttatcctctccgcgcgccgcgtgtcctcctcgccggacctcgctgacaacccggacccgccccagccgccgcctgcgctgcagccgcagggcccgccttcggttccctcggctgcgcgcgaggatttgatggctcaggtcgatcagttcctacgagaggctctagagaagccgagggagaggctttctgtgctaagaatggagcaagaaattttgaagttcattggtgaccctaggtttacagagtatgaattcaatggtcttccaacttcatatttgcgtctcgctgcacatcgcctggcgcagcattacttcctgcagtccattgccataccagacaacagtttgcctgatggaactggttcgcatatcatccttcgtaagacatcatctgagtgccaactgcctgatgtctgccttgcagatattccagttaacctaccacaagaagaaaacatctctgtggcgaaagtagctattaagcagaggcctcaaaagaatctccatggcatgaacagctcaagtgctcactcctttagagacaatcaccagaaaagcgttgaagaaagaaaagaggaatacaacaaagcacgagcgcgtatatttaacaacggcgtcagtaatgctactgatgggagatcagctgaggaagtgacttcactcactactcttcacaggtccacttccttggagttgaactcaaacaatagaatgggccaaggggctgaaattactcttgagaggaccttgactaccacttcagctagcagcatgtcaaatagaagcaagagtgataaggagcctgcagtcaatagaaacagacagaacaatagggttgcaattttcagagaccgtgagtcagagcgcagggatcctgattatgacagaagctatgacaggtatatgcaaagatttgatcctggatttggatttagtggagggtcatacacaattcgacctctgtatgcccctgctgttaactacaacactgaattccctcagcttggttcagcacaccaatcacctgttgctgtcgaacagcaacctcgtccaatagctcagcacatgcctgtgacatggtctgcggctcaagcaaccaatgcaattggctatgggccagatggtgtcatggggccttacagccctggccatattcgtgcacctgtgagatcatctgttttcatgcatgcttcacagcaatatgccataccttcacgccctggagttccatttgtacatccacaggaatccatgggaccatttgcacaaactcaccaacaacaatctaatgctagtttgcgctttgctcggccctggtgaggggcgccgtgcatgcctgcacctgccagtgtgcaatgaacacattacccttcgttttgctggcagatggtagcaggcattaaagaacccagaggtgtaaggcagagtcagccatccatttgatattgtcagcctgtacacactctcggtgtagttgctccctggtccctgcatactgagatgcaggagggacacttcatactctgtactctaaacagaagcaactcgaggtttattgggcaacccctcttccaatccacaagaagctgggaggtgaagcttgggctgtggggccacctgcatgcccctttcaacttccttctgttgcttgctcctcacaggttgagatgctgaaggagcacatcttgccctatttgaatgggctctgttgtcgaaggactgatgacgatgatgaaaaattgggattcgcagtgagtgggcgatcagggaggagagcaaagattggggtggtccagtatgtgaacaggcgacagggatgtggccccattgtgcataggatggttgccgggttgaactgaggaggcatgaagaggacgttgtttcttgctttgcctagtgcgggcccggcaccattgttgatcaggtttagaagcagaggcatctctgttgacacaattgatggtcaggtttacaagcagactcatctggtagtcagtgttgtgttgtaaattaatgagtgttattgaattaccgaacctatttcttgtaccatgcatgacaagcaacgacactagttatgatcatgacgaatcatgtaacagacctgtttactgcagtgcagtgtttaatgttagaccgggttatttgcttgtgtttggtagttgtttaaggtttcactcttctttttttattaaggtattgctggaaactaatacttcctctataccaaaagattagttgttatagctctt

SEQ ID NO: 143302 - DNA, 2590 bp, Zea Mays
caaatgcaaaccctggccgtcgtcttcctcataccagccgtgagtccctcgctgcgcacgcggtgctagtacacatgtgcacgacgttcgtccccgtacgtgtggactatgtggaagcgcagctgcgactgttgcgctgacacactgcggaggaggagacgatcgtgatcggctatttcctcttcatcgacgcgtgcatataaccaaacctagctgcgcttcctccagatctcggcgctctggccccatggccaccctcgttactagctccagtctctccgctcaccgcccttgcgccctctagctccggatcgcccgcgcacacgaggccatggagcccgcagccgaggacgttgcagccgccgcgccggactcgtgggaatcggccgacatcgacgggcccataagccggcttatcctctccgcgcgccgcgtgtcctcctcgccggacctcgctgacaacccggacccgccccagccgccgcctgcgctgcagccgcagggcccgccttcggttccctcggctgcgcgcgaggatttgatggctcaggtcgatcagttcctacgagaggctctagagaagccgagggagaggctttctgtgctaagaatggagcaagaaattttgaagttcattggtgaccctaggtttacagagtatgaattcaatggtcttccaacttcatatttgcgtctcgctgcacatcgcctggcgcagcattacttcctgcagtccattgccataccagacaacagtttgcctgatggaactggttcgcatatcatccttcgtaagacatcatctgagtgccaactgcctgatgtctgccttgcagatattccagttaacctaccacaagaagaaaacatctctgtggcgaaagtagctattaagcagaggcctcaaaagaatctccatggcatgaacagctcaagtgctcactcctttagagacaatcaccagaaaagcgttgaagaaagaaaagaggaatacaacaaagcacgagcgcgtatatttaacaacggcgtcagtaatgctactgatgggagatcagctgaggaagtgacttcactcactactcttcacaggtccacttccttggagttgaactcaaacaatagaatgggccaaggggctgaaattactcttgagaggaccttgactaccacttcagctagcagcatgtcaaatagaagcaagagtgataaggagcctgcagtcaatagaaacagacagaacaatagggttgcaattttcagagaccgtgagtcagagcgcagggatcctgattatgacagaagctatgacaggtatatgcaaagatttgatcctggatttggatttagtggagggtcatacacaattcgacctctgtatgcccctgctgttaactacaacactgaattccctcagcttggttcagcacaccaatcacctgttgctgtcgaacagcaacctcgtccaatagctcagcacatgcctgtgacatggtctgcggctcaagcaaccaatgcaattggctatgggccagatggtgtcatggggccttacagccctggccatattcgtgcacctgtgagatcatctgttttcatgcatgcttcacagcaatatgccataccttcacgccctggagttccatttgtacatccacaggaatccatgggaccatttgcacaaactcaccaacaacaatctaatgctagtttgcgctttgctcggccctggtgaggggcgccgtgcatgcctgcacctgccagtgtgcaatgaacacattacccttcgttttgctggcagatggtagcaggcattaaagaacccagaggtgtaaggcagagtcagccatccatttgatattgtcagcctgtacacactctcggtgtagttgctccctggtccctgcatactgagatgcaggagggacacttcatactctgtactctaaacagaagcaactcgaggtttattgggcaacccctcttccaatccacaagaagctgggaggtgaagcttgggctgtggggccacctgcatgcccctttcaacttccttctgttgcttgctcctcacaggttgagatgctgaaggagcacatcttgccctatttgaatgggctctgttgtcgaaggactgatgacgatgatgaaaaattgggattcgcagtgagtgggcgatcagggaggagagcaaagattggggtggtccagtatgtgaacaggcgacagggatgtgggttagtgcagttctcacgtttcttttttgcttaatacttggtcctcttggcacttattgatgaagatgaaccatatgcagccccattgtgcataggatggttgccgggttgaactgaggaggcatgaagaggacgttgtttcttgctttgcctagtgcgggcccggcaccattgttgatcaggtttagaagcagaggcatctctgttgacacaattgatggtcaggtttacaagcagactcatctggtagtcagtgttgtgttgtaaattaatgagtgttattgaattaccgaacctatttcttgtaccatgcatgacaagcaacgacactagttatgatcatgacgaatcatgta

SEQ ID NO: 143303 - DNA, 117 bp, Zea Mays
ctggagaacttgagaatagtgccaaaaatagtagaaatttccaacaatcatgggacaaattttgttggatgtctaaaatcaagagctctctggtaaagttggttttaggatttttag

SEQ ID NO: 143304 - DNA, 106 bp, Zea Mays
aatttgcactccacttttaatgaacaacagaagagctcaacaggaatgcaaatccataattttatttatttattattttactatgtctatgaaaaaaatgattttg

SEQ ID NO: 143305 - DNA, 318 bp, Zea Mays
atggcgcgacggcagcagcaggcgcggagaagaacgtgtaggaatgcgacgaggctcttcggtcgggagcactccaagcgatgcagcagcaatcacggcgacgacagcgagcagcggcaggcgagtagaacagaggcgaggagatgctgggtaagctgttgctggcagcgagggaggctcgacggcgtcgaattggcccagcaacgatggttggcaagcgacggtgcatggattatgctggcagcaggaatggcgcatggggaaagcgaagaaggaggtcgagcacggactcaggggtcatgggcacattatttatag

SEQ ID NO: 143306 - DNA, 1341 bp, Zea Mays
atgtctaaaaaggtgaagcagttcactaagggacttgcgaagagagcgtcctatgttatgagaaaggagtacatagtgtttaagggcactagttccagctcgagtaggcgtagagctttgttggagcatgttccagagttgcagggtcagacagttggcgttcaaaggaatgaggatgagtctgaagatggggtagagacagaggaggggagacaggtgggagatgttgatgatgcggtagagacagacgaggggagacaagtgggagatgttgatgatgaggtagagacagaggaggggagacatgtgggagatgttgatgaggtagagacagaggaggcggagacaggggcttgggtggatagtagtttcactggcacagtttgtcgaaggcaagtaaaaaaagtgttgggcaacatatgtcatatgaaatggcctagattggtgatagaggatggtaaggaggcccctgtcacaagatgggatcaatatgtcgttgcaataaatgcacaacatgggaatgcgcaagctgcagtttggcatgacttctggaaacattacaagttgcctgaaggagatactcatatggaacacgcacactctatgttccataggaatgcgacaagtgttgttggggatatgatgtactatgctcgaatccaggtgattagtcaagccatgtttggtagtgaagggcgacgtctagagagtaagaacgaggcgacacagtatggactcaatatgactgagcaacaatatcttgaccattcgattccatggatagctaccaatgatgctacttggcgtgcgttatgtcattactgggcttcggctgaattcaaggcaaagtctgtgcgacatagttccaatcgtggaacagtcatatcacaggaagctagcactggtgcagtgcccagtgatgttcaaatataccttagagggcacagaggaccagatcctgcaaatccagatgtgttgtgtagccaaaaggcaacagatcgtgtggctgcatatggcgaggcgatgtctagtcagcacggaccatactatgactggaggacctcacctattgatcctcaggctgtgtatgcaagtggtggaaaagctcatggaagctcccgtcgctccactcaagatccagcagaagtggagcaactgcgagaagaacttaggcgacatcaggattacttgaagcaacaagctgcgcaacatgaatattatgctacacaggttcagcaacagcaaacactcatacaagtcttcacctccacctatacctacatctccatctaccgaacatcagctgttgatatatttgttatgatgtggaatgtggtgtaa

SEQ ID NO: 143307 - DNA, 2395 bp, Zea Mays
tttggaaagaagatagttctaacctaggtttggataattcgttttgctacggtataaaaacccataatccaaaatttacaaaatgcaaaatcaaaaccgcgacactgaacactaaactttggttcggcttttaatattttggtttgatttttccattttggtgaaaaaaattgtccagccctatctgctcgccccggggcccgggcaaacactcccagcctgccgctccccacattcccgttccgctcacagcggaaaaggaagccggctagggtttcatcttcctttcccctcctctctttcatcgacgaccgctggccaccccctcgatctcttgacccggaggcgaggacgggggccagcagcggccgccagcgcctgcccgtcttgttatagggagcgttcgccatgtctgaaatggagtctgtcgcggctcttatggactcgacaagctccaagatacaacagcttcaggaggcattcgctgagcttgagagccagagcgctttctgcatgaacttcaagtggaagcagcttgaagaccactttcgtggtcttgaacaatccctcaagaaaaagtttgacgagctaaaagagcaggagaaggagttccaggagactgtcgcaaaatcagagcagatgctggagcagcgggaggcagctgttgtggccaaggaactgacctctttggagaggttgcaggagaagagggaagctgcattagctatgatctttagcaagtccaggctttccttacctgttccttccatcaacccaatgaacaaggcactggataatcttggtgtcaagtggcctaaaccggcttctgaggagagtgtgcacttgcaagttgataatgctgcagtgaggcctcgttctgagcttgttgcactctgtgaggaaatgaatgtgaacgggcttcataagttcatatccgacaacaggaagaacttggcagccatccgcgaggaaattcctagtgcactgaagaaaacatctcatccttatggcctggtgttggattccctggaagacttttattctggagataatcttgtattagatggaaaaaaggatggtgaccttctgggtgttagaaggacatgtttgatgttgatggagtcacttggacaactgcactctaatgatataacttgttcttctttggagaggcacatgcttacaactaatatcatagagcgagcaaagacgattgcatttaagtggaagtccaagttagataatcttgacattgatgctagcaatgggaactgtcttgaagctcatgcgtttcttcaactcctggcaacctttggtatttctgctgaattcaatgaagatgacttgtgcaaattgcttccatatgtcagtcgtcgtcgtcagacacctgaactttgtcgattgcttgggttgtcgcagaaaatgccaggtgtcattgaagttctggtggaaagtggaagacctattgatgcaattaatttggcttatgtgtttgagcttactgaacaatttgaaccagtacaccttcttaaagcatatctaagggatgttaagaaaatgtcacacgccaggaatgtcaaaacttctcctggagcacagaatgagatgaatgaacgtgagttatctgcgctgaaatctgtcattaagtgcattgaagagcacaaacttgagcagcagtaccctgtggatccacttcagaaaagggttttgcagctagagaaagcaaaggcagacaagaggatggctgttgaagcagcaaagccgcagtccaagaggcctcgtgccaatggatcggcctttgcaacccgtgctacaggctttgctgacaagagcttctactcagcaaccccagagaggcatccattcaatccttgcgagaggcagtttgtgtatggcgctgaggttcatcttcctcccatgatgacctcagcgtcttacacgatgcaacctgcccatggaccttattacggtaatggctacccagttcagtaccaggtctcgtatatccactaatggagacagccaggtgcaggtgctctttcctaacaatctagcttaacctgctgctctttgctgtagtcgtatcagttactctgcaagtttccctagctggaaatatttggaccactcaatgtgtgtgctctgagtggctgttgtggtaattttatgccctaatgacatgacataaattactcctaatatttagctatcgatgaatctcccaatgtacttcattcggcttgtgaaatgcctgtcactgaagaagcgcccaggggcatgaaaatatcatgtcgtcatggacgcctgccaaactgtcagttgcatcctgactggttgttgtttttagtttggtgtatcttttatgcccaagtatatttgctgagttatcatcttc

SEQ ID NO: 143308 - DNA, 2227 bp, Zea Mays
cccagcacaaatggccaaaagacagtggatctggctaaacctcccgtggatccagcgtggcgtgattccattggctccctggatatccctcctccctctcgcgcttgcagcaaaatccaatgcttcgctctcgcttctgcagattgctcgctccccaaaaccttcacaaaaaaagccacccaaaaaaatccgtttcataactgaaaaaatcaaatagaaaaatcaagtgaagccggtaaagaaaaaaatggcagtggttggcctatccagtgctttcgctcctctcagaggttcttggatagccgtaaggatcaggcagggtggccaacgtgcagggatcagcttgtgtccatctccaaggagcaggaggagctgcgcggcagtggttcgggcggaggtgagcttcgtggacgccgacgaggcgaagaggctcgtgggcgaggagggctacacggtgctggacatcagggacagggcgcagcgcgagagggcacacatcaagtcctccacacacgtgcctctcttcattgagaaccaagacaacgacattgggaccatcgtgaagcgccagctgcacaacaacttcgcggggctcttcttcgggctgcccttcaccaagctcaacccggacttcgccctgacagtcaaggacaagttctcgccggaaagcaagctgctggttgtctgccaggaaggtctcaggtcagcagctgctgcagatgcactggagaaagaaggcttccaaaatattgcatgcatcacatcaggtcttcaaacagtgaagccaggaacgtttgaatctgtggggaaaagtgagctgcagaacgcggggaaagctggccttgtgaccatccaagggaagatttctgtagtccttgggactgtattgattagtgcctacctgtttataacattcttcccagaccaggctgagaagctttttgacttggctggcatcagcttgtgatcagagctgatgttcttcggtactccacttcataatcaggtcatcatttgcatctgttcgctgaaattatgtcagaattatgtttatccagagatccctgtcctctccaaaatagaaacgttacaattatttgatgtcgatacgagttacatcttgattctgaggttccttcatgtatttcaattctactttggagttttctaatgaatttgacatgactgctcaagttaatgctagaatgcctctaacaattcatttgacatgcaaaagtgcaaatgcccttgctttattgtaataacatcataaactcccttcttcataggtagtaagaccaaaaaatgcttttagatgctaactagggaaaaatactatttgatactcataaacttgtaatagtaccaaaaacaatgtgttctgtggcaagccacaaaactagttcaggttttgattttcacccaaggagctaaggtactattcttttacaaataagatgataatcattgcagaatctgggtaaatgctcaatatgaactaattgtatataatttccatttcctgtaggatggttgatcaagtcagattcactcagatgtttccagactgaaaaggaatttttgctctgtgtactattagggaattcttgagagattagcacttaaattctttgaaacatcccttttctcgatgtacctcctatatatatcgtatgcttgattcatctacatgtttgtgttgctttttgaagtatctagacctgcagttatgattcaggatttcaaatagaagctttttatccatctaatcatgctcatccacttgagaacattgaccctgaaagattatgtagaccttgataccaattgcagttgcagatgaaatgattgtcttgtgtaatggtgtaataatagatcttgcactttttggggtgtgttagcgtcaatctgggtgccagtcactgggagttgttccgctcggtgggctctctgtggcggcgcggacggtccgcgacttggacagtaggagcagggttccctgtgccgagccagacggtctgcgctgcgctgggctggcggcgttcagcaacgacacctggaatctcgccctccgagagggaccttgtcaggaaggagagatcctagggtttatcttgggatcgataggccacccaatatgtctctagatgatgtagagtcacataggtgaagattgggataaagaagactatgttactggactcctagggcaagaatgtaaagaaat

SEQ ID NO: 143309 - DNA, 1027 bp, Zea Mays
cattggctccctggatatccctcctccctctcgcgcttgcagcaaaatccaatgcttcgctctcgcttctgcagattgctcgctccccaaaaccttcacaaaaaaagccacccaaaaaaatccgtttcataactgaaaaaatcaaatagaaaaatcaagtgaagccggtaaagaaaaaaatggcagtggttggcctatccagtgctttcgctcctctcagaggttcttggatagccgtaaggatcaggcagggtggccaacgtgcagggatcagcttgtgtccatctccaaggagcaggaggagctgcgcggcagtggttcgggcggaggtgagcttcgtggacgccgacgaggcgaagaggctcgtgggcgaggagggctacacggtgctggacatcagggacagggcgcagcgcgagagggcacacatcaagtcctccacacacgtgcctctcttcattgagaaccaagacaacgacattgggaccatcgtgaagcgccagctgcacaacaacttcgcggggctcttcttcgggctgcccttcaccaagctcaacccggacttcgccctgacagtcaaggacaagttctcgccggaaagcaagctgctggttgtctgccaggaaggtctcaggtcagcagctgctgcagatgcactggagaaagaaggcttccaaaatattgcatgcatcacatcaggtcttcaaacagtgaagccaggaacgtttgaatctgtggggaaaagtgagctgcagaacgcggggaaagctggccttgtgaccatccaagggaagatttctgtagtccttgggactgtattgattagtgcctacctgtttataacattcttcccagaccaggctgagaagctttttgacttggctggcatcagcttgtgatcagagctgatgttcttcggtactccacttcataatcaggtcatcatttgcatctgttcgctgaaattatgtcagaattatgtttatccagagatccctgtcctctccaaaatagaaacgttacaatt

SEQ ID NO: 143310 - DNA, 891 bp, Zea Mays
cgagggcgacggaggcagggtcactcgaaaggagaggcagcgcatcgccgccgtgcacaacgccgtctggaacacccccccccccccccccccccccccccccctcgctccaccggtcgccactcgtctgacgggagcatggagggttctaacttgaaaggtttggtagatgatgaaattgtcgtgaagacaggcaaagctgcaggcatcggtttagcttttggcagtgtgtatggtgcactacattctatgttgtttgatggacctcaggttggcaataatgtcaagtatccccagctgatcagaactaccaaggtgtgtgggcattatgccgcaagcttagcggtttttggagctacatttgtaggtgtcgagcaggctcttgcaaggtacaggatgaagaaggacatcattaatggtgctgttgcaggttttgctgctggtgcttctctgggtttcagtgctggaagcttccgggcagcattcttttcaggctctgcagtcgctttgacatctgtagtgctggatgtcaccggaacgaaaactactgatgaagaagaaaaaggccagcactagccaccctgagatatggaagagtactatctgtttcagaggagtttcatctctaaagaaatgctagtagagtagtagtataggcggcagtgaggatttcttaaccatcgatactagcacacaaacgtactactccctccgttttttatttatttatcgtgttttagtttaaagtgggcgacaaatattcgagaatggaggtagtatgttcataatagaggtagtaggttgtatacttcgctggggtcatggtctgaggtagttggttgtttcttcctgacgtatgctctatgcttaagaatgtatatcccttctgtg

SEQ ID NO: 143311 - DNA, 392 bp, Zea Mays
accctgatgcttgtaaccgccactgcccctatcacctggttgttgccgatcccagcgcccagatgcaaagccccccggcgcggctcttaccggcggcccggcacggtgctagcctgcgcagctagcgcggcgtgcggcggccagccaaccgacgaccgtggcagcccgcggcgcgacccggccagccgcccctattttcccttgcgtgcggccaaccagcatagcgcgcgcggcagcccagcgtggctcggccatggcggcctgcgcggccctcggcgcccagtgtgagtccggcagccggcgggtgagcagccccgtgacgatcgtccccggaagttcccggcgcccgttcctggcctgtacgcgatcgccgaggtacaaattcttgcatc

SEQ ID NO: 143312 - DNA, 262 bp, Zea Mays
tatatattcgttctctctgatttgaatctagtatcaagatataaattaggtttaatttggtcaaactaaaatgacattatcaactacataggagatttcttttgatataattgagacccaataaattcatctgctacccgaatgctcggagtagagcaagaaataatggaccagaccacgtcattatctttgaacacgatttctcagataacacacggggtcaagattattttgaactgaaactttatttgttgaattctaa

SEQ ID NO: 143313 - DNA, 90 bp, Zea Mays
gaaacggatttaggcaagagttgttacgctggagagaaagcaatgggcaaacagcggatgatttgcatgctgacatcagcgtggcagtgg

SEQ ID NO: 143314 - DNA, 186 bp, Zea Mays
aaaaagaattcaacctcaaagaagtcagcaaattgtgtggaagaccagcatattcatattatgaccagatctgttgggcacgtcgcaatctccttgctttcacacataggctcagaagaaaaccaaggcttgtccgagaaacattaagtccaagctctttgacagcatgaagcaacaccaattagg

SEQ ID NO: 143315 - DNA, 1308 bp, Zea Mays
atggagaaacgcactagagttggtgtaggatctgagactggaactgttgtctactcttttggcggcaacaaggatgggcatcccttgcaaggggaatatgcctccttctccgatgacaacagtggtgggtggtgcctgagagacaaggttgttggatctagatgctggccattgatatcacggtacagagcatctgtgcgcacccagtctccaaaggtagagatgattgattctctatttaagccactggatgatgggaaggatgatggcataatgagggaacttctactagacttctaccaaaccagtcaacaaagaaagcctaagcagataatcatcttcagggatggtgttagcgagtctcagtttagccaagtactgaacgtagaacttaatcaaattataaaggcatatcagagtatgggacagggggaccttccgaagttcacagtgatcattgctcaaaagaatcaccacacaaaactcttccaagctgattcaccagagaacgttccacctgggactgttgtggactccggcatagttcatccaagacagtatgatttctacatgtgtgctcatgccggaccaattggtacttcaaggccaacccattaccatgtgttgcttgatgagattggcttctctgcagataatctccagaagctagttctttcactttcatatgtgtaccagaggagcaccactgcgatttctgtggtggcacctatctgttatgcccacctcgcagcagctcagatgggccagttcatgaaatttgaagagtttgcagatacgtcgtcagggagtgtcaattcatcatcgccaccatcaataccagaattgccacggctgcatgctgatgtctgcagttccatgttcttctgttgacgtgattttagtttgaccgttgtggggtagggccaattctttgtgaaaggaaccttaccttatatgttggcacacagcaggctaaccgtttttgtgaagaaaccatgtaggtcgttagttgtcgtatatcgcacgcgtgcatctttttggagcggttttcggctccccccacccacaggtggcggttccgttaggtacagtttccagattttaacgatgctaatacagtaaaagcagtttgtacattctacgcagattttgcagggatacgtggttagatgatctttttgttatgcccagaaatacgtgtgcattggggggttatgaaagtgagctaaatttctgtgcctcgcatggcatccaattgtactcggagattgtgtttgtgctcgatacgcttcctgccactgaaatgcg

SEQ ID NO: 143316 - DNA, 117 bp, Zea Mays
atgaacgtcgacgagcagggagcgagccgggacagggggttcgacgggcagggaacggcgcgatcgtcggtgagcgttcggacgaagctccggctggggggggggacgatacagtag

SEQ ID NO: 143317 - DNA, 2478 bp, Zea Mays
cgaactgctggaccggagatggcctaaacatagggtttagaccgttgccgtccctactcccgcctagccgaccccactcgtcccagtcccagtcccagtccgccgcctggttccttcttgctcttccctccactctctacagacgcagattgacaaggaagagagagagaggccgaggggaggaggcgtcgtcgtcttcttctgaatgcctgaacttttatttggattccagatagtatggctgccaaaatggctggagctgtccaagtgctcaaggatgacactgttaaacgcacacccatggcacgacctagtaacggccgtgaaggaaagcccattaggttgctgtcgaaccacttctcagtgaagcttagaggagttgatgctgttttctaccaatacagtgtctgcatcaaatctgaggatgataaggtggttgatagcaagggtattggccgaaaggtcatagataaactattgcaaacatactgttctgagcttgatgggaaggattttgcatatgatggagagaaatgtctatttactgtgggacctcttccacagaataactttgagttcactgttatcttggaggaaacatcttcaagggctgctggtggaagtccagtgcatgaaagccctactcaagctaacaaaaagcgagtcaagcgatcacatctggcaaaaaagttcagtgtagacataagttatgccgcaaagattcctcttcagtcggttgctttggctcttcgaggaagcgagtcagaacatggtcaagatgttctgagagtccttgacgttgttttaaggcaacagcaggctaagagaggttgtctacttgttagacagtcatttttcagtgatgatagtcgaaaccttgttgatttaactggtggagttagtggttgtcgtggactccactctagtttccgtactacaattggtggtctttcactaaatatggatgtttcaaccactatggttgtaactcctggaccagttattgattttctcgtcacaaatcaaaatgtaagagacatcagagatattgactggcccagggccaagaaaatgcttaaaaatctcagagttaaagctaagcacaacaacatggagttcaagattattggccttagtgatcaaccatgctctagacagatgttcccaatgaaagttcgaaatggaaacatcgaaattaaatctgttgatatcactgttcaggattattttaaatccaagcaagttgagctaacaatgccttatctgccatgtcttgatgtgggaaaaccaaaacgccctaattatctcccaattgagttatgccacatggtatcacttcaacgttatacaaaggcactgtcttctcaacaaagggcaatgttggttgaaaagtcacgacagaaacctcaagaaagaatgcgagttgttacagatgctgtaaaaagtaatatgtatgatgatgatccaatcttatcttcatgtggtattgaaattgagaaacaacttactcgtgttgacgctcgtgttctctctgcaccagcgctagttgtgggcaacagtgaagattgcatcccaaacaggggtaggtggaactacaataataagaggctattcgatccagtcaagattgagcgttgggccattgttaatttctctgctcgttgtgacatgagccgaatctcaagagaactgataaactgtggacgcagcaaaggcattttcattgaatgtcctcacagtttggtggatgaggacagccagtctaggagatgttcacctgtggaaagggttgaaaagatgtttgaaaaagtcaaagcaagccttcctggtcctccagagtttctcctttgtcttttaccagagaggaagaattgtgatatttacgggccatggaagaagaaaaatcttcatgaaatgggtattgtcactcaatgcattgctccaagtaataagatgaatgatcaatatttcaccaatgttcttctaaaaattaatgctaagcttggtggaatgaactccaaactggcactggaacatcgtcaaatgataccagttgtgactcaaataccaacattaattcttggcatggatgtttcacatggttctccaggtcgagcagatataccatcaattgctgcggttgcccacaacaactcgcgtaacagcagcctgctacgcaagctgcgcctccctcttaggcatatgccccctactggcggcaacaacaaagggaagggcaaaggaagatgcgccaacgaccactcctccagcgacaaccatgaccttggcaccgagagcatcaacaccccatggctatcgttcgacaagccgtgcacgggcatgatcaccatgtggcacagaccacgtccccctctacaacaacatgtgcaccctcatcaacatgccctgatggctgtctcgccccacctggcgcctaaatgggaggggtttagtttattagcgtgttgtggcggttga

SEQ ID NO: 143318 - DNA, 885 bp, Zea Mays
atctttccatcattcatcctttcttctccaacacccgtcactctcttctccaactccaagatgtcggccgccaccgccctgcttcatcgaggcccaagacccaatgtctatttttgataaagaaatcaaacagcaacctagcagtcttccttcacttctctgcttccgacctcgtagcgaatcagatcggggggctagggttccagtgcgcctctacaaccagacgcgaggctaggctgggcatggagggaatcgtcacggcccgaaagaggtcccggccagagacggcgaacggggctgccgccgccgggaagcgctccaaagatcagtgtggatgcctctctggccggtggcataatcgacaagggtggggtcaacactaagcagataagctgagttacatgcgtcaagctatccatccgtgaccaccagtctaaccccaacctaaagaacatcgagctggaaggcaattttgaccagatcaagcaagccagcgacttggtgtgtgatctcatcgcaaccatcaacgcaagcatgccagcgaaaaatccatcttccgctgtggtgccagcaggaggaggccgaggcagtggtccggggggaacgagcagcaactacaagacgaagttgtgcgagaacttcttgaagctatgcgagaacttccaacgactatgtatgagatattgtctcttattatgactagatgagatgtgttttatggctatagatgagacttttgtgatgtaattgatgagactatggatttaaatattgttatgtgattgtgtgtgagatgttttatgtgaaaatatgttgtgctatagttgttgatatatttgttatgttgtggaatgtggtgtaaaataaaaataaaaacatttgtaa

SEQ ID NO: 143319 - DNA, 1295 bp, Zea Mays
atctctctgccgctcctctctattgtttatccccagctggccaagcttccccagctccctctcccatggcagtagtgctccctctgcctggtcgctcgctcttcctcaagcttagctcactgcgcgttgctctagctcgcggagcttcctagatcgcccctccgcgcaccacttcaagctcgccggcgttcggaccgcggcttcctcctccagctccggcgcccggcgtttctcccaggcgcgccccctgaattccctccaccacgccctgccgagattcccccagccgcgcactccttctctacgctcctctctctctctcccagcgctccctccctgctcgctcctccctcagctcgtctctctctctccgctggtcgcgcccttgccctgcttccatggctgcgcgtccctctactagccgagcttcctgtacgcccagagcgtgcccagctgtgaatctcccatggcgcgcacatctccctgctcagtaatccagcgcgcgtgccttgctcctgtgcatgctcgccggccggagctccctagcgcggtcgcccatgccgtgcgcagccaagctcgccctgtgcgccccatctcccttcggatcccctgaaagctccttgcgcgggccacgttcctctactcggccatggccgcgcgctggcgctcttctctgcgcgcgccctgtcttttcccacgcgcagctcatcccaacgtcgagctcggccctgccctctgctccagctcgcccctctctacttgtcctcgctgttgggccagtctacagctcgcagtccctgcgttgccgagtccctggccgcgtctgtgtggttgtgttctttcgtgggaacgctcactttgtcgtggtcctgcgctctctgctcggtccagcgtgggttttagttgtcggtcgagcgcgcccctgtttcctttgtcttaccgtcgtcgttcggtcaccctgcctcgatgtcggtccctacgtgatgtctccgacttgtgttcgcgctgacaaaagaatcccaagaagatgtagagaagcaagcccctggtcgatgccccaagtgctcggcgaaaggccagaacaagaatcatcgccgtttatgcggagttctagttaatatggagagattccaagagttgtgaatgtaagataagtccgtgcaacaattgctgggagctcgaccggatgtctaaactgagcaccatcgtcgccctcgcggttatcaaatcgattttatcatggtgagccaatttattatttcatataattgaattggatagttatatagccacaa

SEQ ID NO: 143320 - DNA, 3495 bp, Zea Mays
cccaaaccccatcaccattgtcaccattgctcgccgaaccctagagagggcgcgggggcggataccttagctagccatggtcatcgccgttgagggcaacggcttcgtccacgacgacgaggaggacgacggagaccgccccatccgctaccttcccctcggccatatctactcctcttccacccccgcccccgcaccgcgcccgccggcccagaagaagccccgcttcgacgacggcagaccccccatgaaagtatattaccgccgccgtcgcaagaagctgcgggtcgatgaatcgctgtcgccgccctcgccaacgacggccccactcgcgccgcccgagagggacgagaaggctgggccctcgcgccggaaagactccctcaagcacgagctgctcagcctgggccccgcctcacctgcattggatggggaggagccggaacggcgtctaggacgaacgaggcgctgcggaggggctgaaaagacggtttgcttctcagaacctgagaggcggcggcagccggccaggcccaaggggtcggtcgggaggagatgggtcgagttggatattcagactgcggatcctaatgcctttgtcggattggtgtgcaaggttttctggccgctggatgatgattggtacaagggctccatcgcatggtacaatgaggcaaccaagaagcattcagtaaagtatgatgatggtgaagcagaggaccttagccttgcagatgaaaggataaagtttttcatctcctctgaagagatgaagtctttgaatctgaaacttggaatttccaatcaggataagaaggggcatgatgagttgcttgcacttgctgttagctttcatgactatcagggtctcgacccaggtgaccttgtgtgggcaaaaattacaggtcatgcaatgtggccggcggttgtggtggatgagtcaaatgtacctgcaactcgagctttgaagtcaattcggttggaccaatcaatattggtccaattctttggcactcacgattttgcaaggattaaattgaagcaagctgtgccgtttctgaatggtcttgtttcttctttgcatctcaaatgcaagcaagcaagtttcagtcggagcttagaagaagcaaaagaatttctccacacacagcagcttcctgaaattatgttgcagcttcggaaatctgttcaacatgatgtctctgatgttaattcctatgagggcaaggtagactcttgcagtaatttatcagaagctctagcattgcaaaatggagaggatgctgagatgactcaaatagaactagggaaccttcgtgtgagcaatttaggtaggatagtatctgactctgaccatttccataacaaaaaggatatatggcctgaaggatatactgctttcagaaagtacatgtcaatagaagacccacatgcagtaacattgtacaaaatggaagtacttaggaactctgatacaaaagcacgcccgttgtttagggtgatctcagaagacggggtgcagattgatggatctaccccaaatgcgtgctggaaagagatataccgcagaataaaggaaaaacagtgcactgaattggaaagaaacgtatgccaaagttctggttcctacatgtttggcttttcaaatccgcagataagacaacttattcaggaactgcccaatgcaaggtcatgtttgaaatattttgagaatggtggggacactatcctgggttatagagcggttcaggttaattggaaagatctggactattgcaatgtttgtgatatggatgaggagtatgaagacaacttattcttgcaatgtgacaagtgtcgtatgatggttcatgctagatgttatggtgaacttaaacaattggatggaggactttggctttgcaacttgtgtcgaccaggtgcacctcgtgtgtctccaaaatgctgtctatgtccagtcacaggtggtgcaatgaaacctacaacagatggccgttgggctcatctcgcatgtgctatatggatccctgaaacatgcttaaaggatgtaaagagaatggaacctattgatggactgagcagaatcaacaaggaccgttggaaacttgtatgcagcatttgcggagtttcatatggagtttgtatacagtgttctcatcctacctgtcgtgttgcgtatcaccctctttgtgcacgtgctgctgacctttgcattgaggtagttcagacagatatggcttcatcatctggttgtgcaaggaccgaaccctataatttacacaggagaaggggccaaaagcagccacaagttgtcgctactgcttctctgaaacgtttatatgtggagaatagacctcatattgtcagtggctactgccaaaacagagtaggcaatacatgcggagaatcaattcaaccgtttggtttgtcagatgctgtgcagcaagaagctattggcaatgtgtcttctatggttgaaaaatatacaatcgtgaaggctacatttaggaagagactaacttttggaaaatcaaaaattcatggatatggtgtctttgccaaggttgcacacaaggccggagatatgatggttgaatacataggggagattgttagaccaccgatatcagacactagagagcggcgaatttacaactcactagtgggtgctgggacatatatgttcaggatagatgatgaacgtgttatagatgccactcgggttggaagtatagcccgtctgatcaatcactcatgcgagcctaattgctattcacgtgccataactattcttggagatgaacacatcatcatttttgcgaaacgggacatagatccatgggaagagctgacatatgattataggtttttttcaagtgatcaacgacttccatgtttttgtggattccccaaatgccgtggagtagttaatgatgttgaggcagaggaacagtcggctaaaatcagagttaagagaagtgaattatttgaaaaaagtgaaaagtaaaggtacatcatattggttgggatatgacatgcttgtgtgatatgcttgccagtgcctaaaggcaaattctaaaaaatggttgagtttcattcttgaatcctgataattcttctcattatttgagtggaagacgaatctaattgtataggtacccaatataggatcggcaatccaatttggggacataagttgaatcaattgtcgtgtaccattgaaatgttagttgttacacatatttcggccatttatcttgttgaacctaccctattttcaaccgttggagctgggaatcggaggggtggtttggttaaatgatttgagatggcctgccatgtgtaatgtaatcgaagtacatggttgcacttttcggtgttgcccatatattatccataacaatatgtagtttcagctgttctgcatttacgaaaatgcattggaagagaaacgtccacttcaactgaatgtattctacgaaatctttatttatg

SEQ ID NO: 143321 - DNA, 3720 bp, Zea Mays
cccaaaccccatcaccattgtcaccattgctcgccgaaccctagagagggcgcgggggcggataccttagctagccatggtcatcgccgttgagggcaacggcttcgtccacgacgacgaggaggacgacggagaccgccccatccgctaccttcccctcggccatatctactcctcttccacccccgcccccgcaccgcgcccgccggcccagaagaagccccgcttcgacgacggcagaccccccatgaaagtatattaccgccgccgtcgcaagaagctgcgggtcgatgaatcgctgtcgccgccctcgccaacgacggccccactcgcgccgcccgagagggacgagaaggctgggccctcgcgccggaaagactccctcaagcacgagctgctcagcctgggccccgcctcacctgcattggatggggaggagccggaacggcgtctaggacgaacgaggcgctgcggaggggctgaaaagacggtttgcttctcagaacctgagaggcggcggcagccggccaggcccaaggggtcggtcgggaggagatgggtcgagttggatattcagactgcggatcctaatgcctttgtcggattggtgtgcaaggttttctggccgctggatgatgattggtacaagggctccatcgcatggtacaatgaggcaaccaagaagcattcagtaaagtatgatgatggtgaagcagaggaccttagccttgcagatgaaaggataaagtttttcatctcctctgaagagatgaagtctttgaatctgaaacttggaatttccaatcaggataagaaggggcatgatgagttgcttgcacttgctgttagctttcatgactatcagggtctcgacccaggtgaccttgtgtgggcaaaaattacaggtcatgcaatgtggccggcggttgtggtggatgagtcaaatgtacctgcaactcgagctttgaagtcaattcggttggaccaatcaatattggtccaattctttggcactcacgattttgcaaggattaaattgaagcaagctgtgccgtttctgaatggtcttgtttcttctttgcatctcaaatgcaagcaagcaagtttcagtcggagcttagaagaagcaaaagaatttctccacacacagcagcttcctgaaattatgttgcagcttcggaaatctgttcaacatgatgtctctgatgttaattcctatgagggcaaggtagactcttgcagtaatttatcagaagctctagcattgcaaaatggagaggatgctgagatgactcaaatagaactagggaaccttcgtgtgagcaatttaggtaggatagtatctgactctgaccatttccataacaaaaaggatatatggcctgaaggatatactgctttcagaaagtacatgtcaatagaagacccacatgcagtaacattgtacaaaatggaagtacttaggaactctgatacaaaagcacgcccgttgtttagggtgatctcagaagacggggtgcagattgatggatctaccccaaatgcgtgctggaaagagatataccgcagaataaaggaaaaacagtgcactgaattggaaagaaacgtatgccaaagttctggttcctacatgtttggcttttcaaatccgcagataagacaacttattcaggaactgcccaatgcaaggtcatgtttgaaatattttgagaatggtggggacactatcctgggttatagagcggttcaggttaattggaaagatctggactattgcaatgtttgtgatatggatgaggagtatgaagacaacttattcttgcaatgtgacaagtgtcgtatgatggttcatgctagatgttatggtgaacttaaacaattggatggaggactttggctttgcaacttgtgtcgaccaggtgcacctcgtgtgtctccaaaatgctgtctatgtccagtcacaggtggtgcaatgaaacctacaacagatggccgttgggctcatctcgcatgtgctatatggatccctgaaacatgcttaaaggatgtaaagagaatggaacctattgatggactgagcagaatcaacaaggaccgttggaaacttgtatgcagcatttgcggagtttcatatggagtttgtatacagtgttctcatcctacctgtcgtgttgcgtatcaccctctttgtgcacgtgctgctgacctttgcattgagcttgaaaatgatgacaaaatccatcacatgtatcttgatgaagacgaggatccttgtattcgtttactctcgtactgcaaaaagcatagacagccttctgctgctgaacgtccatctttagaaagtgatcctcctgaacccattcaggtagttcagacagatatggcttcatcatctggttgtgcaaggaccgaaccctataatttacacaggagaaggggccaaaagcagccacaagttgtcgctactgcttctctgaaacgtttatatgtggagaatagacctcatattgtcagtggctactgccaaaacagagtaggcaatacatgcggagaatcaattcaaccgtttggtttgtcagatgctgtgcagcaagaagctattggcaatgtgtcttctatggttgaaaaatatacaatcgtgaaggctacatttaggaagagactaacttttggaaaatcaaaaattcatggatatggtgtctttgccaaggttgcacacaaggccggagatatgatggttgaatacataggggagattgttagaccaccgatatcagacactagagagcggcgaatttacaactcactagtgggtgctgggacatatatgttcaggatagatgatgaacgtgttatagatgccactcgggttggaagtatagcccgtctgatcaatcactcatgcgagcctaattgctattcacgtgccataactattcttggagatgaacacatcatcatttttgcgaaacgggacatagatccatgggaagagctgacatatgattataggtcagaaggttaagattttgctttttgaccttttgaacatcatagttttgtacaaaatgttgtccatgctttcttcaggtttttttcaagtgatcaacgacttccatgtttttgtggattccccaaatgccgtggagtagttaatgatgttgaggcagaggaacagtcggctaaaatcagagttaagagaagtgaattatttgaaaaaagtgaaaagtaaaggtacatcatattggttgggatatgacatgcttgtgtgatatgcttgccagtgcctaaaggcaaattctaaaaaatggttgagtttcattcttgaatcctgataattcttctcattatttgagtggaagacgaatctaattgtataggtacccaatataggatcggcaatccaatttggggacataagttgaatcaattgtcgtgtaccattgaaatgttagttgttacacatatttcggccatttatcttgttgaacctaccctattttcaaccgttggagctgggaatcggaggggtggtttggttaaatgatttgagatggcctgccatgtgtaatgtaatcgaagtacatggttgcacttttcggtgttgcccatatattatccataacaatatgtagtttcagctgttctgcatttacgaaaatgcattggaagagaaacgtccacttcaactgaatgtattctacgaaatctttatttatg

SEQ ID NO: 143322 - DNA, 3358 bp, Zea Mays
cccaaaccccatcaccattgtcaccattgctcgccgaaccctagagagggcgcgggggcggataccttagctagccatggtcatcgccgttgagggcaacggcttcgtccacgacgacgaggaggacgacggagaccgccccatccgctaccttcccctcggccatatctactcctcttccacccccgcccccgcaccgcgcccgccggcccagaagaagccccgcttcgacgacggcagaccccccatgaaagtatattaccgccgccgtcgcaagaagctgcgggtcgatgaatcgctgtcgccgccctcgccaacgacggccccactcgcgccgcccgagagggacgagaaggctgggccctcgcgccggaaagactccctcaagcacgagctgctcagcctgggccccgcctcacctgcattggatggggaggagccggaacggcgtctaggacgaacgaggcgctgcggaggggctgaaaagacggtttgcttctcagaacctgagaggcggcggcagccggccaggcccaaggggtcggtcgggaggagatgggtcgagttggatattcagactgcggatcctaatgcctttgtcggattggtgtgcaaggttttctggccgctggatgatgattggtacaagggctccatcgcatggtacaatgaggcaaccaagaagcattcagtaaagtatgatgatggtgaagcagaggaccttagccttgcagatgaaaggataaagtttttcatctcctctgaagagatgaagtctttgaatctgaaacttggaatttccaatcaggataagaaggggcatgatgagttgcttgcacttgctgttagctttcatgactatcagggtctcgacccaggtgaccttgtgtgggcaaaaattacaggtcatgcaatgtggccggcggttgtggtggatgagtcaaatgtacctgcaactcgagctttgaagtcaattcggttggaccaatcaatattggtccaattctttggcactcacgattttgcaaggattaaattgaagcaagctgtgccgtttctgaatggtcttgtttcttctttgcatctcaaatgcaagcaagcaagtttcagtcggagcttagaagaagcaaaagaatttctccacacacagcagcttcctgaaattatgttgcagcttcggaaatctgttcaacatgatgtctctgatgttaattcctatgagggcaaggtagactcttgcagtaatttatcagaagctctagcattgcaaaatggagaggatgctgagatgactcaaatagaactagggaaccttcgtgtgagcaatttaggtaggatagtatctgactctgaccatttccataacaaaaaggatatatggcctgaaggatatactgctttcagaaagtacatgtcaatagaagacccacatgcagtaacattgtacaaaatggaagtacttaggaactctgatacaaaagcacgcccgttgtttagggtgatctcagaagacggggtgcagattgatggatctaccccaaatgcgtgctggaaagagatataccgcagaataaaggaaaaacagtgcactgaattggaaagaaacgtatgccaaagttctggttcctacatgtttggcttttcaaatccgcagataagacaacttattcaggaactgcccaatgcaaggtcatgtttgaaatattttgagaatggtggggacactatcctgggttatagagcggttcaggttaattggaaagatctggactattgcaatgtttgtgatatggatgaggagtatgaagacaacttattcttgcaatgtgacaagtgtcgtatgatggttcatgctagatgttatggtgaacttaaacaattggatggaggactttggctttgcaacttgtgtcgaccaggtgcacctcgtgtgtctccaaaatgctgtctatgtccagtcacaggtggtgcaatgaaacctacaacagatggccgttgggctcatctcgcatgtgctatatggatccctgaaacatgcttaaaggatgtaaagagaatggaacctattgatggactgagcagaatcaacaaggaccgttggaaacttgtatgcagcatttgcggagtttcatatggagtttgtatacagtgttctcatcctacctgtcgtgttgcgtatcaccctctttgtgcacgtgctgctgacctttgcattgaggtagttcagacagatatggcttcatcatctggttgtgcaaggaccgaaccctataatttacacaggagaaggggccaaaagcagccacaagttgtcgctactgcttctctgaaacgtttatatgtggagaatagacctcatattgtcagtggctactgccaaaacagagtaggcaatacatgcggagaatcaattcaaccgtttggtttgtcagatgctgtgcagcaagaagctattggcaatgtgtcttctatggttgaaaaatatacaatcgtgaaggctacatttaggaagagactaacttttggaaaatcaaaaattcatggatatggtgtctttgccaaggttgcacacaaggccggagatatgatggttgaatacataggggagattgttagaccaccgatatcagacactagagagcggcgaatttacaactcactagtgggtgctgggacatatatgttcaggatagatgatgaacgtgttatagatgccactcgggttggaagtatagcccgtctgatcaatcactcatgcgagcctaattgctattcacgtgccataactattcttggagatgaacacatcatcatttttgcgaaacgggacatagatccatgggaagagctgacatatgattataggtttttttcaagtgatcaacgacttccatgtttttgtggattccccaaatgccgtggagtagttaatgatgttgaggcagaggaacagtcggctaaaatcagagttaagagaagtgaattatttgaaaaaagtgaaaagtaaaggtacatcatattggttgggatatgacatgcttgtgtgatatgcttgccagtgcctaaaggcaaattctaaaaaatggttgagtttcattcttgaatcctgataattcttctcattatttgagtggaagacgaatctaattgtataggtacccaatataggatcggcaatccaatttggggacataagttgaatcaattgtcgtgtaccattgaaatgttagttgttacacatatttcggccatttgagatggcctgccatgtgtaatgtaatcgaagtacatggttgcacttttcggtgttgcccatatattatccataacaatatgtagtttcagctgttctgcattt

SEQ ID NO: 143323 - DNA, 3680 bp, Zea Mays
cccaaaccccatcaccattgtcaccattgctcgccgaaccctagagagggcgcgggggcggataccttagctagccatggtcatcgccgttgagggcaacggcttcgtccacgacgacgaggaggacgacggagaccgccccatccgctaccttcccctcggccatatctactcctcttccacccccgcccccgcaccgcgcccgccggcccagaagaagccccgcttcgacgacggcagaccccccatgaaagtatattaccgccgccgtcgcaagaagctgcgggtcgatgaatcgctgtcgccgccctcgccaacgacggccccactcgcgccgcccgagagggacgagaaggctgggccctcgcgccggaaagactccctcaagcacgagctgctcagcctgggccccgcctcacctgcattggatggggaggagccggaacggcgtctaggacgaacgaggcgctgcggaggggctgaaaagacggtttgcttctcagaacctgagaggcggcggcagccggccaggcccaaggggtcggtcgggaggagatgggtcgagttggatattcagactgcggatcctaatgcctttgtcggattggtgtgcaaggttttctggccgctggatgatgattggtacaagggctccatcgcatggtacaatgaggcaaccaagaagcattcagtaaagtatgatgatggtgaagcagaggaccttagccttgcagatgaaaggataaagtttttcatctcctctgaagagatgaagtctttgaatctgaaacttggaatttccaatcaggataagaaggggcatgatgagttgcttgcacttgctgttagctttcatgactatcagggtctcgacccaggtgaccttgtgtgggcaaaaattacaggtcatgcaatgtggccggcggttgtggtggatgagtcaaatgtacctgcaactcgagctttgaagtcaattcggttggaccaatcaatattggtccaattctttggcactcacgattttgcaaggattaaattgaagcaagctgtgccgtttctgaatggtcttgtttcttctttgcatctcaaatgcaagcaagcaagtttcagtcggagcttagaagaagcaaaagaatttctccacacacagcagcttcctgaaattatgttgcagcttcggaaatctgttcaacatgatgtctctgatgttaattcctatgagggcaaggtagactcttgcagtaatttatcagaagctctagcattgcaaaatggagaggatgctgagatgactcaaatagaactagggaaccttcgtgtgagcaatttaggtaggatagtatctgactctgaccatttccataacaaaaaggatatatggcctgaaggatatactgctttcagaaagtacatgtcaatagaagacccacatgcagtaacattgtacaaaatggaagtacttaggaactctgatacaaaagcacgcccgttgtttagggtgatctcagaagacggggtgcagattgatggatctaccccaaatgcgtgctggaaagagatataccgcagaataaaggaaaaacagtgcactgaattggaaagaaacgtatgccaaagttctggttcctacatgtttggcttttcaaatccgcagataagacaacttattcaggaactgcccaatgcaaggtcatgtttgaaatattttgagaatggtggggacactatcctgggttatagagcggttcaggttaattggaaagatctggactattgcaatgtttgtgatatggatgaggagtatgaagacaacttattcttgcaatgtgacaagtgtcgtatgatggttcatgctagatgttatggtgaacttaaacaattggatggaggactttggctttgcaacttgtgtcgaccaggtgcacctcgtgtgtctccaaaatgctgtctatgtccagtcacaggtggtgcaatgaaacctacaacagatggccgttgggctcatctcgcatgtgctatatggatccctgaaacatgcttaaaggatgtaaagagaatggaacctattgatggactgagcagaatcaacaaggaccgttggaaacttgtatgcagcatttgcggagtttcatatggagtttgtatacagtgttctcatcctacctgtcgtgttgcgtatcaccctctttgtgcacgtgctgctgacctttgcattgagcttgaaaatgatgacaaaatccatcacatgtatcttgatgaagacgaggatccttgtattcgtttactctcgtactgcaaaaagcatagacagccttctgctgctgaacgtccatctttagaaagtgatcctcctgaacccattcaggtagttcagacagatatggcttcatcatctggttgtgcaaggaccgaaccctataatttacacaggagaaggggccaaaagcagccacaagttgtcgctactgcttctctgaaacgtttatatgtggagaatagacctcatattgtcagtggctactgccaaaacagagtaggcaatacatgcggagaatcaattcaaccgtttggtttgtcagatgctgtgcagcaagaagctattggcaatgtgtcttctatggttgaaaaatatacaatcgtgaaggctacatttaggaagagactaacttttggaaaatcaaaaattcatggatatggtgtctttgccaaggttgcacacaaggccggagatatgatggttgaatacataggggagattgttagaccaccgatatcagacactagagagcggcgaatttacaactcactagtgggtgctgggacatatatgttcaggatagatgatgaacgtgttatagatgccactcgggttggaagtatagcccgtctgatcaatcactcatgcgagcctaattgctattcacgtgccataactattcttggagatgaacacatcatcatttttgcgaaacgggacatagatccatgggaagagctgacatatgattataggtcagaaggttaagattttgctttttgaccttttgaacatcatagttttgtacaaaatgttgtccatgctttcttcaggtttttttcaagtgatcaacgacttccatgtttttgtggattccccaaatgccgtggagtagttaatgatgttgaggcagaggaacagtcggctaaaatcagagttaagagaagtgaattatttgaaaaaagtgaaaagtaaagggtatacgtatgaatcgggatgtgggctctaaagaaatgaacacgatgataaatacaaacttagcgtttgaccatggcaattggtgaaaaaagagtggtacatcatattggttgggatatgacatgcttgtgtgatatgcttgccagtgcctaaaggcaaattctaaaaaatggttgagtttcattcttgaatcctgataattcttctcattatttgagtggaagacgaatctaattgtataggtacccaatataggatcggcaatccaatttggggacataagttgaatcaattgtcgtgtaccattgaaatgttagttgttacacatatttcggccatttgagatggcctgccatgtgtaatgtaatcgaagtacatggttgcacttttcggtgttgcccatatattatccataacaatatgtagtttcagctgttctgcattt

SEQ ID NO: 143324 - DNA, 171 bp, Zea Mays
ctccatggcgcccagaatttttccagctcctcccacggcgcccttcttccccaagagccaggagcagccgctcccatttttcttgcagcgccctgttcgtttttcgtccagccggctcccctttttcacatggccgaacacagctccctgtccatggatgcagcagcagca

SEQ ID NO: 143325 - DNA, 201 bp, Zea Mays
gctgctgcgcagtgccccgtcggtgcttgctatgtgctcgacgaaatgcgcagcaagccacgcgtcgtcgatttcctgcagcagccccggcgtctccgcgctctgcgggctcgctattttataaagcgcagtgaacagcacgccgttgacactagtcggttgtttgctgtttttgcttcaccccgtcgtcgtcgttcaccc

SEQ ID NO: 143326 - DNA, 207 bp, Zea Mays
gctgctgcgcagtgccccgtcggtgcttgctatgtgctcgacgaaatgcgcagcaagccacgtgtcgtcgatttcctgcagcagccccggcgtctccgcgctctgcgggctcgctgttttataaagcgcagtgaacaacacgccatcgacactcgccggttgtttgttgtttttgcgcagccccgtcgtcgtcgtcgttcacccccg

SEQ ID NO: 143327 - DNA, 325 bp, Zea Mays
aaaccaaaaccccggccatctctctactcactcttcctgtctcctcgtcttgctggagccagtattaacagatccgggttcgagcgtccagtctcgccggacctccgactggcggtcgctgctatctctctggtaccgcggtctcttgcgcgcttctctccattcgctcccactcaccggcttgggggaatgaaggatgtggtagggagcccggggacctggagtggcatggcgctgcggttgtcgcaatgcgtgtccgctggcgcatccatgggcgctatggccacagcgtacggcttctccaactacactgctttctggtaat

SEQ ID NO: 143328 - DNA, 512 bp, Zea Mays
aaggtcactgcaattctgtcgtttgctgccgcgtcggcgtccgcgggcgtgaccatcctgttcgagagggacgtccacttctgcaggatgtacccgcagttgtcgtgcggccggtacgcgctctcggtggtgctggcgttcatcacctggtccttcatcgcaacttctgctgtctccatgttctggttgctgccgtcgctctgatgtggcacggaaggagcctgccgtgtcgtcctgtttagatccgtttgcttcagcagctggttgatgccctgggtcgctctgggttgtgtgcttaagtaactatcaggatcctgatcttaaccggatgtactctgctggagacgagaaattatctagtgtatttgttaaaacaatgaggtggtttatcttcttatttctttttttaccttcgatgttgaatgtggtccatcatctttctctatctctactccttaaacacaagttttgtgtgtcgagcgtcgttgtcgtgtatatctgtgtttttcttc

SEQ ID NO: 143329 - DNA, 4027 bp, Zea Mays
gccagcggaaatcgcatcgccctcttcctctttccctcgctgtgcaatctcccccaaactcccctctcgaaccctcgctctcgtcgccagagcaagcaaagcgcagttgctgaaacccgtgcgctgttgatggatgatgaccgttcccatggatagtgctagcgcagccccgtcctctgcgcgggactttgctgagcgtctccttactaggaataatgaacttgaagatcagcttcgcaagtccgcacaatccaaagtcccatcagatcccagcatatggcttcagatgcgtgacaactttgagaagattattctcatagatcatgacctatctgaacagaaagaggtagagtatctcctatggaagttgcattacaaaagaattgaggacttcaggaggagcattagtgctgcaagctcagctgcatctcagagtgggaagagcaacgctaatccagatcgagtcaagagaattaaattaaccttcaaaagcttcctttcagaagcaactggcttctatcacgacttgatgttaaagatcaaatcaaatttgggccttccactcagttactttccagagggcatcgacaatgcaaacaactctgcgcgagatgacaagacaacagtgcagttgaagaaaggtttgatttcatgccatcgctgcctgatatatttgggagatcttgctcgttacaagagctcgcaaggtgatggtgattctgctagccgtgaatacgcagcggcatctagttactacatggaggctgcttctatctatccttccagtggcaaccctcatcatcagcttgctatactagcatcttactcaggcaacgaggtggtagctgtttataggtacttccgaagcttagctgcagatactccttttaccactgcacgtgacaacttgattattctttttgaaaagaatcgccaaagctatagacagctgccagacaacaacaaagttcccagcgctaaggcattacccccacggctatctgggaggggacaaggacggggagaagtaaagtttcagccaaaagatgttaacgcagaagcagctgaaagggaacaggagtgcaatgttcgtgatacattgaaggccttctatatacgatttgtcaggctcactggaattcttttcacgaggaccagtttggaaacatttggggagctgttttcttcagttagcaatgatttgcagattcttctttcttccggtcttgaggaggaccttaatttcggttctgatgctgcagaaaatgcattagctgctgttaggcttactatcatccttatattcacagtgcacaatgtaaataaagaacctgatagccagtcatattctgaacttgtgcaacgcagagtactgctccaaagtgcgtttacggctgcttttgattttgttggacgaattctcagaaggtgttcagaacttggtgatatcacatcaagcttctatctgccagccattctggtctacatcgaatggctggcgtcccatccagagttggctattgactcagagatggaggaacagcatgcaaatgccagatctttcttctggaaccaatgtatctcatttatgaataagttgatccttaccaaccttgcttctatggaggacaatgacgatgaggcttgcttttctaatatgagcatttatgaggagggtgaaactgggaacaggcttgccatttgggaagatcttgaattgagaggttttttgcccttggttcctgcacataccattttggatttctcaagcaaacacacatttggaaatgttggaagcaccaaggagaagaaagcacgggttcaacgaatttttgctgcaggaaagtcactgctgaactttgttcagattgatcagttgaggatatattttgatccatctttgaaaaagtttgtcttggccaagaactctcctgtttctagaactaacacccctcttcatgaatctcctgatgcacttaaaacaaatgggactgaaatggatcacaaggctgctagaagatttgattcagtttcttctaatgtgggctcactgcagtctaaagtgcagttttgtcctgatggtgatgatgaagaagaaattgttttcaagccaacagcttatgagaagttttcaaaagtttcttcagatctgtcagttaatggatacgtccatcctgtaccagtgtctgctgctggtgggccaaccaatgctagtttagtgcctgttcagaacactgcatcaatgtctgcaactcgtttaccatccaatccacatgcaactggtttgccatccaatggtgggtcacttccaagtactgcatctctatcagctgctggtaattacaacactgatcagtcgcttcccaggtcgtctgttggttggactgattgggctgtcaatagtgagcaaaatgttactcctagcattgctccaagatttgaactcatgcagtctgttgaggagcctgtttccagctggacaagcagtggggcacagcatgttggtcctcagcacaagcacacaggtttaactttcccagatgttgtctctgaaccatgtgtatctgcatcaatggttcaatgttttagtagctccgattattcgaaatttctcagagaacaagaaatattcttaatgaatggactgaagactgtcaacataactggaaatggctatctagagcagagattgcagcctggattgagtggtttacagtctatgggttattcatctcagatacctattcaacctggtggtaccactgcaaacctgatgcataatcatgtcaaaattactggagagactgtcccctctacacttgattcagttgtaccttcaatagcaccatcaggtggcatgccaatcaaacttacagaagcaccactaactgcttcgaagaagaaccctgttagtcgtccatcaaagcctgttggaccacctccaggatttaatcatgtaaccccaaagcgtcaagatgattctattccggttgaaaaactgcagaacccacaggtcgatgattacagctggctagatagctatcagcaatcgattgatcatgttcacagcttaagaactatttatcctggtgtcagtgatactagcactgcatttgccactccattctctttccctgggaggatacacacacaagggaccaatgaaaagacttggcaagatttccacctttttgagccttcaaaacagaacatgttccaaacttaccaccaaagaaatctgcaaagtggtcaaatggatgaacaagagccagcaaattctatctggtctagcagttaccatgtgtgatttggtaacttttaccaggatgattgctggagtttctggggacagactattggattaagtggcacgacctgatctattgagcttagcccatacctgcagcacttagtgttaaatttcttttgagaatggtagtctttcaagcatgacaatggctgctgttaagtttgggagtgccgccatcttttgggccaaagatggggtagaggatgattgatctgtcggcagtctgatggcgatgaattaatacgaggtcttcaatgctgacagaaagggttaatgaaacaaacttgaatccagtgattataggcactccgcacggaccacatgattcatctctcactggacatattgctaccacaagaagcggacggttgctgccgcaactaaaacatgccgtgtggatgtcagttttcagttggcctatgccatccagagagtaaaaagtgaggatcaacgagcatgttgccgagtagtttctcaagtataaattactgcgtctacttgctccttcgctttgggaacaatgtatcaggttgtaagttgcaattaaatgtttggaacagtttgtcatggtaattgtgtggctcctatatggctatattgttctctgtaattgtatggaccaaccctaagtgttacatacaaacatctttgatttgactcaatatcttgttcttcatccgtttttaaattataagaaattataagttctgttttctt

SEQ ID NO: 143330 - DNA, 327 bp, Zea Mays
gcccgcgatttgttttgcactctctctctcggactcgtttatatttctaacgctaacccggcttgtagttgtgcttaagtttataaatttcagattcgccctattcacccccctctaggcgactttaactaacgctaaccccggcttgtagttgtgcttaaagtttgtaaatttcagtttccgcctattcacccccctctctctaggcgactttcatgcgcataatcactcgtcaagttcggttatctgtatctttatcatatcgcccaagagcgcttcacacatcacaaagacataatcggagaagagaataagcggaaggattac

SEQ ID NO: 143331 - DNA, 1912 bp, Zea Mays
agtgtgtcttaagtggtccagcaacgtttgccgcatgcagccgcttcaagtccgacgattttctcctttctctctctctctatttttcactctagaccgaaatcggagcgcccgataccataccaatagcagcagagcagtagcagcacagctccctcccccgtcctctccaaatctcgccggattccgtccaccgccaagccctcgcatctgccgcaggttcgcgtctgtgcccgagcgtgttgcactgccggtggtgttggtggtggttggcggagttgccgccgagggtcggtcatggactacgggccctctgacagcagcggaactgatgatgatcttccacaacttccacataggagtatcagaggcagcggacgtgttagtggtaatgggagaactattgttcctgccggttcatatgctagagcaccaactgacatggaagcacaaattcaacaacttgagcaagaagcatattgttcagtccttcgtgcattcaaagcccagtctgatgccattacatgggagaaggaaggtctcatgactgaacttaggaaggaactaagagtatctgacaaagcacacagggagctgttaaataaagtcaacaacgataatattatatgtagcataagggaatggagatcaacaggagggcttcaagcaagcatgtccaataacccacaaccgattcatgaccctgttccaagtcctaccacctctggccgtaagaggcaaaagacatctcaatctgttcctgctttacctgcacctcctgcaatgcattcacaacagctggctacaccaacacagccatcgtcttcaactgctaggaaagcagtacccccagtccctaaaggcaaaaagacgaaaccaggtcagaaggtaccaggtggctctgcagccaagcctatgccatcttcagcaggtcctagtggaagaggaccacacatgaataggaattttccaggtggttctgctcctgaagctcaagctcagaatgtcgatccattggttggtcgtaaagtgatgagccggtggcctgaagataatagtttttatgaagcagtcatatctgattataatgctgaaacgggcctttatgtgctggtttatgacattaatacggcaaatgaaacctgggagtgggttgatcttaaagagatgggacctgaagacataagatggaaagaggatgactctgggatagaccctgtggtgtatctgcgcagccgaggtgccccaagtagtggggtcaggaagccaacaggtcgcggtgggcccatgccaggttctggaagaggaagaggattaccgaagaacatgtctaggaaagattttccacctccacaaaatggtgttggcaagagaagttccgatgacattgatatccttcatactgagagcctaataaaagaggtggagaaagtttttagcgttagcaatcctgatccacaggaagtagaaaaggcaaagaaagcactgaaggagcaagaacagtcattgattgacgccatagcaaggcttgctgaggcatcagatggtgaaagtgatgggctcaatcgtgggcgaaggaacttgtatgctggtaaccagcatcaagcaaactatgttgatgacatgcccgttggtgaccaagctgatgccatgtaaacactgcatgaacatgtatacacaacataatataactgtctgttgtacaatccattgcaaatatttgttctggatttaggtctctgtaagctaagtatcgttcgtttcgggaaactaatttttttagaacagtaattcagaatgctgacaagtaaagcttgtagatgtttgtttctttctctagtttttttgttagtgtggtctcatgttctatatgcatgataaaaggaaaaaaatcacctttgtaaagcactaa

SEQ ID NO: 143332 - DNA, 823 bp, Zea Mays
ctcaccgcttcctctcgtcgctcgccctcggccatggtcgtatctccttgtcccagcactggtgtctacgcgacgtcaccatggcgtcgtcgtcgaccctgctcggactccaccacgccaagttgcgtgggacacgctccctatcccagcgctgccccttcccctgctcggctctctactgtcgagctcctccggctgtgctcccctgctcagcgcattcctccctgctctctccctcatctggccatggatgcttgggagcagcagtagccctagctcggcaacaccaataggctccctggaaccagcgccccagcccccatcctccctcaagtctggttgtcccagctcgtcctggtggccgccaagtccggccgttatcctccactccaagccgcgctcaggtctccggctcccatgcgcttgccccctgtgcacgagtcgccgcgccgtgggagctgctcttgccgccgtggagctctgttctctttagagtttcgtcgttccatcccgccggtggctagtgccagctcaccctgtcgtcgacctcgttggcgctcgcgtccctgcttctctccatgccggtgctcgacgtaatggcggaattagaaatcgtagttgtggtcgtcgccttcgagtcggattaaattactggtgagcgtcgttgctgtcagaccattgctcatgcttgtttcccacccgatattaattccttaatgttaatattgtgtgttcttgtgtacgagtgatgaggagagaaatcatcggaatgtgtgaagaagaagcatagtccaatacgacacccgcaaaatgctcgaaaaaa

SEQ ID NO: 143333 - DNA, 1126 bp, Zea Mays
cggtggcccagccagccaaaacccttctcggctctcgcccagcctgaccggaacgaaacgctgaggcagcatcttccccgccgtcctccgccgcctcccattttcaccttggctgcagcctgcaacacaatcctacgcttccgacttcaacgcgcgcccctcccattttcacctagccctactcctttgtacataaaggaagatgggagcatatgcaacgactggtatgcagatgatagcaacacgcccttccatcccggcctacaggcaaatacttgggtcgacatcagcactatctgcatttggaaggtcaatctgttccagaactggctttgccatctcttctaaagccacatcagcaggaccactggtttcttcgaattgcaagagggttgttgtgagggcaatgtcgcagagaggtgcccaaggacttcccattgatctcacaggtaaaagagcatttatagctggagttgctgatgataatggttatggttgggcaattgctaaggctcttgctgctgctggtgctgagattcttgttggtacatgggtgcctgcgttgaacatatttgagacaagcttgagacgtggaaagtttgatgaatcacggaagctacctgatggatctcttatggagattgctaaagtatatccactggacgcagtttatgacacccctgaggatgttcctgaagatgttaaagcaaacaaaagatatgctggagcttcaaactggactgttaaggaagttgttgagactgtaaagaatgactttggtagcattgatatccttgtacactctctcgccaacggtcctgaggtaacaaagtcactgcttgagacatcaaggagaggataccttgctgcaatttcagcatctagttattcttatgtttctttacttcaacacttccttcccataatgaatccaggaggtgctagtatctctttgacctacatagcttctgaaaggataattcctggctacggtggtggtatgagttcagcaaaagcagctcttgagagtgatacaagagttcttgcatatgaagcaggtcgaaaaggcaaaatcagagtgaacaccatatcagcaggtccactttaggaaatctgccgagcagaa

SEQ ID NO: 143334 - DNA, 1096 bp, Zea Mays
cggtggcccagccagccaaaacccttctcggctctcgcccagcctgaccggaacgaaacgctgaggcagcatcttccccgccgtcctccgccgcctcccattttcaccttggctgcagcctgcaacacaatcctacgcttccgacttcaacgcgcgcccctcccattttcacctagccctactcctttgtacataaaggaagatgggagcatatgcaacgactggtatgcagatgatagcaacacgcccttccatcccggcctacaggcaaatacttgggtcgacatcagcactatctgcatttggaaggtcaatctgttccagaactggctttgccatctcttctaaagccacatcagcaggaccactggtttcttcgaattgcaagagggttgttgtgagggcaatgtcgcagagaggtgcccaaggacttcccattgatctcacaggtaaaagagcatttatagctggagttgctgatgataatggttatggttgggcaattgctaaggctcttgctgctgctggtgctgagattcttgttggtacatgggtgcctgcgttgaacatatttgagacaagcttgagacgtggaaagtttgatgaatcacggaagctacctgatggatctcttatggagattgctaaagtatatccactggacgcagtttatgacacccctgaggatgttcctgaagatgttaaagcaaacaaaagatatgctggagcttcaaactggactgttaaggaagttgttgagactgtaaagaatgactttggtagcattgatatccttgtacactctctcgccaacggtcctgaggtaacaaagtcactgcttgagacatcaaggagaggataccttgctgcaatttcagcatctagttattcttatgtttctttacttcaacacttccttcccataatgaatccaggtgctagtatctctttgacctacatagcttctgaaaggataattcctggctacggtggtggtatgagttcagcaaaagcagctcttgagagtgatacaagagttcttgcatatgaagcaggtcgaaaaggcaaaatcagagtgaacaccatatcagcaggt

SEQ ID NO: 143335 - DNA, 1787 bp, Zea Mays
gtcgcaggctcacaacatcatcagctcactctcttctccatcctcttctcggttatcccaccaactccccaaccccaccccaaagatcaggtttcgatccacgaaccccctcccaatcctccaaagatcaccgctctcagacccctcctccccggcaatggcagccggtggcccagcgctgctgcgtgccctcctcgtcgcggccctctgcgccgtcccgtggcgggccgaggcggcgatcggggtgaactggggtaccgtgtccaaccaccgcgcgccgcctggcgtggtggtggacttgatgcgcgcgaatcggatcagcaaggtgaagctcttcaacgccgacccgggagtcctgcgcgcgctcgccggcagcggcatccaggtcatggtcggcgttaccaacgacgagctcgcaagcatcgcggggtcgcaggcggctgcagacgactgggttgcgcagaacgtgtcccgttacgtcggccgcagcggcgtcggcatccgatacattgctgtgggcaatgagcctttcctgacaagctaccagggtcaattccaatcatatatcattccggcgatgacaaatattcagcaatcactggtgaaagctaatcttgctagctatgtaaagctagtagttccctgcaatgctgatgcttatcagagtgcttctgttccatctcaaggagtattcaggactgaattgactcagctaatgacccagctggctgcttttctgagttctagtggggctccatttgtcgtcaatatctatccattcctcagtctttatcaaaattcagatttcccacaagattatgcgttctttgaaggatctactcacccagtagtagatggtccgaacgtgtactacgatgcatttgatgggaactttgacacattagtttctgctctcagtaaaattggctacgggaacctaccaattgcaattggtgagattggttggcctactgagggagcaccaagtgcaaacttaactgcagcaagggcattcaatcaagggcttatcaatcgtattacaagcaacaagggaactccactccgacctggtgtgccaccagctgatgtatatcttttcagccttctcgatgaagaggggaagagcatactaccaggaaactttgagcggcactggggaatcttctccttcgatggacaagccaaataccccctgaatcttgggctgggaaattcagtactgaagaatgccaaagaggttccgtaccttccatcacgttggtgtgtcgcaaaccctgctcgggatcttgacagtgtttcagatcacatgaagcttgcgtgcagcatggcggattgtaccactctgtactacggaggttcatgctatggcatcggggagaagggcaatgtttcatatgctttcaacagctactatcagcagcagaagcaggacccaaagagttgtgattttggtgggcttgggatgataacataccttgacccatctatgggcgaatgccgctttcttgttggtgttgatgatagcaagagctctgcagtcgcctcttgtggcggtggatgctgcggggtctgctgtggactctgggttttagctttgtgggtgctcacgtaccttagaatgatgggttccgcttgattctcaaattgatatacctttgtgccaatgtttagaaagattgtacaattgacttctaggtctaggaaggaatggactgcactgtcgccacatgagattaggaaaccaggatttatatatataatttaatttattgttgaaaattatgccc

SEQ ID NO: 143336 - DNA, 780 bp, Zea Mays
atgggtgtgggtgttttggggccactaatctctgatcctgcggtcctcatgtcatatcggttcattaataaggaagaggacgatgaggaggaggaggtgcagcaccacgaggaacaggttgcagccacagatgccggggtgcagggccatgaggaggaggaggtcacgggcgtagatgctgaagcggatgatgataccatcggggctcctgcctttcgacggaggggcactcggaagggccactttgtcctacctccgtcagtgcctgcacaatcagaagctcggatactgatcatctcggttggtgatagccaatgggatgacacgtctttcgacgaccgaggtcaccatagacaggttaatcaagtcttaggtaacctatgtcatctacataatcctggaattgtgaccgactcaaaaggtgtggtggttccttgcactagttggtcgcacttcgcactagctccacatgctacatatggaacagctcagggcgtcgtcaagcacgacttttggagacgctattgtgtggaacctgaggctcaggagcatgcagaccgagtattagagaaaaatgcgaagaaggtaactcttccatggatggaacaccggccacatgattacaaggaggctcaaagtggagttgtcctgagccaaatcaatgtttataggcgagggcatagagcgaaaaacagtgaaatctccgatgagctatgtagtcaagcggccattgagcgtatggagacttacgggcaggtgatggttaggaagtatggataa

SEQ ID NO: 143337 - DNA, 92 bp, Zea Mays
ctctgcaatagataagaagcgctactccttttcaaggtacctgcaacatgtagttgatgttgtcagtgttgtgcagagtacaataggtcgtc

SEQ ID NO: 143338 - DNA, 638 bp, Zea Mays
ggacataatgctgatgagttgaaaattagaagtagtggtgaatcgctgattgtctgttccaaacacttctcttagatcttattggcctttcagaactaacacagatacctttgcaaaaagaaaaaaaaactgacacagataaatagttatctaatctgcctagctacagatcttgcaattttgcatttagtctcaagattcaacgtgctatgctcaagaaatgtggttttagttttacgttacaggaacatagtttatatacctacatgcgaagaggctttttggcccatgcctgactggtgcattactggcacagcatggccaatgcatcttcaaaggttgttcatagatagcaatgatcagcatatttttagatccgaacctttttcttttcagccatgcatgccattttaaaagtgtcatactacagttttaagaatcagcttttgcaaaactacatgcatgagcagtttattccattcaggtccacctgcaggcttcatggatgtccaaactatccatctcactactgtggcatgatatgcaggttgtttcaatggaatgtggacccaacatgtcattcccaattcaatgcaaaaaagttattttaagcaaaatttcgtgatattgtttatatg

SEQ ID NO: 143339 - DNA, 2071 bp, Zea Mays
cacctcacaattttccatgggattgattgaggtccagctttttagctggcaggtcttaaggtttcagagtttttcctttcaatttatcaaggactaggccaacaatacatcgcaatgaagtacatgaagctcggttcaaaacctgatacgttctataccgaagaagcagtcaggtcagtcgtatcagacatacccgccgatctcattatccatgtaaataacaccaagtatcagctacacaagttcccactgctcctcaagtgcggcctcctgcagcgcctctgctccgacaccgacgacggcgatgaggagccggtgcccgtggcgctgcacgacatccctggcggcgagcaggcctttgagctgtgcgccaagttctgctacggcatctccatcagcatcagcgccgggaacctggtgcccgcgatgctggcggcgcgcttcctccggatgacggaggccgtcgccaagggcaacctggtggccaagctcgagaccttcttcgactcctgcgtcctgcagggctggaaggactcggtcgccgcgctgcaggccgcgtggcggatctccggctggaacgagagccgcatcgtacagccctgcatcgactccatcgtcgagaagatcctcctgccaccgtccaaggtcacgtggtcctacacgtacacgaggccagggtacaacagcacgaggaaaccccaccagtccgtccccaaggactggtggacggaggacatctccgacctggacatcgaggtcttccgctccgtcatctccaccgtgcgcgcgtcgcggctgctcccaccgccgctcatcggcgaggcgctgcacgtctacgcgtgcaagcacctcgtcgacccgctccacgttgccagcgacgcaggactgaccgccaacggcgtcctccaccagccgccgcagagctcagacgacggcgaggagaagctggtggccatgcagcgccgcgtgctcgagtccatcgtcaccatggtcccgggcgagccggggtcggtcaccggccgcttcctactaaggctgctgcgggtggccaactacgtcagcgcgtcgtcgtccacgcgcgcgcagctgatccggcaggccggctcccagctcgacgaggccagggcggcggacctgctcatcccgctgccatcggacccgcacgcgtacgacgtcggcacggcggaggccgtgctcgagcacttcctggcccagttccagcggcccgcgccgaccgacgagcggcgtcggatgagcgccgccatggagaaggtcgccaggatcttcgacgagtacctgcggaccatcgcgctggaccgcagcttccctgtcggcaagttcgttgacctcgtcgaatgcttgccggacatcgcccgcagtgaccacgacggcctctactacgccatcgacatctatctcaaggagcacccggagctgagcaaggcggataagaagcggttgtgccggctgatagactgcaggaagctgtcgccagacgtgcgggcgcaggcgatagccaacgaccggatgccactgcgcaccattgtacagcttctcttcgtcgagcaggagcggaccatcggtgcagccgccggcagccatgctgcttccggtggcgccgcagatcgggcctccgtcggtgttatctcccagctcgcggcgggaaccaaagatgaagaaccagcctcgtctgctggccacaagtcagacgtgcacagaccacgccgggaccatgcccgggtagccgatggagcctctgccatggcgaggtcgctgtcggcgtcaaccaagactccaccggcagcgaggaaggagaggacgccggaggagacggggagcaggatgaggaacaagcagtgaagcccagtgcacaatttgttcatacttgtgattcttgattatattttttttatttcagtgcatcccatttttggtgggagatgtaagaggtagatttttgtaattaaaatggataaggagttaataagtggctacgtgcagtcatgctcatataatctagggtagctcaccgatgaacaaaggttcgtgttcatcacattcttcctccggc

SEQ ID NO: 143340 - DNA, 663 bp, Zea Mays
catgtcaaagaggtaagcatgtatgcgtatgcttggcattttacctttgatttcattttgtacttgctaaacttgttcatttgctaatacagagagggaccgtctaaaagtattgtgcaagatatagatcatgcactcatcatatctaagtgatcggagtgatattgattggcttattagatggatattggcccagtttatctttcattttttctatagctgttagaaatttactttgctcatagttcatactataattaatatgagactcttgttttgtggtccaagtgttcagcgctcagggtgccttggaagtacgctagcttgttgtcatgaagaagtcattcaagttccttccactgaagttggtgcataaggctgcaacaccatctagtggagggtgttctggacaaagaaagcttgtaccttaaaacaggaggatacaagaagctggagtggttgtctgaagcctttttaactgcttgaagcattagtgtagctttggtgcttttgtgactgatcagctctggagaagctagagtgatatagttgtgggcttttgaacaatagttggagtgatatgaaacattagtgatctagttgtgaatgatattatgattgtgatgcttttgtgaatatataattgtggtgcttttgtgttta

SEQ ID NO: 143341 - DNA, 740 bp, Zea Mays
aaatcaccctgcacaccgggaatacccaaaaactcaacctgcacagaaaattttcctcttactccaaacaatccatatggcaaaacaaagctcgttgttgaggatatttgccgggatatctaccgttcaggtcctgaatggaagatcattttacttaggtacttcaatccagttggtgctcatcctagtggatatcttggcgaggacccacgaggaattcccaacaatcttacgccctatgttcagcaagttgcggttggtaggaggccagctctgacagttttaggaaatgactatgcaacaagagacgggactggggtaattctgttacatatgatgtgcttaattgtgttttttggtataccattcaaattgattaatctgatgcatttgaagctaggtattccaaataaatctgttgtcaattttctgtcagaatttaataatctgtggtaggtatagtactaacaagagttatgacaactgtcatctcttccttaaaaaacttgactaggtctgtttatatgacttgctgcctagtgtattgacccagctcgttgaagttgatctttaactacacaggacttcctataatttacttttatttcatatattggctatgttgcatagttttcacctttttctttctcttctttggcaccctgctgtttatatctctatagtttttcctctgcactttgtatggttgctatccaattctatatttaattatttataat

SEQ ID NO: 143342 - DNA, 118 bp, Zea Mays
attgttttgctccagtgaaattccattttttcttacctataccctgtttgtcttaatcttcatcttttcttgtcctagcgtttccctgtttccacacattaaagtattgagagggacc

SEQ ID NO: 143343 - DNA, 570 bp, Zea Mays
atgccatatgggaaagaagtgttggtgacggtgggtgctgggagcggtggtggtgttggcgacctgctggacatgcggtcaatggtggcggagagggcggcaaactggtggagcatcatctgttggaaagccatgaaatcagcctgggagacagtagcggatgttgctgcgacagatgtgttgacagcggaggtggtgggtggagttgatcccggtggcacttcttcgaaacctgacatcaccgataccagattgttgggattagggttacgaaggtcgtacgagtgggctgctaggctgctggtcataacaaagatactcctgaccaatcccgctggaagttcacaaaagccaattcctactcagaatatatggtggcagatcttaagtagagtggtgatgcagcttgtgtcaccagggctggagttattcttgtggcttggtggatctggaagcacagaaatgcttgtgtttttttatggtgtttctccaaacacgagttcagttctacagcatatccatgaggatgccatgccaggctttgggaattggcaggtgctaaggcactga

SEQ ID NO: 143344 - DNA, 185 bp, Zea Mays
gactttggagaaatagtgtggtatgttttcttcagtgatctgagagactggagttgtttttcttctagcctgacagactggcatgtatatatatatatatttttctgcgagacaatcttcttagataagttcagggatctgagaggtcctgttatatgaagtaatcactccgttcaaattttaat

SEQ ID NO: 143345 - DNA, 246 bp, Zea Mays
atggcgagttggagaccgacagaaagctcagcgcgcggcaaggaactcgacgtgcacagagaaacagagactgagctaagctcgacgtcggacaaaacactgcgcagtatgacgttcagctgcgctagcacaaggaacgcgacgcagcggccatgggagatgctgtttcgtacaagacctcggtttgggttgagcagtgagccggccatgggaaaaaccttggcgaggtcacggccagcgagctga

SEQ ID NO: 143346 - DNA, 420 bp, Zea Mays
tttgaaatggactctgaagccagtatgttcgatcacgttgagctcatgctacttgatgaaagtgtggagccgtcagacatgccattatcatttttaacagcaatcaccaataatttctcagaggatcagacaattggccgtggtgggtttgctgtggtttacaagggcctgctgcgaaatggactatccgtggcggtaaagaagttctatgattccattgaactatccgatgaaatgtaccgtaaagaggttcaatccatgatgaggctgaaacatgcaaatatagtacgttttttgggatactgtgctgacacacagtggaaaatgttcaaacacgagggtagacatgtgtagcagaagctcgccaacgattgctttgctttgactccctccttatttagtctagataaatatatatct

SEQ ID NO: 143347 - DNA, 125 bp, Zea Mays
ctagtttagcgaaagttttagaagtcctaattcacccccctcttaggcgtcacccgtttcctacaaccttgcctggccacgccgtgccccgccggaccgtccgcccggccgtgccgtgcccctgc

SEQ ID NO: 143348 - DNA, 1618 bp, Zea Mays
ccaaaattagggtgagcagctgcgccaaaagcctaggccccggtggtgttcacttggccgccactgccggccacggcggcggcggcccatccctccctttcccctcttctcccctctctctcttccccgccccctctgtctcgacatcggtgccgtcatcttctcggcctcccgccggttggatccatcgggcgctggtcggatctgcctttcggtcgccgttgcccctccgccacgcctcgcgccagccggtcctgctgagcgccggcctgatccgcctccctctagtcggatctgcttggcgtcggcctctcgccgctactgctccgcatcctgggcttcctcaccgatgcacgatcctggcaccacgccacgccggtgtgctaccggctccttgcggcggagcggaccacatggtctgtgctcacgctgagcagggacccacgatcgctcgcgttcctcatcattaggccgactttctacttctcgacgctggagcagcttgacctctcactggtgtcgtcgtcgcctctcgccggccggtcgcgtctcgcggtgccaggcgagcggccctgttgccattggctgggtaccgttgacatggccgcccccgctggctcgcatcgccgtggctggcacacgtgacgacaggggcggccggcggtggtggctaggccctagccgctgctgcatgcggtaggcttcggcttcaatggattcggctccccttgggccctcgtcgcctcgccttcagggtcgtgcactcgtgccgccaccgtcagcccccatcgccgtctctgggcccctgagaggagcatgacccgagcctccacccttgtcgccaggagaacggggctactccgccacctcggcttccttaagggccgacctagcacccccgccccctcgtcgcctccacatcttcaaggttgtgccgccaaagctggcctccatagcctgcactggacccctgattggagcacgacctaagcctccatcctcgacactgggagtttagggctactcctgtcaccccggctatccttggctgctgttgtgttcgttgtggcattgccgctagcatgagcagggtttttggggtctcatacgaaagccatgccaggtgtagtctgcacagacaacagcaatgccctcgacgccgatgacctccttggattgttgtaaggttctcttgtgtcgttgtgcttggcactggcgttccagcctttgtcgtggtgcgacgagtgccttcctttggtgcgtctgctccgtcagcactctccttgttaacagaagcatattaatcttatgctaggtcggtgaatatccgcctctcctgccattcacccatgaggatttctcctcaagcggcgttggatggtggcattagagcccggatgcgccatcgggtgtttctgttttctcgaaaggagatcgtcgttttcggcgtaaagccgagcggtcggagtggaaatttgcaccacgcttcgtcctcccaatcatctgctcggccgctggctgctcgtcatctccggcgcgcaggagcttcaacccgtacgcctctgccttctagagcatgttgttcgctagcccagctgacgagtggccgtgggtcccc

SEQ ID NO: 143349 - DNA, 1946 bp, Zea Mays
ccaaaattagggtgagcagctgcgccaaaagcctaggccccggtggtgttcacttggccgccactgccggccacggcggcggcggcccatccctccctttcccctcttctcccctctctctcttccccgccccctctgtctcgacatcggtgccgtcatcttctcggcctcccgccggttggatccatcgggcgctggtcggatctgcctttcggtcgccgttgcccctccgccacgcctcgcgccagccggtcctgctgagcgccggcctgatccgcctccctctagtcggatctgcttggcgtcggcctctcgccgctactgctccgcatcctgggcttcctcaccgatgcacgatcctggcaccacgccacgccggtgtgctaccggctccttgcggcggagcggaccacatggtctgtgctcacgctgagcagggacccacgatcgctcgcgttcctcatcattaggccgactttctacttctcgacgctggagcagcttgacctctcactggtgtcgtcgtcgcctctcgccggccggtcgcgtctcgcggtgccaggcgagcggccctgttgccattggctgggtaccgttgacatggccgcccccgctggctcgcatcgccgtggctggcacacgtgacgacaggggcggccggcggtggtggctaggccctagccgctgctgcatgcggtaggcttcggcttcaatggattcggctccccttgggccctcgtcgcctcgccttcagggtcgtgcactcgtgccgccaccgtcagcccccatcgccgtctctgggcccctgagaggagcatgacccgagcctccacccttgtcgccaggagaacggggctactccgccacctcggcttccttaagggccgacctagcacccccgccccctcgtcgcctccacatcttcaaggttgtgccgccaaagctggcctccatagcctgcactggacccctgattggagcacgacctaagcctccatcctcgacactgggagtttagggctactcctgtcaccccggctatccttggctgctgttgtgttcgttgtggcattgccgctagcatgagcagggtttttggggtctcatacgaaagccatgccaggtgtagtctgcacagacaacagcaatgccctcgacgccgatgacctccttggattgttgtaaggttctcttgtgtcgttgtgcttggcactggcgttccagcctttgtcgtggtcggtgaatatccgcctctcctgccattcacccatgaggatttctcctcaagcggcgttggatggtggcattagagcccggatgcgccatcgggtgtttctgttttctcgaaaggagatcgtcgttttcggcactcataccgaattcattgttggccccaagcatgtttgaagcgaaattaatagtctccctcactgtcatttcgggatgatggaggtcattctggctgacgtacgcacagaggtgctgcgatgtagatgacattgtttccccattacacttgtatttgacatctccatggatctattgacaagaaatcagaaaattaatgatgttcgtttttctatcacaaaagtacgtactaacttcttaggaataaccactaatcaatacatgctgcttctgtgacatggttttgatttatttacactaattttgaggactggactggactagtactaccttcaaagaagaatctagttttcctgccagtgcttttaacagggtcgtctttcctgatccgggtgctccaagaagaagtgtcattctggccacacaagaaaagcacctgattgattacaggctgaccaggttattaattagactgaacaagtcattgaaacatttttagagaaactgccatttttcactgtggtgtgctgtttaataccgaatggtcatgggactgtacctggatgatcttattgtcc

SEQ ID NO: 143350 - DNA, 2026 bp, Zea Mays
ccaaaattagggtgagcagctgcgccaaaagcctaggccccggtggtgttcacttggccgccactgccggccacggcggcggcggcccatccctccctttcccctcttctcccctctctctcttccccgccccctctgtctcgacatcggtgccgtcatcttctcggcctcccgccggttggatccatcgggcgctggtcggatctgcctttcggtcgccgttgcccctccgccacgcctcgcgccagccggtcctgctgagcgccggcctgatccgcctccctctagtcggatctgcttggcgtcggcctctcgccgctactgctccgcatcctgggcttcctcaccgatgcacgatcctggcaccacgccacgccggtgtgctaccggctccttgcggcggagcggaccacatggtctgtgctcacgctgagcagggacccacgatcgctcgcgttcctcatcattaggccgactttctacttctcgacgctggagcagcttgacctctcactggtgtcgtcgtcgcctctcgccggccggtcgcgtctcgcggtgccaggcgagcggccctgttgccattggctgggtaccgttgacatggccgcccccgctggctcgcatcgccgtggctggcacacgtgacgacaggggcggccggcggtggtggctaggccctagccgctgctgcatgcggtaggcttcggcttcaatggattcggctccccttgggccctcgtcgcctcgccttcagggtcgtgcactcgtgccgccaccgtcagcccccatcgccgtctctgggcccctgagaggagcatgacccgagcctccacccttgtcgccaggagaacggggctactccgccacctcggcttccttaagggccgacctagcacccccgccccctcgtcgcctccacatcttcaaggttgtgccgccaaagctggcctccatagcctgcactggacccctgattggagcacgacctaagcctccatcctcgacactgggagtttagggctactcctgtcaccccggctatccttggctgctgttgtgttcgttgtggcattgccgctagcatgagcagggtttttggggtctcatacgaaagccatgccaggtgtagtctgcacagacaacagcaatgccctcgacgccgatgacctccttggattgttgtaaggttctcttgtgtcgttgtgcttggcactggcgttccagcctttgtcgtggtgcgacgagtgccttcctttggtgcgtctgctccgtcagcactctccttgttaacagaagcatattaatcttatgctaggtcggtgaatatccgcctctcctgccattcacccatgaggatttctcctcaagcggcgttggatggtggcattagagcccggatgcgccatcgggtgtttctgttttctcgaaaggagatcgtcgttttcggcactcataccgaattcattgttggccccaagcatgtttgaagcgaaattaatagtctccctcactgtcatttcgggatgatggaggtcattctggctgacgtacgcacagaggtgctgcgatgtagatgacattgtttccccattacacttgtatttgacatctccatggatctattgacaagaaatcagaaaattaatgatgttcgtttttctatcacaaaagtacgtactaacttcttaggaataaccactaatcaatacatgctgcttctgtgacatggttttgatttatttacactaattttgaggactggactggactagtactaccttcaaagaagaatctagttttcctgccagtgcttttaacagggtcgtctttcctgatccgggtgctccaagaagaagtgtcattctggccacacaagaaaagcacctgattgattacaggctgaccaggttattaattagactgaacaagtcattgaaacatttttagagaaactgccatttttcactgtggtgtgctgtttaataccgaatggtcatgggactgtacctggatgatcttattgtcc

SEQ ID NO: 143351 - DNA, 1774 bp, Zea Mays
ccaaaattagggtgagcagctgcgccaaaagcctaggccccggtggtgttcacttggccgccactgccggccacggcggcggcggcccatccctccctttcccctcttctcccctctctctcttccccgccccctctgtctcgacatcggtgccgtcatcttctcggcctcccgccggttggatccatcgggcgctggtcggatctgcctttcggtcgccgttgcccctccgccacgcctcgcgccagccggtcctgctgagcgccggcctgatccgcctccctctagtcggatctgcttggcgtcggcctctcgccgctactgctccgcatcctgggcttcctcaccgatgcacgatcctggcaccacgccacgccggtgtgctaccggctccttgcggcggagcggaccacatggtctgtgctcacgctgagcagggacccacgatcgctcgcgttcctcatcattaggccgactttctacttctcgacgctggagcagcttgacctctcactggtgtcgtcgtcgcctctcgccggccggtcgcgtctcgcggtgccaggcgagcggccctgttgccattggctgggtaccgttgacatggccgcccccgctggctcgcatcgccgtggctggcacacgtgacgacaggggcggccggcggtggtggctaggccctagccgctgctgcatgcggtaggcttcggcttcaatggattcggctccccttgggccctcgtcgcctcgccttcagggtcgtgcactcgtgccgccaccgtcagcccccatcgccgtctctgggcccctgagaggagcatgacccgagcctccacccttgtcgccaggagaacggggctactccgccacctcggcttccttaagggccgacctagcacccccgccccctcgtcgcctccacatcttcaaggttgtgccgccaaagctggcctccatagcctgcactggacccctgattggagcacgacctaagcctccatcctcgacactgggagtttagggctactcctgtcaccccggctatccttggctgctgttgtgttcgttgtggcattgccgctagcatgagcagggtttttggggtctcatacgaaagccatgccaggtgtagtctgcacagacaacagcaatgccctcgacgccgatgacctccttggattgttgtaaggttctcttgtgtcgttgtgcttggcactggcgttccagcctttgtcgtggtgcgacgagtgccttcctttggtgcgtctgctccgtcagcactctccttgttaacagaagcatattaatcttatgctaggtcggtgaatatccgcctctcctgccattcacccatgaggatttctcctcaagcggcgttggatggtggcattagagcccggatgcgccatcgggtgtttctgttttctcgaaaggagatcgtcgttttcggtatgttatggtcgctatgcctctgacctcctttagcccctgttcgtggccataagtcaacgggacacgcgtagctacaaggggaggtctagatgagcaaaggcctaggtttgtcgacgagtatgttatttttagtcgaagcgctagtcgtcgttcgacaattgtcgtttcaactgctttaacatgcgacgtgttgggtttcctttctttgtttcccctgtgttgttgaagtatttgctgtgttgtgctagcacttgtttgtaatctatggtctaccacaattttatatagtgctttgcctcgtttctctaaaaaagaggttgctttc

SEQ ID NO: 143352 - DNA, 334 bp, Zea Mays
ccttgttgcggcggcggcttgccgagtcagccggtgtcgtcttccaccgtcctatcctcgccgcaagccgcatacggcgttgcctcctgatctccccagtcgagtcggtacacctgcggccgcgtttctagaggttagtgccattgctcaatcctcaagttgggggtcctaagggtgtgtcgaggtgttcgccgaaccacggggaaaccgtacgcgcgctcggaccgtagagactagcactcgaacggcgggaattgctcgtcggccgtcatcctccgccgtgtagccgccccgctccgtggcactgatcatcgttgctccttcctcaggtatg

SEQ ID NO: 143353 - DNA, 2921 bp, Zea Mays
cgagctcgacgcccctcccctcgacgccctgcctctgtcttcctcctcgcgtcttcttccctcgcttccatttcttttcaaaccctaagaacccgattccctgctcaaaaccctaaccctagcccccgcctcctctactccgcgtcacccactgctccgcggcatccctcgcggttcccgccgtccggggcgccaggccctgccactcggcccttgcggacctagggtttctcccgagcttctcgttgcgttcactgccttgggcgagccggtgcgggcggatggttaggcgaggaggtggtgggcggagatgagatgaggttgcagcggcgttgggggttgtgggaactatgagtaggctctcgttcagaccgcggccgctagacatccacaagaagctccccatcctcaagtctgtgcgtgagttcgaggatgaggagccagggatcgcaccactgtcctctgcgagggctggggtgctgctgcgtcactcaggagctgacttcaccgcgtctggggccaacaatgccacagaaggcgagggaaatcaagcactcagtaagaaaaatgcccaggaaatacctacaccacaatttgatggtgttgacacatatgaaagggactatactcgtacctttgcacaaccgacatcttatatacgtggaagaggagccagggctgagatcggtgaatttgtcgagtatgaccttgacaatgaagacgaggactggcttgaagaattcaatagcgagcggaagaatataaaccctgaaaagttggaggccctcctattcaagttggaagttttggaccacagagctcgtgaaagagcaggagccataacaccaactttcataggaccagtgccagtcctcttacagctagatgctgctatggaggctttgcagtacttatctgttcgaaatgccgttttccaagctgtatacaactactggaaatcaaagagggagcgatggcaaaagcctattcttcggcgtttgcagccgcctccaccagtgaatgatacaaatccatacaatgtcttcagaccaagagaaaaggctcatcgtcttcatacaagaaggatgcaaagaagggaaaacaatatccaatcattcgaaaaactccgcttggtgcgacgcaacttggagcaagcaaaagcactaatggatgctttgattaagagggaggagacaaagcgggaggccatggagtgccaagttaacctgcagcgtgttcagatgaaatataagcatgaggcccagcttgttgaggatgggactaccttgtctggcttccagcaaacttcgagcagatttgaatcgagcgatgatgatgtggattcagatgatactgcaactgaacagacatacatacgtccagcagttttccatccaaggttttctgctaataagctatctgtgatccctccacttcgcataaagcgtgaacgagagctaaaaaggagacctcagcagaatggctgtgtatttaaaagggtagggtgtctcagtctcctccttttatccttttcatatcgttcactatccaaaaaaagagaggaaaaaacggtgttaaacacatgtttcatgctaaccccactagcctaatgattttagctggcataattaagaaagctataaagttctgtttgaatttgtttttattttgttccagaaagttatggaacttgagcaaacacaaaatataaaatagaaaaaacctgactggaatccagtgagaaactggacagatagcggatgctctagtggacatccagatttttctttttgcaaaataatattttgttgccctctaagacattgagcatttgaattaagggcaccactgtcatttagtgttcaattgtgaattggaatggaatttggtgtagatcggaaaagactccagttgctttagttcccttgtcaagttcatttaccagcttcttcagatacaggatcctgaggagccagtattcttattcacaagaccgcttgatccggagaagttggttgcagcaggtatcaagccaccaccagatcctcctattgagaatggtgccacatcaccaccatttcggtgtcgaggtaggattggacgaggcggccgcatcatctttgatcgatggaatcctcttctccggacaccaattgaccaggagacttattatgtgccatacggtcacaggcccccctcacctgaaggttgaagcggtttttcatatgcacatagtgcttaatggcactggcacagctatggaatttgtgaagcctctgagcaattgtttttccataggtgccaaattggcccttggagagtccattgtgagttgagcccagtggttcattctgatggaaggcagagaaagctccttgataagcagcagcctcagtggaagttcgagagcatatgggatctcgtggggctagcatttcttgctcagatgtggcttggtcatcttttttcacagctgttgtaaaattattgcagtgtaggtgaaagagtagatctttttgtctaatctttgcatttagggtcagtattcatatcatgctctctcatttgattattcatttggaggagaggaaatccttctcattgctaagttcagcttttctgtataattcttcaacaccttgttgcatgcattcaactaatgcacgtgtgtatatactgaaacccaatgtgcattgcccttttgtggcagatgtcattagtcagtaggttaggcagaaaatgggaatggaaaggggccaacaatgttattgaatctgttgctgaatgttgggttggcgcgcagcttcctcttgtaaccgtgtacagattcaggtttttgttgtgtaacaccgccaacaaatagctggttattgtcaggactgccatatgttctgattcttgctgatgacactgggctactt

SEQ ID NO: 143354 - DNA, 2415 bp, Zea Mays
cgagctcgacgcccctcccctcgacgccctgcctctgtcttcctcctcgcgtcttcttccctcgcttccatttcttttcaaaccctaagaacccgattccctgctcaaaaccctaaccctagcccccgcctcctctactccgcgtcacccactgctccgcggcatccctcgcggttcccgccgtccggggcgccaggccctgccactcggcccttgcggacctagggtttctcccgagcttctcgttgcgttcactgccttgggcgagccggtgcgggcggatggttaggcgaggaggtggtgggcggagatgagatgaggttgcagcggcgttgggggttgtgggaactatgagtaggctctcgttcagaccgcggccgctagacatccacaagaagctccccatcctcaagtctgtgcgtgagttcgaggatgaggagccagggatcgcaccactgtcctctgcgagggctggggtgctgctgcgtcactcaggagctgacttcaccgcgtctggggccaacaatgccacagaaggcgagggaaatcaagcactcagtaagaaaaatgcccaggaaatacctacaccacaatttgatggtgttgacacatatgaaagggactatactcgtacctttgcacaaccgacatcttatatacgtggaagaggagccagggctgagatcggtgaatttgtcgagtatgaccttgacaatgaagacgaggactggcttgaagaattcaatagcgagcggaagaatataaaccctgaaaagttggaggccctcctattcaagttggaagttttggaccacagagctcgtgaaagagcaggagccataacaccaactttcataggaccagtgccagtcctcttacagctagatgctgctatggaggctttgcagtacttatctgttcgaaatgccgttttccaagctgtatacaactactggaaatcaaagagggagcgatggcaaaagcctattcttcggcgtttgcagccgcctccaccagtgaatgatacaaatccatacaatgtcttcagaccaagagaaaaggctcatcgtcttcatacaagaaggatgcaaagaagggaaaacaatatccaatcattcgaaaaactccgcttggtgcgacgcaacttggagcaagcaaaagcactaatggatgctttgattaagagggaggagacaaagcgggaggccatggagtgccaagttaacctgcagcgtgttcagatgaaatataagcatgaggcccagcttgttgaggatgggactaccttgtctggcttccagcaaacttcgagcagatttgaatcgagcgatgatgatgtggattcagatgatactgcaactgaacagacatacatacgtccagcagttttccatccaaggttttctgctaataagctatctgtgatccctccacttcgcataaagcgtgaacgagagctaaaaaggagacctcagcagaatggctgtgtatttaaaagggatcctgaggagccagtattcttattcacaagaccgcttgatccggagaagttggttgcagcaggtatcaagccaccaccagatcctcctattgagaatggtgccacatcaccaccatttcggtgtcgaggtaggattggacgaggcggccgcatcatctttgatcgatggaatcctcttctccggacaccaattgaccaggagacttattatgtgccatacggtcacaggcccccctcacctgaaggttgaagcggtttttcatatgcacatagtgcttaatggcactggcacagctatggaatttgtgaagcctctgagcaattgtttttccataggtgccaaattggcccttggagagtccattgtgagttgagcccagtggttcattctgatggaaggcagagaaagctccttgataagcagcagcctcagtggaagttcgagagcatatgggatctcgtggggctagcatttcttgctcagatgtggcttggtcatcttttttcacagctgttgtaaaattattgcagtgtaggtgaaagagtagatctttttgtctaatctttgcatttagggtcagtattcatatcatgctctctcatttgattattcatttggaggagaggaaatccttctcattgctaagttcagcttttctgtataattcttcaacaccttgttgcatgcattcaactaatgcacgtgtgtatatactgaaacccaatgtgcattgcccttttgtggcagatgtcattagtcagtaggttaggcagaaaatgggaatggaaaggggccaacaatgttattgaatctgttgctgaatgttgggttggcgcgcagcttcctcttgtaaccgtgtacagattcaggtttttgttgtgtaacaccgccaacaaatagctggttattgtca

SEQ ID NO: 143355 - DNA, 2315 bp, Zea Mays
cgagctcgacgcccctcccctcgacgccctgcctctgtcttcctcctcgcgtcttcttccctcgcttccatttcttttcaaaccctaagaacccgattccctgctcaaaaccctaaccctagcccccgcctcctctactccgcgtcacccactgctccgcggcatccctcgcggttcccgccgtccggggcgccaggccctgccactcggcccttgcggacctagggtttctcccgagcttctcgttgcgttcactgccttgggcgagccggtgcgggcggatggttaggcgaggaggtggtgggcggagatgagatgaggttgcagcggcgttgggggttgtgggaactatgagtaggctctcgttcagaccgcggccgctagacatccacaagaagctccccatcctcaagtctgtgcgtgagttcgaggatgaggagccagggatcgcaccactgtcctctgcgagggctggggtgctgctgcgtcactcaggagctgacttcaccgcgtctggggccaacaatgccacagaaggcgagggaaatcaagcactcagtaagaaaaatgcccaggaaatacctacaccacaatttgatggtgttgacacatatgaaagggactatactcgtacctttgcacaaccgacatcttatatacgtggaagaggagccagggctgagatcggtgaatttgtcgagtatgaccttgacaatgaagacgaggactggcttgaagaattcaatagcgagcggaagaatataaaccctgaaaagttggaggccctcctattcaagttggaagttttggaccacagagctcgtgaaagagcaggagccataacaccaactttcataggaccagtgccagtcctcttacagctagatgctgctatggaggctttgcagtacttatctgttcgaaatgccgttttccaagctgtatacaactactggaaatcaaagagggagcgatggcaaaagcctattcttcggcgtttgcagccgcctccaccagtgaatgatacaaatccatacaatgtcttcagaccaagagaaaaggctcatcgtcttcatacaagaaggatgcaaagaagggaaaacaatatccaatcattcgaaaaactccgcttggtgcgacgcaacttggagcaagcaaaagcactaatggatgctttgattaagagggaggagacaaagcgggaggccatggagtgccaagttaacctgcagcgtgttcagatgaaatataagcatgaggcccagcttgttgaggatgggactaccttgtctggcttccagcaaacttcgagcagatttgaatcgagcgatgatgatgtggattcagatgatactgcaactgaacagacatacatacgtccagcagttttccatccaaggttttctgctaataagctatctgtgatccctccacttcgcataaagcgtgaacgagagctaaaaaggagacctcagcagaatggctgtgtatttaaaaggatacaggatcctgaggagccagtattcttattcacaagaccgcttgatccggagaagttggttgcagcaggtatcaagccaccaccagatcctcctattgagaatggtgccacatcaccaccatttcggtgtcgaggtaggattggacgaggcggccgcatcatctttgatcgatggaatcctcttctccggacaccaattgaccaggagacttattatgtgccatacggtcacaggcccccctcacctgaaggttgaagcggtttttcatatgcacatagtgcttaatggcactggcacagctatggaatttgtgaagcctctgagcaattgtttttccataggtgccaaattggcccttggagagtccattgtgagttgagcccagtggttcattctgatggaaggcagagaaagctccttgataagcagcagcctcagtggaagttcgagagcatatgggatctcgtggggctagcatttcttgctcagatgtggcttggtcatcttttttcacagctgttgtaaaattattgcagtgtaggtgaaagagtagatctttttgtctaatctttgcatttagggtcagtattcatatcatgctctctcatttgattattcatttggaggagaggaaatccttctcattgctaagttcagcttttctgtataattcttcaacaccttgttgcatgcattcaactaatgcacgtgtgtatatactgaaacccaatgtgcattgcccttttgtggcagatgtcattagtcagtaggttaggcagaaaatgggaatggaaaggggccaacaatgttatt

SEQ ID NO: 143356 - DNA, 1544 bp, Zea Mays
cgagctcgacgcccctcccctcgacgccctgcctctgtcttcctcctcgcgtcttcttccctcgcttccatttcttttcaaaccctaagaacccgattccctgctcaaaaccctaaccctagcccccgcctcctctactccgcgtcacccactgctccgcggcatccctcgcggttcccgccgtccggggcgccaggccctgccactcggcccttgcggacctagggtttctcccgagcttctcgttgcgttcactgccttgggcgagccggtgcgggcggatggttaggcgaggaggtggtgggcggagatgagatgaggttgcagcggcgttgggggttgtgggaactatgagtaggctctcgttcagaccgcggccgctagacatccacaagaagctccccatcctcaagtctgtgcgtgagttcgaggatgaggagccagggatcgcaccactgtcctctgcgagggctggggtgctgctgcgtcactcaggagctgacttcaccgcgtctggggccaacaatgccacagaaggcgagggaaatcaagcactcagtaagaaaaatgcccaggaaatacctacaccacaatttgatggtgttgacacatatgaaagggactatactcgtacctttgcacaaccgacatcttatatacgtggaagaggagccagggctgagatcggtgaatttgtcgagtatgaccttgacaatgaagacgaggactggcttgaagaattcaatagcgagcggaagaatataaaccctgaaaagttggaggccctcctattcaagttggaagttttggaccacagagctcgtgaaagagcaggagccataacaccaactttcataggaccagtgccagtcctcttacagctagatgctgctatggaggctttgcagtacttatctgttcgaaatgccgttttccaagctgtatacaactactggaaatcaaagagggagcgatggcaaaagcctattcttcggcgtttgcagccgcctccaccagtgaatgatacaaatccatacaatgtcttcagaccaagagaaaaggctcatcgtcttcatacaagaaggatgcaaagaagggaaaacaatatccaatcattcgaaaaactccgcttggtgcgacgcaacttggagcaagcaaaagcactaatggatgctttgattaagagggaggagacaaagcgggaggccatggagtgccaagttaacctgcagcgtgttcagatgaaatataagcatgaggcccagcttgttgaggatgggactaccttgtctggcttccagcaaacttcgagcagatttgaatcgagcgatgatgatgtggattcagatgatactgcaactgaacagacatacatacgtccagcagttttccatccaaggttttctgctaataagctatctgtgatccctccacttcgcataaagcgtgaacgagagctaaaaaggagacctcagcagaatggctgtgtatttaaaagggtatcaagccaccaccagatcctcctattgagaatggtgccacat

SEQ ID NO: 143357 - DNA, 1545 bp, Zea Mays
cgagctcgacgcccctcccctcgacgccctgcctctgtcttcctcctcgcgtcttcttccctcgcttccatttcttttcaaaccctaagaacccgattccctgctcaaaaccctaaccctagcccccgcctcctctactccgcgtcacccactgctccgcggcatccctcgcggttcccgccgtccggggcgccaggccctgccactcggcccttgcggacctagggtttctcccgagcttctcgttgcgttcactgccttgggcgagccggtgcgggcggatggttaggcgaggaggtggtgggcggagatgagatgaggttgcagcggcgttgggggttgtgggaactatgagtaggctctcgttcagaccgcggccgctagacatccacaagaagctccccatcctcaagtctgtgcgtgagttcgaggatgaggagccagggatcgcaccactgtcctctgcgagggctggggtgctgctgcgtcactcaggagctgacttcaccgcgtctggggccaacaatgccacagaaggcgagggaaatcaagcactcagtaagaaaaatgcccaggaaatacctacaccacaatttgatggtgttgacacatatgaaagggactatactcgtacctttgcacaaccgacatcttatatacgtggaagaggagccagggctgagatcggtgaatttgtcgagtatgaccttgacaatgaagacgaggactggcttgaagaattcaatagcgagcggaagaatataaaccctgaaaagttggaggccctcctattcaagttggaagttttggaccacagagctcgtgaaagagcaggagccataacaccaactttcataggaccagtgccagtcctcttacagctagatgctgctatggaggctttgcagtacttatctgttcgaaatgccgttttccaagctgtatacaactactggaaatcaaagagggagcgatggcaaaagcctattcttcggcgtttgcagccgcctccaccagtgaatgatacaaatccatacaatgtcttcagaccaagagaaaaggctcatcgtcttcatacaagaaggatgcaaagaagggaaaacaatatccaatcattcgaaaaactccgcttggtgcgacgcaacttggagcaagcaaaagcactaatggatgctttgattaagagggaggagacaaagcgggaggccatggagtgccaagttaacctgcagcgtgttcagatgaaatataagcatgaggcccagcttgttgaggatgggactaccttgtctggcttccagcaaacttcgagcagatttgaatcgagcgatgatgatgtggattcagatgatactgcaactgaacagacatacatacgtccagcagttttccatccaaggttttctgctaataagctatctgtgatccctccacttcgcataaagcgtgaacgagagctaaaaaggagacctcagcagaatggctgtgtatttaaaagggtagggtgtctcagtctcctccttttatccttttcatatcgttcac

SEQ ID NO: 143358 - DNA, 584 bp, Zea Mays
tccaagccgtggttcttccctgcgccctccccttgcttctctcttccagctcgctcagtcagcgaggtccctcccatggctgtctgctcgcagtgcctttggttccggccgcagttcggtgctcggagctccatccctggcgagcgccctgctccctgcgcactgctctgctcggagctccctgtccgtcctctctgccgagcgattttccagcgcgcgcgcagccccagctcagtctcttcctctgcgctcggccgcccgcgtctctgctcttctacgccgctgttccctgcgttctctgttcggcgttctgcgtccatcttccccggctcctttcagctcggatccctgcgcgcggagcttttcccctagccaagatcgtccttgcgcgctgccgtcgcctagttcgcgtctcgctcttgctccagctatgttcgtcgcgtcgtgtgtgcagctctatatatgccaccctcctatatcatcgtcgaagctgtcatcccctgttcgatccccacctcaccagctcgctccaaacacaatctcttcatcgtttcgtgtgtcatcaagaaatctcaagcgtcgga

SEQ ID NO: 143359 - DNA, 635 bp, Zea Mays
ttcattcacactgcactcaccgtcatggcatccaccaaggacttctcgttcgtctctgccttcaggtccaacaaatactttttcatgtggatcctctctcttttgaaatgtgaactgacttctttgctcaagtcacttaacctctggtctgaccagttcattatattgttactgagcttggttgatgtatggtgatgggtactacagtaaaagcagtttataattccaagataagaaattctggtgtttcagtttaggccatggagacacaccattgttgtgcaattttgtttagtggtggtgctagatgcacctggattttcatatgtttcatttggagaccggaaactttatgccatttttagtgatgttgcaggctgccctttgtgctcaagttcttccaagacgtcaagcgtgtgcgagaacaaggagctatagatgatcgtgacactttcctccatgcagtgcgagatcccctatgttttcactcaaatgtccaaacaacatgccaacatacatatcaccacatgcattggttcagctgatatcaacacttcaatctgacatgctttctcttcaatatgagctagagaacacccttctagctgactataaaacatgtatcaatgaattgt

SEQ ID NO: 143360 - DNA, 2417 bp, Zea Mays
cctccgattcttcgcctcgtcgttctttctagaacctccgctccgcctaatcccgaacgagactagggaggttccagcgccgccggtgggggagatggcgctggagctgagcctggcctcggcttcgccgccggcgggcggcggcttggcgcagccgccgcccctcgccccacccgggaaggagcagcaagtggccggcgtggggattctactgcagatctccatgctcgtgctctcgttcgtcctcggccacgtcctgcgccgccaccgcttctactacctccccgaggccagcgcctcgcttctaattggcttagttgttggtggcctcgctaatatttcaaatacagagaccaacacaaggacgtggttcaacttccatgaagagttcttcttcttgttcttattacctccgataatattccagtcgggtttcagcttatctccgaaaccattctttgcaaactttggggctatcgtaacttttgcaattcttgggacattcattgcttctgttgtaacaggagttcttgtctatcttggtgggctgacatttctaatgtacaaacttccactggttgaatgccttatgtttggtgctcttatatctgcaactgatcctgtcacagtgctatcaatattccaggaactgggttctgatgttaacttgtatgctttggtgtttggagaatctgttttgaatgatgcggacaatgtcatcagtcagaagtcatgcagcaggcggcgagaacttttttatgatgattctccaatttctcgaaacctttgttggttcaatgtcatcaggtgtgggagttggatttatctctgctcttctattcaaatatgctggattggacgttgataatctgcagaacttggagtgctgcctttttgttctctttccttacttttcgtacatgttagcagaaggacttggcttgtcagggattgtttctatattattcacagggatggttatgaagcattacacatattccaatctttcagacaactcacagcgctttgtttctgccttttttcatttactatcatctttagctgaaacatttgtgttcatctatatgggtttcgatattgccatggaagagcatagctggtcacatgttggcttcatcttcttctcaattatattcatagttgttgcaagggctgcaaatgtcttttcttgtgcatacttggttaacatgtctcggccagaacatcgccgtatacctgtaaaacatcaaaaagcactttggttcagtggtcttagaggggccatggcttttgcacttgctctccaatctgtgcatgaacttcctgaaggacatggaaaaacgatattcaccaccaccactgccattgttgttttgacggtacttctcattggagggtcgacaggaactatgcttgaatctttggatgttgttggagatgaaaacacatcaagagaaaattacgaggacaacaatggttacatgcctccaagttatgaagaaggaacatcctctggaggaggattgagaatgaaactcaaacagtttcacaaaagcacaacatcattcactgcccttgacaagaactatctcactccattttttaccagtcagacagatgatgataacgatgacgacttcagtcagcaaccccaaaaccgaaggctagctttttatgatcaatagcggaatttgatactctacatatcaagctaaatacacggagcagaactgacgtgcatgactgtctatgtgtgatttggtcgaacaaaatatagcaggagcatacttagttgagtagcatatggcagagcatatctgtataccgtaggacaaaaatcataagggttcgaatcagttgttcccatgggggacgaggatgatgatagccaggcagcatgtatatatttctaggcttccttaagaacttagtggggctccagatgaaaagcagtgtgttgttggaattttatagaccctaccttgtgttaggttaaattttaataaacccgaccgtttgtccgctaagtcggctattatgctcttgttgtaattgacgcgttgcaccagttgccccactggctggttgcaccagtgggaaattgacgcgtaccatatataatgttgccatggctgattataaaaattctgcaaagcactgaaagcaaatatcatcccaggtcagggaagtatgctgatgtttattattttaacgttaacatttactcctattctaacaaagtagttcagttttgaaatggttggccggtttaagctggaactagaatttattgcaagtaccatgtagggattgagctggaaagttgttctccagttctgctactgcaagcaagcaaagtgaaggaggtacacaggcataagttatttcttaaacctaagttctgcatgccacatttg

SEQ ID NO: 143361 - DNA, 2344 bp, Zea Mays
gttcttctggaccgatgactttttctggttggttccaagttccaacatgacaggcacgaaggcaagtcgagcagacagcaacatctagcacgaagcaccggccttgtacgcatcctcccttcgcatcgaggaatcgcgggcccaccgcggcaccaaggccccccgcattccgtcccgccgcggcgtcgctcccttgttctctcccgagccgtccgcgaaccaacccgtgctacctccgattcttcgcctcgtcgttctttctagaacctccgctccgcctaatcccgaacgagactagggaggttccagcgccgccggtgggggagatggcgctggagctgagcctggcctcggcttcgccgccggcgggcggcggcttggcgcagccgccgcccctcgccccacccgggaaggagcagcaagtggccggcgtggggattctactgcagatctccatgctcgtgctctcgttcgtcctcggccacgtcctgcgccgccaccgcttctactacctccccgaggccagcgcctcgcttctaattggcttagttgttggtggcctcgctaatatttcaaatacagagaccaacacaaggacgtggttcaacttccatgaagagttcttcttcttgttcttattacctccgataatattccagtcgggtttcagcttatctccgaaaccattctttgcaaactttggggctatcgtaacttttgcaattcttgggacattcattgcttctgttgtaacaggagttcttgtctatcttggtgggctgacatttctaatgtacaaacttccactggttgaatgccttatgtttggtgctcttatatctgcaactgatcctgtcacagtgctatcaatattccaggaactgggttctgatgttaacttgtatgctttggtgtttggagaatctgttttgaatgatgcgatggcaatttctctttacaggacaatgtcatcagtcagaagtcatgcagcaggcggcgagaacttttttatgatgattctccaatttctcgaaacctttgttggttcaatgtcatcaggtgtgggagttggatttatctctgctcttctattcaaatatgctggattggacgttgataatctgcagaacttggagtgctgcctttttgttctctttccttacttttcgtacatgttagcagaaggacttggcttgtcagggattgtttctatattattcacagggatggttatgaagcattacacatattccaatctttcagacaactcacagcgctttgtttctgccttttttcatttactatcatctttagctgaaacatttgtgttcatctatatgggtttcgatattgccatggaagagcatagctggtcacatgttggcttcatcttcttctcaattatattcatagttgttgcaagggctgcaaatgtcttttcttgtgcatacttggttaacatgtctcggccagaacatcgccgtatacctgtaaaacatcaaaaagcactttggttcagtggtcttagaggggccatggcttttgcacttgctctccaatctgtgcatgaacttcctgaaggacatggaaaaacgatattcaccaccaccactgccattgttgttttgacggtacttctcattggagggtcgacaggaactatgcttgaatctttggatgttgttggagatgaaaacacatcaagagaaaattacgaggacaacaatggttacatgcctccaagttatgaagaaggaacatcctctggaggaggattgagaatgaaactcaaacagtttcacaaaagcacaacatcattcactgcccttgacaagaactatctcactccattttttaccagtcagacagatgatgataacgatgacgacttcagtcagcaaccccaaaaccgaaggctagctttttatgatcaatagcggaatttgatactctacatatcaagctaaatacacggagcagaactgacgtgcatgactgtctatgtgtgatttggtcgaacaaaatatagcaggagcatacttagttgagtagcatatggcagagcatatctgtataccgtaggacaaaaatcataagggttcgaatcagttgttcccatgggggacgaggatgatgatagccaggcagcatgtatatatttctaggcttccttaagaacttagtggggctccagatgaaaagcagtgtgttgttggaattttatagaccctaccttgtgttaggttaaattttaataaacccgaccgtttgtccgctaagtcggctattatgctcttgttgtaattgacgcgttgcaccagttgccccactggctggttgcacc

SEQ ID NO: 143362 - DNA, 964 bp, Zea Mays
gagcaacgtcacctatcctttctgcctccctcactttcccatgtcagcaacccaacccacatccaccggaagatgagagctccagctccagctgctcctattcccgcgctgctctcccgctgctcctcgcctccctcctcggccccgcgccgcctcctctcctcctcccgcacgccagccgcctgctgcccgcctccggcagtcgtccgctctgtctccgtcgatttgctggcggtcgccggggagccggctgtcgcaggcgccccctccgcaacgccgtgccgtcgcctcatcctcctccgtcacggggacagcgccaccgggggccgcttcaccagagatcatgacagacctctaagcaaggctgggagagctgacgcaatcagcgtctctaataaactccaacagatgggatgggtacccgagcttattctctgcagtgatgcaatgcgcacaaaggagactcttaagattctgcaagagcatgtccatggattgtctgaagcagtagtgcactttatcccaagtttctactcaattgcggcaatggatggccaaactgcagagcatttgcaaaaggcgatttgtgaatattcgagtgatgagatcttaactgtgatgtgcatgggtcataataaaggatgggaagaagccgcctctatgttttctggcgattcagttttgcttgagacatgtaacgctgcgttgctagaagctgcaggcaaatcatgggttgaggccttttttgtggctggtctgggaggatggaagctccatggaattgtaaagccatgaattattgtaactaaaagctagatgtaattttttagctgtttcttaattattattattaacctttgtgtagtggtttttacatgccactgaagctttcggtctgaaggtatcaacatggttagatagatgagatgagatgaatgaattcttccacggtccatgagttata

SEQ ID NO: 143363 - DNA, 4072 bp, Zea Mays
cttcttctccctcctcgtgcatcttcgtctccaattgctgaagtagtagtaggttggttggtctgttggtggtgttcttcattcttgatgtggggttggtttcttcgcttggccaagtgaggtcatctgctccacagtcatgtgaagttgtccaagaattcggcaggacggagaaaccggcggcccttcttctccattgttcgctcatcttcttgcctgcgattgcggcaaatcgacgcacgcgaattggaaccatggccgcctccacgacgtcggctgcgtggttctttgtggctgtggtgctgctggttctgcttcatgcgacggcggccgccattgctggcgcagaggaggcggcggcgctgctcgccttcaggcgtgcgtccgtggcggacgacccgcgtggcgcgctctcgggctgggcgcaggccaacgccaccgcgtcggcaccgtgctcgtgggccggcgtctcttgcgcgccgcagcctgacggccgcgtcgtggccgtgaacctcagcggcatggcgctcgtcggcgagcttcgtctcgacgcgctactcgcgctcccggcactccagcgcctcgacctccgcggcaatgccttctacggcaacctctcgcacgctgcggagtcggcttcgccgtgcgcactcgtggaggcggacttgtcgtccaacgctttcaacgggacgctccccgcggcgttcctggcgccgtgcgccgcgctgcagtccttgaacctgtcgcgcaacgccctagtcggcggcggcttcccgttcccgccatcgctgtggtcgctcgacctgtcgcgcaaccacctggcggacgccggcctcctcaactactccttcgccggctgtcacggcctgcggtacctcaacctctccgccaaccagttcgtcggccggctgccggagcttgcgccgtgcagcgtggtctccgtgctggacgtgtcgtggaaccacatgtccggcgcgctgcccgcggggttgatgtccacggcgccgtcgaacctgacgagcctcagcatcgccgggaacaacttcaccggggatgtctcggcgtacgagttcggcggctgcgccaacctgacggtgttggactggtccttcaacggcctgagcagcagcaagctgccgccgagcctcgccaactgcggccgccttgaggtgctggacatgtccgggaacaaggtcctcggcggcccgatcccggcgttcctgactggcttctcctcgctgaagcggctggcattggccggcaacgagttctccgggcccataccggatgagctcagccagctctgcggcagaatcgttgagctggacctgtcaggcaaccggctggttggtggcttgccggcaagctttgccaagtgcaggtcactcgaggtgcttgacctcggtggcaaccagctctctgggagctttgtggacgatgtcgtcagcaccatctcctcgctccgcgtgctgcggctgtcgttcaacaacatcaccgggcagaacccgctgccggcgctggcggcgggttgcccattgctcgaggtggtcgacctcgggtccaacgagcttgtcggtgagatcatggaagatctctgctcatcactgccgtcgctgcggaagctgttcctccccaacaattacctcaatggcacagtgccgaagtcgctgggtaactgcgccaatctggagtccattgatcttagcttcaacctccttgttggcaagattccggaggagataatggtgctgccgaagcttgttgacctggtcatgtgggcgaacggcctgtccggcgagatcccggacatgctttgctccaacggcactacactggagacgctggtgataagctacaacaacttcactggaggcatcccggcttccatcttcagatgcgtcaacctcatctgggtgtcgctctccggcaaccgcctgacggggagcgtgcctcgcggcttcagcaagctccagaagctcgccatcctgcagctcaacaaaaaccagctgtctggccctgtgccggcagagctcggcagctgcaacaacctcatctggctggacctcaacagcaacagcttcaccggaaccataccgccggagctggctagccagacagggctcattccggggggcattgtttcagggaagcagtttgcgttcctgcggaacgaggccggcaacatctgccctggtgctggtgtgctcttcgagttcttcggcatccggcctgagaggctggctgcgttcccgacggtgcacctttgcccatccacaaggatctacaccggcacgacggtctactcgttcgacaagaatgggagcatgatcttcctcgacatctcctacaaccgcctcaccggtgcgatcccggcgggtcttggcaacatgatgtatctggaagtcctcaacctggggcacaacgacctcaacggcacgataccgtatgagttctcagggctcaagctagtcggcgcgcttgacctctcaaacaaccatctcaccggtggcatccccccgggcctcggtggtctcactttccttgctgacttggacgtatccagcaacaacctgtctggtccgattccttcgactgggcagctcaccacgtttccgcagtcccggtatgccaacaattctggcctctgcggcatccctctgcctccctgtggccatgacccagggcagggaagtgtgccgtcagcttcatctgatggaaggaggaaggtcgtcgggggaagcattcttgtcggaatcgtgctctccatgctcacgctgttgttgctgctggtcaccaccctctgcaagctcaggaagaaccagaagactgaggagatgagaaccgggtacattcaaagccttccaacatctggcacgacaagctggaagctgtcaggtgttcacgagccactgagcatcaacgtggcgacatttgagaagcctctgaagaagctcaccttcgcgcatctcctcgaggccaccaatggcttcagtgctgagactctcataggctccggcggctttggcgaggtgtacaaggccaagctcaaggacggcacggttgttgccatcaagaagctgatccacttcacaggacagggcgacagggaattcacggcggagatggagaccatcggcaagatcaagcaccgcaacctcgtgccgctgctcggatactgcaagattggcgacgagcggctcctcgtgtacgagtacatgaagcatggcagcctagatgttctgctgcacgacaaggccaagactgctggtgtgaagctggactgggcagcaaggaagaagatcgccatcggtgcagcaagggggcttgccttcctccaccacagctgcatcccgcacatcatccaccgggacatgaagtcaagcaacgtgctccttgacagcaacctggaggcccgtgtctctgacttcgggatggcaaggctgatgaatgcactggacacgcatctgagcgtcagcacacttgcaggtacgcccgggtacgtgccacctgagtactaccagagcttccggtgcaccaccaagggcgacgtgtacagctacggggtcgtgctcctggagcttctgtcagggaagaagcccatcgacccgaccgagtttggagacaacaatcttgtcggctgggcgaagcagatggtcaaggagaacaggagcggtgacatcttcgatcctacgctgacgaacaccaagtcaggggaagctgagctctaccagtatctgaagatcgctcgcgactgcttggacgaccggcccaaccagaggccaaccatgatacaggtcatggccatgttcaaagacctgcaccttgaccccgacagcgacttcctcgatgggttctcgatcaactcatcgacgatagacgaatcggcagagaaaccgacttgatgctttctcatgagcctttgcagattttgattccatggtccctcgaggggtacgatacaacagcagctagctcaatcattttattttagattggtaggaaaaagagtggcctcctccgatttagtaggaaaagttgtgattttgattccagtcacactcactgtaaatag

SEQ ID NO: 143364 - DNA, 552 bp, Zea Mays
aaccaaaatataggatctgcctgataagtaatgcgtataaacactttaggtcttttagttctaaagttgtaattggtatattgtataaaatatgcttggttataagtgtttcatcctttttagtgtagattatctatcttgtactatttatactcgtgctcatacatgtgcatcgtgcatcccatgaggtacattaattgatcgcgtgatgcggaagacgagccaagttgacctcaagatggtgctaggagtggacctctgccgcaagacgacgtcgtcagtcggacgaacctgaagatggataatctgacgaatgtcaagacaaaagatggtcgtcaagcggacgtcgtctaacaacactaacctagtgttatccaagcaagccccggtgcatttgccacctccttctgttttaaaaagttttatcaccttgaatgatgcattaggtgataggagttgtgtgatcaaacagttgatgcatttccttctttgattaaacaaccctaatacctattttatgaaaatttagtgatgcttagccctgcttattaa

SEQ ID NO: 143365 - DNA, 100 bp, Zea Mays
aaggtattctatatttaccgttgtgatcgattcgatggagttgcggtctcgtgggggctcttcgtcgcaggcgggttgtggtagcaaccatagtcgacgc

SEQ ID NO: 143366 - DNA, 936 bp, Zea Mays
gggtgcaccctgtcccagaacgcgtgctggtcgcggttgctgcacaccgtggcgttgggcaggcagtccgcctcggcgccgaacctcccgcccccgcagcacgcgtcggcgacgtccgtgtaccccgacgcccccgggtcgtcgaaggtggccatcgacaggccgtagtagtcggcgagcgagtaggtgaagcccggcaggcgggaggcgaggctggcgagcaggaccgcgagggcgtcgtccaggcccgacgcgagctcgttcaggccgtccaagcacgcgcccgtcttcgtcccgccggacagccgcgccacggggacgcagccgagcagccccacgttgatgatggcgaacttcctcgcgcccatggtgtgcagctcctgcagtgcatgaatgatggatgtaatgtatatatcgatcttcttgattgctccgatccgccacatgcgtacggaatacataggagtgcatacttacagtgatggttgctgagtagttggagatgaggcttgcgtagagcgtggcgacgtcacgctgctggtcggcagctgacttgttgttgtgcgcagacgcctgcgcggtggcgaagacgaataggtcgttgctgccgacgctgaagaggaagacggacctggagagcaggaggtgggtcgcacgggagcccagcttcgtgaccaactgtgccttggtggacttgaagtactgcacctgcttcgacaatgggatgttgttgcccgcgttctgcatttcagtggagtcgaggatcccagctcctccggaagcatagctgacaccgctgccacgagctgtgaggaccagacggccggtgctaggtgccaacgacaggtatggcggaggactagacgcgaaccccatgctctttgctgcacatccatgcaagcatgtatgtagcgcgtatacaaaaaaataaaaaca

SEQ ID NO: 143367 - DNA, 252 bp, Zea Mays
ctggcgacctgcggcaacacgaagtaggggtgcagccccagcccgacctccgtgtccttggcccgtttgtaccgcctgcccaccaccgtcaccaccgcgtccgccacaggctggaacacggtcgggtccaggtacgtgaacgtggtgccggagtccacgacggcgccttcggaccctgctgcgttggccgtgaacgcccgcaccgagagccacaccgccttctcgcccaccgtcacgcccctcaacgccagg

SEQ ID NO: 143368 - DNA, 2668 bp, Zea Mays
atgcagagcctaaccgtagcaagagcgcttcctcccgccgtggccacagctcggcggcggccgcgcgcgtcctcttctagcagggaagcggttttacaatgttggaagtacgaattaagtcaagaccaatatctgggaggatccctaaggataggttcgtctcaaggaagtttggacatacatcgctcaacaaatttgctcagaccagctgctgcatctgtttcagttgaacaagatgaagtcaatacttatcttccaaaaggtgatatgtggtctgtgcacaagtttggtggaacctgtatgggaacatcccaaagaatccagagtgttgcaaatatagttcttggtgattcttctgagaggaagctgatcattgtttctgcaatgtctaaagtaaccgacatgatgtacaaccttgtacagaaggctcagtcaagggatgattcatatacaatagcattggaagaagtttttgagaagcatatggttgctgcaaaggatcttattgatggagaagatcttgcaagattcttgtctcagttgcactcagacgtcagcaacttgcgagccatgctccgtgctatttatatagctgggcatgcgacagagtctttctctgactttgttgttggacatggagagttgtggtctgcgcaaatgctatcttatgcaataaagaagtcatactttggggcaaatgttttgcatccgcgcaccattatacctgtgatgaaagacaacattcccattgttattaggaacatgttcaatctctctgcctctggaacaatgatttgcaagcagccggccaatgaaaatggtgatttagatgcatgtgtcaaatcatttgctactatcgataatttagcacttgttaatgttgaaggaactggaatggctggcgttccaggtacagcaagtgctatatttagtactgttaaagatgttggagctaatgttatcatgatatctcaggctagcagtgaacattcagtatgctttgctgttccagaaaaggaagttgctgcagtttctgctaggttacatgataggtttcatgaggcattagcagcagggaggttgtctaaggttgaagttattaatggttgcagcattcttgctgctgttggtctgaggatggccagcactcctggagttagtgcaatactttttgatgcattagcaaaggcaaacattaatgttcgagcaatagctcaaggttgcagtgaatacaatatcactgttgtattgaagcaagaagattgtgtaagggctctgagagctgctcactcaaggttcttcctctccaaaacgacacttgcagttggcatcattggacctggtttaattggtagaacactccttaaccagctcaaggatcaggttgctgctctcaaggaaaatatgaacattgatctgcgtgtcattggaataactggctcaagtacaatgcttttgagcgacacgggaatagacttaacccagtggaaacaacttctaaaaaaggaagcagaaccagctgatattgatagttttgttcatcatttatccgataatcacgtatttccaaacaaagttttggtggactgcacagcagatacaagtgttgcatcccactattataattggttaaagaagggtattcatgtcatcacaccaaataagaaagcaaattctgggccacttgatcagtacctgaaattgcggactctgcaacgtgcctcgtacactcattacttttatgaagcaactgttggtgctggcctcccaatcattagtaccttgcgaggtcttctggagacgggtgacaagatactgcgtattgagggcattttcagtggaactttgagttatatatttaataatttcgaaggaacaagggcattcagtgatgtcgttgctgaagcaaaagaggcgggatacactgaacctgacccaagagatgatctatctggaactgatgttgcccgaaaggtcattatccttgcaagggaatcaggtttgaggcttgaactttctgatattcctgtgaagagccttgtgccagaaacacttgcagcatgctcgtcagcagatgaattcatgcagaagctaccatcctttgacgaggactgggccaggcaacgcagtgatgctgatgctgcagacgaagtcctgcgttacgttggagtggtggatacggtgaacaagaggggacaggtggagctacgtaggtacaagagggaccacccgttcgcgcagctctccggctccgacaacatcatcgcattcaccacctcgaggtacaaggagcagccgctaatcgtgcggggcccaggcgcgggcgcggaggtgactgcgggtggcgtcttctgcgacatcctgcggctggcgtcttaccttggcgctccttcttagagcttccacttacagttgtcaatttgaagaggcagatggacagtgccctgcatgatgcctccgtgtttaggcttattatggacttgctcaaagttgttctgaataagtgccaggaaataaggcctctatctatttaggcctctatcttcggggtagctgactaagtgttgttattgctacggaatccagaattctgtgaattgaaatgaattgtaccgatgaagactgtttgcttgtgtctactggctactgttatgtgtcggtgttttaa

SEQ ID NO: 143369 - DNA, 453 bp, Zea Mays
atggcggtgctggtcgaggtcaacgcggcggacgctggtgacgaggtaggagacgtaggtggtcgcggattcggggacgaacgaggcgggcggctacggggccatcagcgtggtcagccgcctcctcatcccggtcccgttcgaccagccgccgccggattcggggacgaggtgctggcccgccagatcgacgccggcaagggcgtaggccgccccgcgggcgtgctcatcaacgacaagggcggcaaggacctggaggccgtgcctgccttcaccttcgaggccggcaaaacgtaccgcctccgcgtctgcaacaccgggatcaaggcgtcgctcaacttccgcatccagcgcagatctcacctaccttctagccgggtcggagacagtgaggagggcgtactcggaggccgccaccgcgtggatctcggcgatgcggaggaggacgggtag

SEQ ID NO: 143370 - DNA, 524 bp, Zea Mays
gttcatagccaacccgcattaacctcaatcctccaacacccacgacaagtaccagtccacccctgccacaatacccacggagttcttgactcggcgtgcccgattctgatgcacctctatggtagagctcaaaccaaagacatggagagtatcactgacttacatagatcacggtgctcgcgcgaggttgattgaggaaagcgtgagttgtatggtatgtggtggagctgcccatagcaccagatcacgacgacatgcccctgcttgagtcggcctagccacgacaaggtgatcactcaggtgagcgcggtcaccagactgggtgttggcgcgcgtagttctagacagggctaccctggggctagggagagggttaaccctggcaagcacacatgaatctcacaccattgcagtagtctgtgagtagagctcgaggtagaaaggagatttccattgctcgctgccctttaaacacctgaacattgggcaattgtcactgcatttgcttaacatgtagtggacat

SEQ ID NO: 143371 - DNA, 159 bp, Zea Mays
atggcgatcagcattaccatcgtcaagaggatgacacggacgaggaatcgtgatgggtctcgccaccgccatcaacgagagcagcgcgtcacaaatggtagcaggcttggatttggaggcgccttcgacgagcacggtggtgcattagcaggtcgttga

SEQ ID NO: 143372 - DNA, 336 bp, Zea Mays
atggtgccccgttctgagtttggaggttcctctgctccttctccggccttgaccgcaccctctcctggcacagagattgaggtcgctggtttcaacaagccaccgaggaccatcgttgagcactccggcggcctaatgcaccaagagcgacttgctttggtggatctgatcattgttgacattcctgaacaagtgtctgaggttattctacatgatgttcactcaaggtttcatgtccctttggaagagatgaggctaagtcgtgcggattcaaagaccttgtttgtcatgcctgattttgaagttgtcacccgggttctcaatggtggagggtag

SEQ ID NO: 143373 - DNA, 1077 bp, Zea Mays
ctactctgagcattcgggtagcagatgaatttatcgggtctcagttatatcaaaagaaatctcctagttggcaatgtcattttggtttgaccaagttaaacctcatttatatctagatactagatttaaatctaagagcacaaatatatatggattagtgtgtaaaaaaagaagaaagtaaaaaaatatcttttctatcctatccccacgcggccctccctcagattttttttcattggccgatggccttatcacctcgcctgatattcctggaggccgcatcccagcttcttcttcctcacacgcatgccgacgctttcctctccagccgatgtccatctcccttccagcacaaacatggccgcctctccgagccccatcgcccatggcagccgtgccctgctcccagctccctcacctcccccatggccgagcgccctctccagccaccggtgctcgccaagcccatctcccatggcgcccagcccagtttccagcgccctcctccatcaccgcgcacctctggtcgcttcagctcatctccctcgccgtggagctctctgcgtgcgcccctggttcctgcaccctggcctccctcatcttccctgggtccggccatagctggccgccgctgctccatctcgagtcgcgctcgcccagctctgttggctgcgccctccctgccgcagctcgcgcctgtcgtcctgcttactcgagctcgccccggcctcctgctccctccagcccttcccatggtgttactactgctgtaacaagtccgacagaagaaccatccaatgcaggcccacgaaggggatccaggctgcgccggcctagtactcggcttagggagtttgtgtgagttgtaattgagatataagggaatattgattagggaaaaggtatcagacttgtaataagaattctggacagactgtcgctctgcctatctactctaccatctgctcttcttcctgtccaagtcttcttcctccctcctggcatctcctaacaattggtatcaaagacctcgtttcggtctggagcagcaccaccgttactatactcgccgacaga

SEQ ID NO: 143374 - DNA, 1518 bp, Zea Mays
gcagtccgcagagcagagtccatcactcttgttgctccaatataattatcttcctcttcgtcgctcgcacgtccgatccgtcctcacgtaacacgccgatagatggagtcgtccatgtccatgtccgccgccgcctcggtcgtcgtgaggacatgcgttccggccgctgtcatgttgcccctctccccgtcctttactaggcccgccccccgcaccaccgggcgaggcttccgctgcaggtgcagcagcaccagcagcgccaccaaggactcggcggtcgtgtacagcaggctgctggacgacgcgctgttccggtcggcggaggtgatccagtgggagagcggcaagtccatgaacgccatcgccacggcgcagggcatccagatccggcggcgctgccggcccaggtacccgtccgagggcaccggcgccgagcgcgccgtcccgcgcaacatcctggagcagatcatctgggacaaggaggtggaggtggcccagcgcaaggccaggacgccgctgtgcgaggtgaaggcgtccgccgcgctcgcgccgccgcccagggacttcgtcggcgcgctgcgcgccgcgtgccgccgcaacgccgtccccgcgctcgtcgccgaggtcaagaaggcgtcgcccagcaagggcctcctcagggaccacttcgacccggtggagattgctcgcacctacgagaagaacggcgcggcgtgcctgagcatcctgaccgacgagaagcacttccaggggagctttgagaacctagaggccgtgcgcagctccggtgtaaactgccctctgctctgcaaggagttcgtcatcgacgcctggcagatctactacgcgcgctcgaaaggcgcggacgcggtcctcctgatcgcggccgtgctgccggacatcgacatcacctacttcctccgcgtctgcaagagccttgggatgacagctctcgtcgaggttcatgatgagagggagttggatcgcgtcctcaagatagacggtgtggagctcatcggcatcaacaaccgcagtcttgggacattcgaagtcgacactgcaaacacaaacatgttgttagagaagcgtggcgacatcattaacgagaagcgaatacaggttgtgagcgagtctgggctgttcactcccgatgacgtggcatatgtgcaaaaagctggtgttttcgcggttttggtaggagagtccctgctgacgcaggaagaccctggccgagcgattgctgggctgttcgggaaggagctgttaccttaatgtatattctcccgttgttccgctcgtattgtttagctaattattatattgctgtacgtatacgtagcaataatcccggccgggctttcagagtgaagaaaggctgcaaagcgcatatatgaacgaacaaagctagcgctgtatttgtaagatcgagcagttgtttgttcacttctttgcatatataataatcatataatgcgcagtgatttgtttaaggcgcgcactgggatatcagttcagatt

SEQ ID NO: 143375 - DNA, 249 bp, Zea Mays
aacacgttgctggagtccgtgcgcatggtggagggcaaggagcaggtggttgtcggcacgctgcatcgcctcacgcttgaggccatcgaggcgggaaagaagaagaagctctacgagaccacctacatcaagaacctcatagcgcgaatggggccattcacggaccgcatcgtcgttgaggtcgcggtaacactgtattggttgttgtcaaaaaagtttgtgagtattaagggcgatgataatatttaa

SEQ ID NO: 143376 - DNA, 2123 bp, Zea Mays
gagaaatgcgtcgtcgcttcgcgtgcggcttgcccagctagctccttgtacaaagccaagcccacaaggcagccagagcgcggggtagcgattacaccttgacacctaaggccagagattggagagagaaagaagcagctgagtggagcaagaaagaagaggtcatggcggtgtagtctatcagctgagtgggaaagagtggagcaatggtggggggctgtgccagcggcgacggcgccgccgaagggacgctcgcgaggtggcggagggcggcggccaagcggatcggcctctcatgcgcctccttcttctcctacgccgcctctccctccccgcctccttccaagatcatctcccactccgcactgaatgcgcctgatggagagcagcaaaagatggaggaacccaccagcaccagagtggctgacaagaatctatgtgcaatatgtttggaactcctcagcacgagcatcagcagcgatgttgacagtggtgaggcggcagcaatctacacagcgcagtgctcccactcattccacttcctatgcatcgcctccaacatccggcatggcaacgtcagctgccctatctgccgtgcacaatggtctgagctaccacgtgacctgaaggttccaccattgctgcacaaccagtcagacccaatccttcgcatcctggacgacaacattgcgtcatcccgtgtgaaccgaaggtcctccatccgtgctgctcgctacaacgatgatgacccggtagagcctttcaccttggctgagcatgtggatccatgtctccgctttgtcctcatcccggcaccggtgtcagctcaccatcacgtcctcgggcattacccctgtggacgcatgttgccactgcaacagccatgccagtacagcggctcctccatgctttcaccaccgcagattgcttcgccaagtggtcaaaggcgagcctacctctctgtcagtcttgctccacagccagccatggacctggtcctggttgccagccctaacggaccacatctgaggctcttgaagcaggcaatggcgcttgttgtcttctccatgagggcaattgaccggttagccatcgtcacgaatgccaccactgcaacccgtgctttccccttgcgccggatgacgtcccatgcaaaaagaatggcgctgcaggttatcgaacacctttgctgtgttggtgggactgatccagtaggggctctgcacaagggcctcaagatattggaggaccgggcgcatcggaacccgagcaactgcatccttcacttgtctgatcatccagtccgcaactgtgttggtggtgtggacatgaaccactccagcatcccagtccaccagttccatgtcgggctcgggttcggtgtgcggagtggatttatcatgcatgagtttgaggagctcctcgcgcggttgcttggcggcgtgataggcgacacccagctgaggataggggagcatggcggaatggtcaggcttggagagctgaggggtggtgaggagcggaggataccgctcgaccttgcggcagattgtggcttcatactcgttggttacagttacctggagggtggaagagaggagcagctgaggacaggtgagatcgccgtcgggttcgaagagaaaggtgacaacgggtactgtggaatgagagagatggggctgagcattggcggcgagaggaggagctgctgcgccgagaggcgggactaccatgacccgttcatggcacggcgatgggcgaagcatttcaacgtgtacagggcctgagtagaagagcttgatcgtcagctgctgcgaaatatgagtcttgttggtttcttttctctctttttttccccattcctgcaagcatctaggtttggtgtctgctttttggcttcttttgttgtggatctgaatccctgtaagatctctctctctttctctttttgcatgaaatgtgtgggttctgtctgacaaaatctgcttgtgttgtgtgaatctgaacgtgaacagatcatactggagaaaaaaaagcagcaaaactagaaatattatttgattgagcttgcaaatttggaagccagggagttaaagaattattctttcgaagttgtaatgcta

SEQ ID NO: 143377 - DNA, 1833 bp, Zea Mays
cttgaatgcagctgtattgccggcagtgtacaaatgtatcctactccataaacacatttgtgtgtcgatatgcagatctcccactccgcactgaatgcgcctgatggagagcagcaaaagatggaggaacccaccagcaccagagtggctgacaagaatctatgtgcaatatgtttggaactcctcagcacgagcatcagcagcgatgttgacagtggtgaggcggcagcaatctacacagcgcagtgctcccactcattccacttcctatgcatcgcctccaacatccggcatggcaacgtcagctgccctatctgccgtgcacaatggtctgagctaccacgtgacctgaaggttccaccattgctgcacaaccagtcagacccaatccttcgcatcctggacgacaacattgcgtcatcccgtgtgaaccgaaggtcctccatccgtgctgctcgctacaacgatgatgacccggtagagcctttcaccttggctgagcatgtggatccatgtctccgctttgtcctcatcccggcaccggtgtcagctcaccatcacgtcctcgggcattacccctgtggacgcatgttgccactgcaacagccatgccagtacagcggctcctccatgctttcaccaccgcagattgcttcgccaagtggtcaaaggcgagcctacctctctgtcagtcttgctccacagccagccatggacctggtcctggttgccagccctaacggaccacatctgaggctcttgaagcaggcaatggcgcttgttgtcttctccatgagggcaattgaccggttagccatcgtcacgaatgccaccactgcaacccgtgctttccccttgcgccggatgacgtcccatgcaaaaagaatggcgctgcaggttatcgaacacctttgctgtgttggtgggactgatccagtaggggctctgcacaagggcctcaagatattggaggaccgggcgcatcggaacccgagcaactgcatccttcacttgtctgatcatccagtccgcaactgtgttggtggtgtggacatgaaccactccagcatcccagtccaccagttccatgtcgggctcgggttcggtgtgcggagtggatttatcatgcatgagtttgaggagctcctcgcgcggttgcttggcggcgtgataggcgacacccagctgaggataggggagcatggcggaatggtcaggcttggagagctgaggggtggtgaggagcggaggataccgctcgaccttgcggcagattgtggcttcatactcgttggttacagttacctggagggtggaagagaggagcagctgaggacaggtgagatcgccgtcgggttcgaagagaaaggtgacaacgggtactgtggaatgagagagatggggctgagcattggcggcgagaggaggagctgctgcgccgagaggcgggactaccatgacccgttcatggcacggcgatgggcgaagcatttcaacgtgtacagggcctgagtagaagagcttgatcgtcagctgctgcgaaatatgagtcttgttggtttcttttctctctttttttccccattcctgcaagcatctaggtttggtgtctgctttttggcttcttttgttgtggatctgaatccctgtaagatctctctctctttctctttttgcatgaaatgtgtgggttctgtctgacaaaatctgcttgtgttgtgtgaatctgaacgtgaacagatcatactggagaaaaaaaagcagcaaaactagaaatattatttgattgagcttgcaaatttggaagccagggagttaaagaattattctttc

SEQ ID NO: 143378 - DNA, 4137 bp, Zea Mays
aaaaaaattaaagagaaaaaccattctcggcttcctcatccgtcccatcgaaccgcaaaccctaacctttcgattgccgccgcccgccgctcgctgctgcccgccgctcgccgcggccaatgatggcgaggggccgccgcggcccgggtggacgggggaggttcggcggcggcccgctgggcgacgagcggccagtccgtcacggcgtccgcgtcgaggagaacccgtacttcccattaccgcgtcgggcgtcgggctggggagtggcaccgccgtcgcggcacctgtgggtgggtggcctggcgcccagcgtcacggcgtccgacctgtcggagctgttcctccggtgcggcgacgtcgagggtgttgcccgcgaacccggccggaacttcgcgttcgtgagcttcctgcgggagggggacgctgtggccgcggtgcgggagctccagggggctcgcctggctggggcgcctgttaggatcgagttttccaagggggataaggcttcaggtagctcaatggatgacagatatatgcaacgtgctgatgagcggcattctattgaacgtgggagaaaacggcaaccgagtcctgaaaacacaatagataagcataaaagaaataggtcgacagatcctagcgatgtgttatggataggctttcctcctggtttaaaggtagatgagactcttctgtgggaagccttttctccttttgggaaggttctcagggtaacaacattcccaggccgaacatatgcatttgtccagtacactagtattgcagcagcctgcagagcaaaagaagcacttcagggaaaacttttcaataatccacgagtaagcatatgcttttctcgaaatgaaggtgctgtgccagaacttgggaaacaatcatttgttgcccaatatcatccccaacctagtgcccgacctgtcgtcggagaccaagattatgaagactttcctagggctaggccttttgatagtcctccaagaaattttcgcatgtcaccaccacattttgttcctaatagtttgccaagagatgctgatgatgtgggcttcagcaagggtaattattttgaacaggaaactggaatagagcttggccgtgtgtctaatattgagccttttagaacgcgggagctgggtcaagaaagaaggcttcctgaggagcatgagccccatagacaaagccctactgctaggagtgatgcaccatggaagccatggaacaacattccttttgacagaccttggagacccttaccattcgaagattcttgggacgttgaagacaagtcatatcttatttcaaagaagctgaagggtgctcaagtgcatgatactgaacttcctgaatatcttttctccggatttgatcgaggaaaagtttaccctgagtaccaaaggaggccccatcatgatctttcagaagatggtttacagtctagaacctcttcgtctacggatttgcatggtagacatcatgtgcatcctttaaagaatataactccacttacaaataaacatgaaccatggcgtgctcaagagagttttgataggcgtttagggaaaatggatagatctactcctgactataatgaacctgctcttaaggatgaatggaaatggaatggtacaatagcaaagggaggcacaccgatctgccgagctcgatgcttccctgttggaaaggtccttaacttcatgctgcctgagtttctggattgcactgctaggacaagtctagatatgctttctaagcactactatcaagctactggcagctgggtcgtattttttgtcccagaaaatgatgcggacatgacagcttataatgatttcatgagttatctaggtgataagcagcgtgcagcagtctgtaagcttggagagagcagcaccttgtttcttgttccaccttcagatttctcagagcaagtactgagagtgcctggaaatgtcagcatatctggagtcattctgaggtttcagcagtcaaatccagattacagctcaccaaatcgcaaaccattggatagagctcacccatcttctgcaagtaattttaacactgatgtaagaaattgtgaagatctgcatgcactgagaaggctcaatccttcagatatcagcacattccctcagggtccagattatgtctgctcatcaggtggaagctataccccagcaaatgcagattttattccgccctataagccagagagtgctcctccatatgtcgtccctcaatcaccgcaagaaaggccgccagcggagctccctatgggtattgcacaaggccaacaccagcaactcccaaacaggctgccctcaggatggtccaataacctggataatccaaatccaaatccaggttctggtaacttcagtttggcacagggtgcaatctctaacaggacacaggatccgtacacatttgctcctggagtagtatcaactgggacagcttcagggtatgcatcaggtgaagcatccaacagcatgtcctgggcttccatgcaatacaactcacagcaggtagctagatctgatcaacctactattccagtatcactgccacctgatcaacttgcacagctagctgcccttcttgcacgacaaaaccaacctagaaaagttggtttgcctgtggacagctcaaacaatctgtctggattcatacagagtcccaatcctcatggacatgctacaatgatgccaggcaactctggctccatccctatccagaactcactgccacctgttccatctatgcaacaattacatgccaatgtgccagtgtcaccaataggctcgctacctgcaaatccattcaatgtgccgaccagtgctcctgtactttgtaacagcacttcgcctatgctgcccagtcatgctttggtcaacccagctcattcttccatgccaatgagaccgttcattcctccacttcctgaaggtcctccaccctttcagcagcaaacatcaagtgctgtcacagtgcagcctttaggtccttctagccagcagtctagccaacaactactggctcaggaccttgatggagatcctcaaaagcgccttcaagcaacactgcaactggcagcaaccctgcttaagcagatacaaaatcaatcaaatcctggtggccagaaataaatataaggtattggtaaatgtctagctgcaaggatcatcatatggtgccatcctgaggagctttaaacttactgttgtggttttataccatcacctcctgtgatttgaatgtttatgatgagttctaagacgctttggctttcttatgtacatggttttttgctatgcatccagatatacattggctagaaaacgttgaaaggtcttttaagttggaatggagggagttagctgttgcctgcatttgtttgtttgcctggcttgttccaagagggtatgatggtatggataacttatgatggctggcgtttattggtacgtgcaaggctagagaggcttatgagcgccccccctgacgtgccatctgtgtaccagacggtaaataaggcgtcttactcagatgtttgcttggactcgtccgacagttgtacaatttgttacatgcattgggggcgaagctgttgacattgttttagcattgctagcaaggggttaaagagcgtgactcgtgatgcgtaatctttggtcattcgaaactggctgccgcccgccatggagcatcttttagactgtcctgggatgctgaggtgcttcaagattcagaacagctcctcttttttttttcttctctctttcagtttttaatcctcgctgatctttcagcctttctcctttgtgtgggtgtagtgcatgattgcggcacttgtttcagtgcatcagctttatgctgctctctgccatggatgaccggcctgtctgctaaagagcatgcctgtgccatgccaaggcggctgttgttactccctagtcactgcttgctaaatgctactcctactactagaaagttggcattgcatggagatctgggtatgtatcatgatggcactgcactgcgttttaaaatgcagcagatttattcccctggtctacctcgcagtcgtggatgaagaatgatggcctttttcctgtg

SEQ ID NO: 143379 - DNA, 647 bp, Zea Mays
aaaaaaattaaagagaaaaaccattctcggcttcctcatccgtcccatcgaaccgcaaaccctaacctttcgattgccgccgcccgccgctcgctgctgcccgccgctcgccgcggccaatgatggcgaggggccgccgcggcccgggtggacgggggaggttcggcggcggcccgctgggcgacgagcggccagtccgtcacggcgtccgcgtcgaggagaacccgtacttcccattaccgcgtcgggcgtcgggctggggagtggcaccgccgtcgcggcacctgtgggtgggtggcctggcgcccagcgtcacggcgtccgacctgtcggagctgttcctccggtgcggcgacgtcgagggtgttgcccgcgaacccggccggaacttcgcgttcgtgagcttcctgcgggagggggacgctgtggccgcggtgcgggagctccagggggctcgcctggctggggcgcctgttaggatcgagttttccaagggggtcagtgttgaacatcctctgttcattatatgtttatttaatttgactccaagcaattatcggtgcggtgttcttctcttatcttgtgtacaaaacctaagcctttcaagaaaggctgagtatcaacaattaaatttagggttcacagca

SEQ ID NO: 143380 - DNA, 722 bp, Zea Mays
aaaaaaattaaagagaaaaaccattctcggcttcctcatccgtcccatcgaaccgcaaaccctaacctttcgattgccgccgcccgccgctcgctgctgcccgccgctcgccgcggccaatggtacagctccatcctttatctctcacgttcgtgttaaactgcagctgtcctgatcaatctcgaccggtttttgcagatggcgaggggccgccgcggcccgggtggacgggggaggttcggcggcggcccgctgggcgacgagcggccagtccgtcacggcgtccgcgtcgaggagaacccgtacttcccattaccgcgtcgggcgtcgggctggggagtggcaccgccgtcgcggcacctgtgggtgggtggcctggcgcccagcgtcacggcgtccgacctgtcggagctgttcctccggtgcggcgacgtcgagggtgttgcccgcgaacccggccggaacttcgcgttcgtgagcttcctgcgggagggggacgctgtggccgcggtgcgggagctccagggggctcgcctggctggggcgcctgttaggatcgagttttccaagggggtcagtgttgaacatcctctgttcattatatgtttatttaatttgactccaagcaattatcggtgcggtgttcttctcttatcttgtgtacaaaacctaagcctttcaagaaaggctgagtatcaacaattaaatttagggttcacagc

SEQ ID NO: 143381 - DNA, 521 bp, Zea Mays
aaaaaaattaaagagaaaaaccattctcggcttcctcatccgtcccatcgaaccgcaaaccctaacctttcgattgccgccgcggcccgggtggacgggggaggttcggcggcggcccgctgggcgacgagcggccagtccgtcacggcgtccgcgtcgaggagaacccgtacttcccattaccgcgtcgggcgtcgggctggggagtggcaccgccgtcgcggcacctgtgggtgggtggcctggcgcccagcgtcacggcgtccgacctgtcggagctgttcctccggtgcggcgacgtcgagggtgttgcccgcgaacccggccggaacttcgcgttcgtgagcttcctgcgggagggggacgctgtggccgcggtgcgggagctccagggggctcgcctggctggggcgcctgttaggatcgagttttccaagggggtcagtgttgaacatcctctgttcattatatgtttatttaatttgactccaagcaattatcggtgcggtgttcttctctta

SEQ ID NO: 143382 - DNA, 3075 bp, Zea Mays
ctttggccgaccatgtcacctcatcatcggcattttacgtcccagttttcttcttcttattatgcccccgtgcgaccccaaagaaggagagaactgaagctgcttccactgcctgattattccccaaccagttgttaccattcaggtcatctccgactagtctcacctgcagtgccctacgagcgagcactgtcagcacttgttggtcgccattcctatcccaccagcagccatggcggccgtgacgacaacgccatcgtcgaaaccaaggaaagtaggagaagaccaaggaaggggaagaaaacagcgcccaaccaaggcgtgcgtgcaccatcgtcgtcggagttgtcgactaggacggcgcagagcggcgacccccttgggcgaaaggagctggggcaacacgtggtgcactggctgaagcagggcatgcgccagatggcctctgaattcgcttcctcagaccagccagagacacaaggtaacaaggcattcctgtggtctgatggtgggcacgcggcccacgcggggtttgtagcgcaggcacaggcacacctttctgccactcccatgcccaagggacaggacgctctgtgccgcacggcctccgctcactaccccacgctgttcgacaacttccagagagagctccgcgatgtcctgctgcggcggtaacaagagggccttcttgttgatgatgactggcgctctacacgctcgtgggcgcttctgaaagagatggctagatcggcggagcatcggacggccgcacgccggtctactgctcctgttctgcacaccacgcttggcgtcagcttggagaagacgaggctgatgcaggctagaatcgatggctttgttcagcaaatgaccggccttcttcggctagaacgagatgcggagctggaactggcccaggatcatgaggtgagtgccgccggtacagtgatggatggaatgccgaaaaagccagtggtagctcatggtcaggcccaagaggatggtgacaccatttgcaatttgagagtcatcagcagctcaaccggattaactggtcaacatctagtcttattcagagccgagggaagccacagacttcctgcaaccagactctcccctggagacacggtttgcgtgagagcatgcgacagccagggcgaggttgccgcttcaactccttgcttgcaagcctccgtccataatctcggtgaggatggacgcagcattacggttgcattcagatcacgccgcggcggtgaacctgccttctccaggttcccagggaaatttgcgcgtattgatcgcatacaggctctagcagatgcagttacatacgagcgcaactgcgaagcactgatggctcttcagaagagagggttacagaaaagaaacgcatccatcggggtagtggccactctgttcggagacaaggaagacgcgacgaagccggagagaaacagtctgacggatcgtcgtggaccagaagcacctgacggcggttcgctggagacgcacagccacagcttcgacacctcccagtcgagggctctcgcactggccctggacaaggagaggccagtcctggtgatccaggggcctcctggaacaggcaagacccgtctgctcagctacctcgtcgcgcgcgtggtgcgccggggtgaacgcgtgctcgtgacggctccaagcaacgcggcggtcgacaacatggcggagagcttgtcagcgagtgggctgaagaacattgtgcgagtcgggaacccttccaggatatctccgtctgtggctcccatgtccctggggcagatcgtggccacgaggctcgagaagctcacccgagagttcgagacgaggagatctgccctgagaaaggacttgaagcgtcgcgtacaggacggcggcgacggttcttcagttcgtcagcaactgaaaaggctcggtaaggactacaggaaggagaagaaggaagcagtcagggaggttctggcaaacgccgaggtggtgctgtcgactaacactggcgcggctgacccacttgtgagggggactggaggttgctttgacctggtgattatagacgaagctggacaggcgattgagccatcatgttggatccctatgttgcaggggaagcgttgcattcttgccggtgaccaccggcagcttgcacccgtagtgctttcaagagaggccatggaaggtgggctgggcatgtctctgttagaaagggcttcgtcgctgcacgacggactgctcgctacgacgttgacgacacagtaccggatgcacgagtctatagctagctgggcgtcgaaggagatgtatgacggattgcttcggtcattcccgtccgttgcttctcgactcctcgtcaattatccatctgtcaaggtcacttggatgactcagtgtgcgttacttttacttgatacccggagggcgtatggaagcctaaatattgattgtgaggagagtttagacccagccggtactggttcattttacaacaatggtgaggcagatatagttgcacatcatgtcctcaatcttgtacaatgtggagtccctccaacttcaattgttgttcagtccccttacatcgcgcaagtgcaactgttacaagatagactacaagaatatccgatggcttttgatgttgaggtttcaacaatagatagcttccagggtcgggaagcagatgcagtcgtcatatccatggttcgatcaaactccatgggagaagtcggattccttgccgatagaagacgcatgaatgtagctattacaagggcaaagtcacatgtcgcagtggtttgtgacacttctactatttgtaacaatgctttcctggctaggctcctcctccatatccggcaacatggtcaggttcagcatgtggatcccagttccttggatgggggctttcacctgcaagccttaccctctttaggctagcgatcttgccatgaaatgtgacatgcagtaaatgtcgagttccataatatggttgaaaattattccttctatgccatgaaacctacaacaatacattctgtaccatcaaaagttgtgtgcttt

SEQ ID NO: 143383 - DNA, 537 bp, Zea Mays
ggccgacctagaatattttatgaaattatattttgatgattttctgtagaaataaattaataatacacaaatagcctcagaaattcatgaaattttacagaggcatgacatatgtccactgttggggacttgttctcaaatgctatgaattaagaacaaggcaacacacaatgttaaatatcaaagcccttcgtccttcgaaacattatttccccttgggtataatgaatttcggacgaaggttatgaaggtcataccttcataatcacaataaaagataagaaaagatttatgcataaaatacggaaaataacataattactttaaacattattattaatttatttctatttattttacttatataaacgatgacaaattacaaatgtaccttcggtttgaaggaaagtaagggtacaagcgtgatgccaatgccaagtcagcgtgaacagtacaggagtactgttcatttatttataggcacgggacgcagcccatgtaaaattacattaatgccctttgcttttatcaataact

SEQ ID NO: 143384 - DNA, 645 bp, Zea Mays
atgtatttagctagcgctacgaggcctgacatctcatttgctgtgagcaaacttagtcgatttgtttcaaatccgggagatgatcactggcgtgctcttgagagagttttgcgctatctaaagggtactatgagtttaggcatccattataccgggtacccaacagttctggagggttattgtgatgcaaactggatatctgatgctgatgagatatatgccacaagtggatatgtgttttcacttggaggtggtgctgtttcatggaagtcttgcaagcagaccatcttaacgaggtcgactatggaagcagaactcacagcattagataccgcttcagttgaggctgagtggcttcgtgaactccttatggatttaccggtggttgaaaaacctgtgccggttatttccatgaactgtgataatcagactgtgataattaagataaacagttctaaggataatatgaagtcgacaaggcacataaagaggcgtttgaaatctgtcaggaaattgagaaactccggagtaatagcgttggattatgtccatacgtctaaaaatctggcagatcaatttactaaggggctatcacgtagtgtgatagatagtgcatcaagtgagatgggcatgagacccacctaa

SEQ ID NO: 143385 - DNA, 1392 bp, Zea Mays
atggacacggagccgctgctgccggcgcacctcctccactcgctgccggagcactcggaggtgttccacttctccccgccgccatccccttcctgcccatcaccggcctcctcctacaaggaccgcatcatcttcggcgcccacccgccaccgcctcagccgccgccgccccctccgcttcccccgtcgcactcgcaccgcgcgcaccgccgccgcagctccgtggacggcctctacgattttgacctgccttcctgctcctcgtccccgccctcgccaccgtcggaccccgaggacccttcctccgccgccgctgccggcgcgtcctctctcttcgaattcatcgccaacgccgcaagcgcccgcaccaacctccaccgctcccgcaccgccccagccatggcgccgctcagcgccgtgacgctcgcggccgcagccgctgccggggaccaggctcccgcgccgcccgagcgcccctccatcgtgctgcacaccttcctcttcctgctcgcctacctcgccctcggcgtgaccttctacgccgccgcgcccgccaatttcagctcctccgcgggacccacgcaccccgtcgccgacgcgctctacttctgcatcgtcacgctctgtaccatcggatacggtgacatcacgcccgccacccccgccgccaagctcttctccatctccttcgtcctcatcggcttcggcttcgttgacatcctcctctccgggatggtctcctatgtgctcgacctacaggagcatctcctcatcaccgcgctcaagaacccaacctctgcgcgcaagcaccgccacaactacatctttgacgtcaagaagggcaggatgcgcatccgtatgaaggtggcgctcgcgctgggcgtcgtggctgtttgcgtgggtgtcggggctgcagttctcaggagggtggagagcctggggtggctcgacgccgtctatcttgccgtgatgtcggtgaccacagttggttatggggaccaggcgttccggacactggctgggcgcctttttgcatccgcttggctgctcgtgtccaccctggctgtggcaagggcattcctctacttggcagagatgaggattgacaagaggcaccgagccatggccaactgggtgctgtccagagacatgaccgtgtctgaatttcttgctgcagacattgacaacaatggatatgtcacgaaatcagaatttgttgtttacaagctcaaggagatggggaagattactgaaaaagatatcatgatgatatgtgatcaattccagaggctggacacagggagctgcgggaagatcacactttcagatcttctggagagccatcacttggtttcagaacccagggataagaaaaaggggaagaaatcttaa

SEQ ID NO: 143386 - DNA, 197 bp, Zea Mays
gactcgctcctttagcagcttcgtcaaatgcccgttccataaaagcatttgtcttcctaatccattcaggggtgacatcattccttcctacacggctcgtgtacatccactcatggtcctccatcctctaacatatataaccgagtatagtttaatataaacatgtaatgcatgtacactacgttcataccttctaa

SEQ ID NO: 143387 - DNA, 441 bp, Zea Mays
cgagcactgcaccactactgctgatatgagcacctgaaccttctgggcaaccacatccggtccctgcccctgatcatccgcagcagccatggcgcagcagcaggagaagaagcagcagcagagggggaagctgcagagggtgctaagggagcagaaggctcggctctacatcatccgccgatgcgtcgtcatgctcctctgctggagtgactgatccatctcaagcatgcatgataaacctgtgctctttttttttccttctgttttttcccctctttttcccatccttttcaccttgccactttggtgggcggatgacatggtatatgaatgctccttgtttgcttgcctcttgcgtaaggcaagggcgcaaggctactgacttctccttgtaaagatcacgcggatgttaatagaaactactaacgtgtttttttcgcc

SEQ ID NO: 143388 - DNA, 540 bp, Zea Mays
aacataccactgcactacagcaggttgcccagttctgcacccccttcttccttctctcacttgcattgcacaccgaaaacctcttcttcgtcaggcaggcatgaagcttggaggacaagggaggcagatggggaggctcaacagggccttcagggagaaaagggcaaggttctacattttccgccgctgcgtcgtcatgctgcttcgctggagcgattagatattggtctccatgggagatgacttcccctccattctagatgttttttatttttttggtttggagctagtatccattttggtagagttttagaatttaggcgtagttgctcacttgctctgtacaggatggccggccgtgtgctggttcgagtggcaatcttttttgttttctttgcttgcatgttgtttcaggcaagggtgactgatccagctctgtggtctgagattgccataatttgtactgctgaaagaagattggtatgaaaaatatgttgttgttaacggtgatgattgtgccatgaatatatactttcctaa

SEQ ID NO: 143389 - DNA, 1052 bp, Zea Mays
tttaaaaaaaactaacggcagagacgcgtacacggcgttcgatgaatggatggacgcccgccgcccagcaagcattgccattctagcttctctaccctggtaaatatctataactttggtcctacttgtcagctgtcagcgagtcagcgtatcccatgttgtaggctcattccattagctttttatccactcccacagtccaatccacacgaccgccaccaactcacgcagcgtgcttcccttcagaaactcgatggcctgccacctcgccatcgccggcgccaccgccgccgccgcccgcgctcctcgtatctccgtgctcgccgccgcctctgcttcctccgcaggggaacccgcgcgccgcatcatccgccgccgcgcgccgccgggtcagcagggctctgccacagcggcccccgcgcctcccgcccagccgtccgtggcggaggtgcgccgcgccatcggcgtctccgacgacgctgcgtcggccgccgcatccatggagaagaagaacaccgcgttcatggacctcatctctaccacgcccatcggccagccggagagcgagcccgagcgccgcctccgcgaggccgccgagtgggtagtcgacaccactgagacgcgcgcttgcgaaggacagaagtctttcttagtgctatgcatgatgacatttcctgcttggttcttgctcctgtttcttgcccttggactctttaagttaccatttgatattccggttctggataatctcctaatgtaaggtgttagctattatcatttttcccttttattttccaaatatacgagcttcacacactgaatatgaaaagaaatatatgccactactgaagtcacttcctcccctttttccaaattatagttcactttggctttatgctaactcaaacatctttaagttcgactgactttatataaaaagccaccaacatctataaggtcaaattggtttcattaaattattatgtactatgttttggtaaattcagttgttactgtattttttctgaaaaaattggtcaaaattacagaaa

SEQ ID NO: 143390 - DNA, 1325 bp, Zea Mays
acagttcttccttggctgttttgatttcatcctacctcgccgcacgcgcgggggcacacaaggtcgtcgtgctccacctcgccgcctcctcgtcctcaccagcttgctccctgcgcgccctgaaccgggccacgaactggcgcggggagacggcgttgcacgacgccgtgctaggcggccacgaggccgcggcgcgcgcgctggccaccgcggatccagatctcaccgaggcatgtgttcttctccgcaactataactggagtgttagtaaggtgcatgacgaatggtttgctgatgaagagcatgttcggaaggtggttggtttaccagagaagcatattgaaatgccaaatgacagagaagtaacatgtggaatatgtttcgaaagttgccctcttggatcgatgagtgctgctgcatgtggtcatcctttctgcggtacatgttggcgaggttacattagcactgctataagtgatggtccgggatgcttgatgctgaggtgtcctgatccgtcctgtgctgctgctgttggacaagatatgataaattcactggctaatgttgaggatacagaaaagtatgggcgatatcttcgcagatcttacattgaagataatagaaagacaaaatggtgtcctgtgcctggatgcgaatatgcagcggaattcgtcatgggcagtggcagctatgatgttaattgcaactgttcatatgggttttgttggaattgcaccgaggaagctcatcgtccagtagactgtgccactgtttcgaagtggatcctcaagaacagtgtggagtcagagaatatgaactggtatagaaggataaagcacaagtttttaaatagtgccaactgtttggagtttctactttggattagtcttatgaactggtatatgatcatggacatggagggaggggccgtggttggattaatgcttgctgggatgggaggctcaattgatgtgtttcggatgaatatgcaccagggctatcccaaagaaacactggtgcgtttccttaagggtagagagtggaatgtagcaaaggctcataaaatgattgtagaatgtttgaattggaggattcaaaatgaaattgatagtgtgctggagaggcctatagccccagtagatttatacagatcaatatgtgattcacaacttattggcctgtcaggatacacaaaggagttttcaataggaaagttaatatgccgaatgaagatcgcactgaagagggtctcccaatttttggcattggtgttgggcatagcacatatgacaaagcttcggctacaactacagccaaaatcataa

SEQ ID NO: 143391 - DNA, 77 bp, Zea Mays
ttttttatatcagccaagtgttaaatataaccttcaattcagcatcaacacgttacagctatctacaaacgcctaat

SEQ ID NO: 143392 - DNA, 975 bp, Zea Mays
atgcctagtgtggatgatgatgatgactttgagccaccaaaaaagaagtgtagtatcaaaatggatgccccaaacaagacgcagagactcaacatcagatgcaacccaggagatgttcttgcgtccattcaaatactgaatgaaaggcaacgtcaagctatagtcagaaaaggtttctctagtattcttgacatgacaattgatgcaattggatgtcgaacacttctttgttggctcatgcagaagctagacccaagagacatgactcttcgtattggtccagacaaagaactaaaaaacaccaagcagactgtccatctaatattggctcttccaaattcgggtggacaaaaattgaggctaggcaacgatgatgagctctcaatcagatgtttttttatcctcttcaaccggctgcttttcccaacaactagctggtcgatttcttacaacgaggttctattggcagaagaattggagtggttccctcacattgattggtgccatctcattttcagtgacctatgtgaagctgtccagaaatggcacaataggagcactaataacatctcgacaacgatatacaggtgttccatcgctgttcttttgtattatttggaccacttgcaccatgtcgtagctcccaacaacaaaagtggcactccgtgcatcaagtattttaacaagaatatcataagggcgctgtcaatggctgataaacgtaagcctcgtcagggtggcgaaccatttggtttttgcccttttcggagcagcagtgagacctgttatgtctcaaaatcggcatctattggtcagctcgagtctacaatgaggccagaaacaggtgaggcagacccaaatgaacatggtcgacttcccaacataaacatccaacttcctcttatgcaagacctgatgtcaactaagatccaactgcttcctgtacatcaatgctccaagtccaagctaagttga

SEQ ID NO: 143393 - DNA, 550 bp, Zea Mays
acacagggttgtcatggtttgctgctccgccagctagttcgcggttcatttgcggtcgcagcatagacagacggatggccagttctctcccatttggagtctactgcaagcctgaattgtggcattcgtgcatgcccttgggcatcataaactgtaactgctgcttccagctgccagactgaaacttgaggcggcatgatcgaagtgatttgtcatttgtcccctgggtagcggcaggttgatggacgcatgcatgcatgcatgatataggccaaaaactgccgctgtgtactcgaagcaggcaactgtacaatacaaccctgtgtaacttgtaaactagaggacttgtttggaagaaaccctgtgcaaccctgtgtattgtagtactagtttcaccgaaggtgttgtttggtaatgagatatacagcagtacctccatgggtgtgtgttgtctgttctccaaagaaatgctgtactggtgctagagaaagtgtggaactgaagcacagtttgctttagaaatagagatgacggcatgtctccttccatc

SEQ ID NO: 143394 - DNA, 119 bp, Zea Mays
cgaaaacgcaggagagctgcgtatcaatatattaagaagaaagggtgaggcaaggaaacctcgtacaactccacacgaacccacaaacactaggttatagggagaaggagaaaattaac

SEQ ID NO: 143395 - DNA, 1500 bp, Zea Mays
ctttgctcgtcttgacgcttcgcttgtctaatctctggaactgcagcttccctcgctgacttgccgttggcaagccccgctccaagcatctccgcgcctgcttctgccgaatcgcagagcccctctcccgcttcccccctctcccctcttctctcatcattgattcgattttcctcgcccctggagcttcaaattcaagtgaaggagccagttaaggcttgccaaaactagcggcggcatcggcaatgctctagttggcctttccttccctcccagctcgagcagcgcagcgcggccctctttatctctctcggcagtggaggcagcgtcacccttcgcctaaatcaccaccaccagctctggagcgccgcgtcgccgctcctctaccatttcctggtatattggaccggaacggactaacggagtggagttctgctattgatcattgtgagttcatccccactccaatccatctgtccatggtccgtatgagctcatcttcctcggcgtctggggtcaatctgacagagcaaatcgagaatgtttttgaccaactgatcagcaaaattgaacaagcggatccagattttgacccgcggccctttttgaaacaattgaatgtgttaggccgctatgaaccaatcaagcggaatgtatatttcactaagagatacattgaagattatggcatttcttgtcactgtaagccttctcctggttcatcagttgtgtgtggcagagactgctattgtagcatgcttttctcttgctgttcatcacaatgtgaatgtgatattgcgtgcaccaataaatcattccagcacagacctcttacgaaaaccaaattgattaagacagagaaatgtggtcatggattggttgctgaggatgaaataaagaaaggagaatttgttattgagtatgttggagaagttattgatgacagaacatgtgagaataggctatggacaatgaaaaggctggatgacactgacttctacctttgtgaggtcagcagtaatatggtcattgatgcaacaaacaagggaaacctgtcccgatttataaaccatagttgtgaaccaaacacagcgatgcagaaatggactgttgatggagagaccagggttggaatttttgcacttcgtgacataaagataggggaggagctgacatatgactataaatttgtccagtttggagcagctcaggtttgtcattgtggatcttcaaagtgcagaaaaatgctaggcacaacaaagtattcaggaagctcacagaatcatcgtaccaagaagaaaaagaggaaaacaagttgtgagaattgcatacagcagtttcttcgtctgtggcatccacgacaaaaaatgtatgttggatgttggatagttgacttcgatcaaggaactaaaatgcatactctccagttcattgatcaccatactgaaaagtttgatttgaaagaagaagaatggcacttcttggaggtatgacagtcat

SEQ ID NO: 143396 - DNA, 1613 bp, Zea Mays
ctttgctcgtcttgacgcttcgcttgtctaatctctggaactgcagcttccctcgctgacttgccgttggcaagccccgctccaagcatctccgcgcctgcttctgccgaatcgcagagcccctctcccgcttcccccctctcccctcttctctcatcattgattcgattttcctcgcccctggagcttcaaattcaagtgaaggagccagttaaggcttgccaaaactagcggcggcatcggcaatgctctagttggcctttccttccctcccagctcgagcagcgcagcgcggccctctttatctctctcggcagtggaggcagcgtcacccttcgcctaaatcaccaccaccagctctggagcgccgcgtcgccgctcctctaccatttcctggtatattggaccggaacggactaacggagtggagttctgctattggtgagaggaaaccctagcttggtctctcttgcctcaattcggcggtggttttgattcagtagctattggtttttcgctctcattcaaaacccaaatttctacctccgcctcagatcattgtgagttcatccccactccaatccatctgtccatggtccgtatgagctcatcttcctcggcgtctggggtcaatctgacagagcaaatcgagaatgtttttgaccaactgatcagcaaaattgaacaagcggatccagattttgacccgcggccctttttgaaacaattgaatgtgttaggccgctatgaaccaatcaagcggaatgtatatttcactaagagatacattgaagattatggcatttcttgtcactgtaagccttctcctggttcatcagttgtgtgtggcagagactgctattgtagcatgcttttctcttgctgttcatcacaatgtgaatgtgatattgcgtgcaccaataaatcattccagcacagacctcttacgaaaaccaaattgattaagacagagaaatgtggtcatggattggttgctgaggatgaaataaagaaaggagaatttgttattgagtatgttggagaagttattgatgacagaacatgtgagaataggctatggacaatgaaaaggctggatgacactgacttctacctttgtgaggtcagcagtaatatggtcattgatgcaacaaacaagggaaacctgtcccgatttataaaccatagttgtgaaccaaacacagcgatgcagaaatggactgttgatggagagaccagggttggaatttttgcacttcgtgacataaagataggggaggagctgacatatgactataaatttgtccagtttggagcagctcaggtttgtcattgtggatcttcaaagtgcagaaaaatgctaggcacaacaaagtattcaggaagctcacagaatcatcgtaccaagaagaaaaagaggaaaacaagttgtgagaattgcatacagcagtttcttcgtctgtggcatccacgacaaaaaatgtatgttggatgttggatagttgacttcgatcaaggaactaaaatgcatactctccagttcattgatcaccatactgaaaagtttgatttgaaagaagaagaatggcacttcttggaggtatgacagtcat

SEQ ID NO: 143397 - DNA, 224 bp, Zea Mays
gaaatattttttcctcacataaagggttttttcacagcctcacagaaaaccctaaaatctagtgtgtggaaaaaagacagactgttggctctctatcattatatattactaatacataacatgtgcatagaaaatagtggattcgttcgagagaccaaatcgttaatctcaactgccttccaacaccatctatcccaaaaaaatcttaaagcgtccaaaaaata

SEQ ID NO: 143398 - DNA, 1037 bp, Zea Mays
ctgttctctgtccacgcggatgactcgcccggtgcgcctccgatctcttccacgccgacttcgggctccggttggccactcgctcggtgcgcccgcgctcaccgctccccccccctacgggctcccaagaaaagggaagatgctatctcaggcttgctgaatttggtaatacctctgggcctcattgctgctatagggacagggagagcatgctcactgttaagatgttgctatcttggtactgtctctgggcttgctgactctagttattttagtatctagctgctagcgtgctaccatggtatgatctgttaagatgttgcttgtgtggctattgttccttgcatttcctgctaataaggttgcttgtattatgttttctattgggtgatctagatacacatacatcatgatattttcatttatcaccaattgcaaatgcttttaatctgaattttcaggaatgattgctaaaatgaacgataggttatggtgtaacgagcatatctgtagtgatacatcaaatggccatacaaatttatatacccagtaaatcctttgtgaaaccatgtacgatgcttatttaacattgggtggtgttaatcgaagcttataagtttataatattggctgtagaactctatccatctatatataaattttcggaccaggcaagaaattgacacaagatatgatgtgtcgaataaattagatgcatcacaatatcttctttattgtgttcgaaacctattttttagcaattactgggatacctgctaatcaagtgaggactacattgcctatttttagaaattgacacaagatatgaagcgccaaatgaggtatagactgaaacagaactacagaagtacttcaatgggatatctgcaaatcaagtgtggactacatcgcctatttcaagcatgtctgacaatgactggagaaagttggtggagaagttgtctaccccaaatcacaaggtacttgccattgaccattctataaattacacaggtttctttgatctgttgcatata

SEQ ID NO: 143399 - DNA, 1932 bp, Zea Mays
cacgtttcgtctccctgcaccgctcctcctcatcgtcgtctccccacctgacctgacccgaccgaaccgacccgaccactcctcccctgctcttccgccccaagcaagacccattaaaccccctcgccctctcctttcggggctcatctcgcctctcccccgtcccctgcctggaccctcccgatccgcctctcctcggattccgggtggttcccattccatcgacgtaccccctagtattcactgcttcggtgttgtgggctccgtagatcgacgtggcaccagaactatccgcgctagctgttgatttatgtcgcctgctctgctgccgctccatggttctgagctcacgtcgtcagcatcctcttcttgctcctttctccagcctgggcaggggggcgccagagactgcgggtttcgcttcaggatctcaggatttggatttggggtgaagtactctgggtttctacatttaggccctcgcttcctactttgccgcacctgagatagtaaaagagttcaagaatcccccccaaatcacagtcagtcttgggtctggtttgggtggatttcattacgtttcctccaagttcaaacagccagcaggatttccgagttgagtctgaagatcttcgcttttccggtttccatcagaagttagagagaacccctattctgatttgccagattccatctgtgctgcagttcttgcgcagttcaagagactgccccaactttatccaaaaagtttcctccgtctcatttgtggtcaatctggaagcggtgtgtcaagatgcggccctcggtgcagaaggtccgcattttctgttctgatcctgatgctactgactcatctgatgatgaagatggccagatcatcgcagtgaagaaaatggttatggagatactagtcccagtgacaaactcgaagacatctaatagtctgaagacccttgtgccgtgtggagcaaaggacctggaggtttcagagaagaagggtaaatcaagcaggttccgtggcgtgcgcaggcgacgctggggtcgatgggcagccgagattcgtgatcctgtgagaaaaaccaggaagtggattggctcgtatgactctgaggaggctgctgctgcggcatatcaggcgtatgcaaaacagatccgtgaagagttgctagccatcaagaaccaacggtctgtatcagaacgtgcagctctatcaagttcatcctcggtttcttgcgtatcttcgtctcccccatgtgagcagacagggcatgaaccgcagactagagtgctcgtggagaaagatcctgagcctgtagatgaagtctttctgaacttctctctcacacccaaggggatttcaatggacgatttgttaggacggatagatgagattcctgtttgtgacgaccctgtcagcccaactgatgagcttccacttgacaatttcacgagcctggaagatgcattcccgatcagcgatttcatcggttcaagagatgagcatctgtatgagcactatattggcctggctgacattagccacctgcctcttccaatggatgatccagctttcaatctggatgcagagcttgattggagtgggtttgacttcgctgcgattgaaggtgaacttgatgtcctttgaggctgcaatcagtgatgtgttatactgaaacctgcacttgcttatgttgtattcagctgaaagctcctctctatgttttttatatttgtcagaatacaacaatgaatacggattcaggtttcagtccatctatgtcagaatacatgagcacagtttctttcattttgttcttagaaaaactgatgacatatgggtgcagtctatctctaacaaggagttcgcatttttaatacattttcagtagattttgtcttgcttccttgcagtctgcagcggcgtgggcaaat

SEQ ID NO: 143400 - DNA, 579 bp, Zea Mays
cacgtttcgtctccctgcaccgctcctcctcatcgtcgtctccccacctgacctgacccgaccgaaccgacccgaccactcctcccctgctcttccgccccaagcaagacccattaaaccccctcgccctctcctttcggggctcatctcgcctctcccccgtcccctgcctggaccctcccgatccgcctctcctcggattccgggtggttcccattccatcgacgtaccccctagtattcactgcttcggtgttgtgggctccgtagatcgacgtggcaccagaactatccgcgctagctgttgatttatgtcgcctgctctgctgccgctccatggttctgagctcacgtcgtcagcatcctcttcttgctcctttctccagcctgggcaggggggcgccagagactgcgggtttcgcttcaggatctcagggtaatataactcgctgttcgattggctggttgtttcacaccaaggattcaatctgctctgctactctcttccatccagtcaccagtttatatacatagagattagagagtggctatggtatctgttgtctctctgtccgacatt

SEQ ID NO: 143401 - DNA, 1003 bp, Zea Mays
gttggtcttaggacaattacctcacttatagttgattaaactcgaaatgggactgctgcaattagcttgttgcatcgtactcagaagtccttaaaatttacaggaaattgttccactgaggaaggtgtgccgccgaccagaaactgactacaggcttcagattctgcatgctgctagagcggcagccgccagtgcagatattcacactccacccagagaggctaaagtggagttggcatccaatgctaagagcccatatgagcaaaaaccccagaagcagtacaagatgatggacgtgaacactgatgaggaggtgaccatggtctccaccttggaacaggatgagacacaaggcaagactgtagcccccgtaccgtcagcaactgcagaaacccgcaattcaagttcagacgcggtgatgaaggatgcggaggcttcgtccgtggctcaagacgatgatgaagtgcaggtggttgacaagatgaaagaggggtagctttttttcgcactttttgtgtttggaggacttgatgttgtcgtacagagttttctaatttagtttgtagtatatgtttttctaattaagtactccttccattcttttttatttgttatggtttagtttagaaatgaactaacgctcgttcttttttatttgtcacgttagtttaaaaatgaactagcggacgacaagtattgagaacggaggtaatacagtacttgtcgtaattaccgtgtggcatcttaatggatggttacgtgtgtctgacgcgtcgctgctctcggccgcaagcgaacgagtattgcgacttgtgagcgtgtaaagaaccctcactgcttgtgtcacacacgagcagctcctgggactggagttgcgtgtgagaatggccatgactttcagaaaagagagtgtggtcccggccgtcagcgagagcgaaaggagagggaggaatcggccagcacgacgaggggaaggggaatggcggatcgggctaagccgagg

SEQ ID NO: 143402 - DNA, 1564 bp, Zea Mays
aaacacgcccgggtgcgtgcgtggcctacaccgttgagccggagccggaaccggttgcctgcccggagccatgaacgcctacctccactaactcacacttctcctaaagtttccccacccccgtccgccgatccaccaccgatctggtctcactgcatcctcctcccctcgccgtccaagagcgccggtccgatgggtcgtccgccgagcaccactggtgctccggccttccgcttcctcccttccgaggtggcggagatggaggcgcgcttgctgcagctcaacaacggcatccccacccgcgccatgctccagactctcgccgataagttctccgcctcgcccgagcgcgccggcaaggtggccatccagcccaagcaggtgtggaactggtttcagaacaggcgttactcgcatcgggccaagaccaccagggtcgtgccgtctccaccggctaagatgaccccctcgggggccgatcaccaccagcacgccgctaacgcctccgccttcagggccgctcagccctcttctgtcgctgttgctcaccatggctcctcctcgacagggaagaaccctatggaaggtgtctcagttgagtttgaggccaagtcagctcgtgatggtgcatggaagtgcgggttcgtttttctggatttggggcagaggaggatgaatggatcaatgttcgcaaatgtgtgcgacaacgttctcttccatgcgaggccacagaatgcgttgctgtgcttcctggggacctcattctttgttttcaggaagataaagagcaggctctctattttgatgctcgtgtccttgatgctcaaaggagaaggcatgatgttagaggttgccgttgtagatttcttgttcgctatgatcatgactcttctgaggaaattgttccactgaggaaggtgtgccgccgaccagaaactgactacaggcttcagattctgcatgctgctagagcggcagccgccagtgcagatattcacactccacccagagaggctaaagtggagttggcatccaatgctaagagcccatatgagcaaaaaccccagaagcagtacaagatgatggacgtgaacactgatgaggaggtgaccatggtctccaccttggaacaggatgagacacaaggcaagactgtagcccccgtaccgtcagcaactgcagaaacccgcaattcaagttcagacgcggtgatgaaggatgcggaggcttcgtccgtggctcaagacgatgatgaagtgcaggtggttgacaagatgaaagaggggtagctttttttcgcactttttgtgtttggaggacttgatgttgtcgtacagagttttctaatttagtttgtagtatatgtttttctaattaagtactccttccattcttttttatttgttatggtttagtttagaaatgaactaacgctcgttcttttttatttgtcacgttagtttaaaaatgaactagcggacgacaagtattgagaacggaggtaatacagtacttgtcgtaattaccgtgtggcatcttaatggatggttacgtgtgtctgacg

SEQ ID NO: 143403 - DNA, 1623 bp, Zea Mays
cgtagtcaaacacgcccgggtgcgtgcgtggcctacaccgttgagccggagccggaaccggttgcctgcccggagccatgaacgcctacctccactaactcacacttctcctaaagtttccccacccccgtccgccgatccaccaccgatctggtctcactgcatcctcctcccctcgccgtccaagagcgccggtccgatgggtcgtccgccgagcaccactggtgctccggccttccgcttcctcccttccgaggtggcggagatggaggcgcgcttgctgcagctcaacaacggcatccccacccgcgccatgctccagactctcgccgataagttctccgcctcgcccgagcgcgccggcaaggtggccatccagcccaagcaggtgtggaactggtttcagaacaggcgttactcgcatcgggccaagaccaccagggtcgtgccgtctccaccggctaagatgaccccctcgggggccgatcaccaccagcacgccgctaacgcctccgccttcagggccgctcagccctcttctgtcgctgttgctcaccatggctcctcctcgacagggaagaaccctatggaaggtgtctcagttgagtttgaggccaagtcagctcgtgatggtgcatggtatgatgttgctgcctttctgtcacataggttgtttgaatccggtgacccggaagtgcgggttcgtttttctggatttggggcagaggaggatgaatggatcaatgttcgcaaatgtgtgcgacaacgttctcttccatgcgaggccacagaatgcgttgctgtgcttcctggggacctcattctttgttttcaggaagataaagagcaggctctctattttgatgctcgtgtccttgatgctcaaaggagaaggcatgatgttagaggttgccgttgtagatttcttgttcgctatgatcatgactcttctgaggaaattgttccactgaggaaggtgtgccgccgaccagaaactgactacaggcttcagattctgcatgctgctagagcggcagccgccagtgcagatattcacactccacccagagaggctaaagtggagttggcatccaatgctaagagcccatatgagcaaaaaccccagaagcagtacaagatgatggacgtgaacactgatgaggaggtgaccatggtctccaccttggaacaggatgagacacaaggcaagactgtagcccccgtaccgtcagcaactgcagaaacccgcaattcaagttcagacgcggtgatgaaggatgcggaggcttcgtccgtggctcaagacgatgatgaagtgcaggtggttgacaagatgaaagaggggtagctttttttcgcactttttgtgtttggaggacttgatgttgtcgtacagagttttctaatttagtttgtagtatatgtttttctaattaagtactccttccattcttttttatttgttatggtttagtttagaaatgaactaacgctcgttcttttttatttgtcacgttagtttaaaaatgaactagcggacgacaagtattgagaacggaggtaatacagtacttgtcgtaattaccgtgtggcatcttaatggatggttacgtgtgtctgacg

SEQ ID NO: 143404 - DNA, 847 bp, Zea Mays
aaacacgcccgggtgcgtgcgtggcctacaccgttgagccggagccggaaccggttgcctgcccggagccatgaacgcctacctccactaactcacacttctcctaaagtttccccacccccgtccgccgatccaccaccgatctggtctcactgcatcctcctcccctcgccgtccaagagcgccggtccgatgggtcgtccgccgagcaccactggtgctccggccttccgcttcctcccttccgaggtggcggagatggaggcgcgcttgctgcagctcaacaacggcatccccacccgcgccatgctccagactctcgccgataagttctccgcctcgcccgagcgcgccggcaaggtggccatccagcccaagcaggtgtggaactggtttcagaacaggcgttactcgcatcgggccaagaccaccagggtcgtgccgtctccaccggctaagatgaccccctcgggggccgatcaccaccagcacgccgctaacgcctccgccttcagggccgctcagccctcttctgtcgctgttgctcaccatggctcctcctcgacagggaagaaccctatggaaggtgtctcagttgagtttgaggccaagtcagctcgtgatggtgcatggtatgatgttgctgcctttctgtcacataggttgtttgaatccggtgacccggtaatgacctcggaatttcattgaatattgttgaagataaagacatttcaagtagtacttgaaaaggcagtattcttgtagcaaagttatatatggttcggttgttggctctctttttacaatgagattcaaggttattaaaacgataaaacgttaaaacttt

SEQ ID NO: 143405 - DNA, 1452 bp, Zea Mays
aaacacgcccgggtgcgtgcgtggcctacaccgttgagccggagccggaaccggttgcctgcccggagccatgaacgcctacctccactaactcacacttctcctaaagtttccccacccccgtccgccgatccaccaccgatctggtctcactgcatcctcctcccctcgccgtccaagagcgccggtccgatgggtcgtccgccgagcaccactggtgctccggccttccgcttcctcccttccgaggtggcggagatggaggcgcgcttgctgcagctcaacaacggcatccccacccgcgccatgctccagactctcgccgataagttctccgcctcgcccgagcgcgccggcaaggtggccatccagcccaagcaggtgtggaactggtttcagaacaggcgttactcgcatcgggccaagaccaccagggtcgtgccgtctccaccggctaagatgaccccctcgggggccgatcaccaccagcacgccgctaacgcctccgccttcagggccgctcagccctcttctgtcgctgttgctcaccatggctcctcctcgacaggtgattgattctccgtctccgtctcctccgcatgtgattcaccactaaccaatgtcgtgatgcattcaaatgctctactggtatgggataacccaattgtatgtgtactgtgcgatcaacttgttgctgcaaatgcacgaaaccctacaaggacgctgctacctgtaaggttatgttcatagtgaaagggttcctccaagaacatgaagtgccctacaaaatcaatgtttgttgtggacgatggggcccagttgcaagctttgaacaatctgcaaagctcaccaatgagagtgcaaagatttgttagatggatagtgtgaggcattagggaagacctgggggcatcatgttctcttctcaaagacaccgggcaccagtttgagctgagcaattctttcatctttgcatgctcaaatctatgtgctaaaatgatatgagatgcaggtggaatgcggccacaccagtgtatgtggccgcagcagtcatagataaagtggctgcggtggagatctgaggatggatagtgaggtgtcatggaagtgtctggtgtatgcggccacagcaatatagatatggtggcggcagtggcagtggaaatctgtaggaagcatagctctaggcatcagggaagacctaggtgcactgcattcttgtcttcttgaagttaatgggcacctagtcgagcatagcaattccttcatgttcgcttgcttagatcacggtggtgaaatggcaagagacgctgatgcaatgtggggcctggtttatgcatctctagaagtcgtagtatagaagcaacaacgacagcaatgccatgtacatgcttgttctgttctaagatgctggaattggccagcagggaaatgtggttttttattctggcc

SEQ ID NO: 143406 - DNA, 339 bp, Zea Mays
atggcggcgaactactgggcctcctgtgacagtgccatgatgatgcaatatgttcctatgcgctgttgtcattcgtatgatctcccagatttatatgccaaaaagtcatatattcacatctggtgcttctggaatgcagctattacgaggggtgcttttagagctgaaaagccagagttgcttattgtaattttaccacaaagtctaaagaagcagcctcctgaagccaagaagaactgttgtgtaaagtgtaatgggttggcttttgataaactcgaatgtggaggtggcttgctacgtcgtaaacgctgtccacagtgtcatattcgttccacgtga

SEQ ID NO: 143407 - DNA, 387 bp, Zea Mays
atgcttgcattctctgtgatgactttcagagtccgcataacttgttttgtggctctgttctccagatcctgcatgttaaattccacccctgcccctgcaacccgtcggctccgtcgtagcgcagtaccatgttttgtggcaccccttgaccgcttggggaggacaggagcagcaaggagctgtgaaggtgccattgttatcttagccatgaatgatcttcttctagattccatagaagataatggatccaatgaggactcacatgaatccccaaaattctgcctgggactgtcatcagaggctaccacctcaggcctgagtggaacagttgagtctgtgtcagccctccacgctgttccattgtactctaataataatggcccctga

SEQ ID NO: 143408 - DNA, 2955 bp, Zea Mays
gctgccgattctgctcctgtcctctgcccctttgccaccatcaacatcaagctccacgtccccatgaccctggagttgaaaccttccaactacaccaagtggtcgacgacgtttcaggccacgtgtgggaaatttgggctgctgcatcacctctccacctcgcgccccaccgatgcggcatgggcacaggctgacttctgcgtccgcggatggatgtacagcaccacctccgacgccgtcctcaacctcgccatgaccgacagcacccagacggcgagcgccctttggaaggccatcggcgaggtgttccaggcaaacaaagctccccgtgccatcttcctgaatcacgagtttcactcgatgactcagggggacctgtccattgacgcctactgcgttcgcatgaaggagaaggccgacgaactacgcgacgttgggcagcccgtatctgagcccaacctcgtcctcaacctgctgcgtggacttaacgaggtctactccggcgtcgccgacaacatcgccggacagcagcccctcaccctcgccaccgcacgccatcagctactcctcaaagagctgtcgctgcagaacgacgagaagacgcgtgctgctgctgccctcctagctaatgttggtggttcgcagcagcagcaccagcagggcggccggcgccctaataccaaaaaaggcggccaccagcccttctacaacacctctggtagcttctccaacaactccggcaacaccagcaccaacaaacgtgttccctggggctttaatccctggactggcgaacgtgtggcccctagagagcgcgtcacccctcctggacagcgccgccagggaggttctggtgcccaggctgggcgcaccctgggcattctcgggtcttccccgcaggcccacaccgccttcgctccactccaggcgtcctccagcagctccaacacctccaccagcacctgggatgcagcaggtctcatcgctgccctgcaaaacatgcaacttcagggcaactcgccctgggttgttgactccggcgcctctacgcacatgacgtcctcggatggtgggactccatcctcgacgcccgtggttgctccatcccactcggatgttgagcaaccgcccccagacattgcagcctcacatgactcgccttctgcgacaccgggcgggcgtggtcccgtgcccccgcctggacccgacgtggttcccttcccacgagtctacgtccgtcgttcccgtacgacgtctacgtccgagccgacagctgtcccagcagcccctatgacttcatcgcctccgccgccgcgcgtcactcgcaccatgacgggtgccattcctcgtgtctgctatgaggggctggcggacacgacgtcaccctcaccatcgccgcttccgacgaactaccgcagcgcgctggccgacgccaactggcgtgccgcgatgatggatgaatatcaggccctcgtcgacaacaacacctgggagcttgttccgcggccccccggagccaacgtcgtaacggggaagtggatcttccggcacaagttccatgtcgatgggtcccttgctcgccacaaggctcgctgggttgtccgtggcttctcccagcgcgagggcgttgactacgacgagaccttcagcccggttgtcaaaccggctaccatacggtctgtactcagcatcgctacatcccgcgcctggcccattcatcaactggacgtgaagaacgcctttcttcacggccacctcgaggagaccgtctactgccaacagccgccaggattcgtcgaccctggcgctccagatcacgtctgccatctgcagaagtccttgtatggcctgaagcaggctccgcgggcatggtaccagcgcttcgccaccttcgtccggcacctcggcttcgtcgcctccatctccgacacgtctcttttcgttctacaagaggggacaagtctcgcctacctactgttgtacgtcgacgacatcatcctcaccgcctcgtcgtcggccctgctacaacgcattatgactcggttgagctccgagttttccatgacggatcttggcgccctccaccacttcctcggcatcgctgtcacgcgctcctccgatggtctcttcctctcccagcgacagtacgcggtcgagcttcttcagcgcgcaggcatggctaagtgtcatccgacatcgacacctgttgacactcacgccaagctatccgcgactgacggggatctactgtcagagaaggatgcatcagagtacaggagcttagcgggggctctccagtacctgacgttgactcgtcctgatctggcatatgctgttcagcaggtgtgcctcttcatgcacgccccgcgcgagcctcaccgtgtgctggtcaagcgcatcttacgcttcgtccaggggactctctcctcgggtcttcacattggcaccgggtctgtcaccaagctgactgcctactctgacgccgactgggcaggctgcccagactctcgacgatccacctctggcttctgtgtctatctcggcgacaatctagtttcatggtcctccaagcgccagaccacggtgtccagctctagcgccgaggccgagtatcgggctgtggctcacgttgtggctgagtgctgctggcttcgacagttactccaggagctacacatccagctgccttctgccacagttgtcttctgcgacaatgtcagcgtcgtctacatgacggccaaccccgtccaccacaagcgaacgaagcacatcgagatcgacattcacttcgtccgcaaaaaggtggcccttggtgaaattcgggttctccatgtgccctcctctcaccagttcgcggacatcatgactaaagggcttccgacagcactctttcgagaatttcgatccagtctttgcgtccgggagcctcccgctgcgactgcgggcgggtgttag

SEQ ID NO: 143409 - DNA, 1750 bp, Zea Mays
ctcaagtggtgttcacgtataaaccaatcagctcccgtccccgtcccacaccacacacagagaaagagaaagagccacgcattgcacttggcttgcacaagcccggaggagccccaaacgcggcggcggacggaatgcggctgcgcctgcctcagtcactacttgggtgccgtttctacattgcaagatttgtcgagaattggcctgaaatcttgcatcctgttgaccattccaacttctccgcgttgttgatgtgaacattctgctgtgatggcgaaggagtactacactacgagcagccttgtggttgggtacgcgctgtgctcgagcctgctctcgatcatcaacaagtacgccgtgacaaagttcggtttcccaggcctcctgaccgctctacagtactcgacatccgctgctggtgtctggatcctcggaaagctaggcttcctcacacatgaccccttcaacctggagaccgcaaagaagttcgcgccggcggctctcgtcttctacctagccatattcaccaacacgaacctcctctgccacgccaacgtcgacaccttcatagtcttcagatccctgaccccgctcctggtcgccatcgccgacacgacgttccggaagcagccatgcccttccaagttcacgttcctgtccctcgtggtcatcctgggcggagcggtcggctacgtgacgacggattcggcgttcagcctcacggcgtactcgtgggcgctcgcgtacctggtgaccataacgactgagatggtgtacatcaagcacatcgtcaccagcctggggctcaacacctggggcttcgtgctctacaacaacttcctctccttgatgctggcccccgtgttctggttccttacaggcgagcacaggtcggtcttcgcagcgatggagtccaggggcgaaggctggtttcaactggacgccgtcgtggcggtggcgctgtcgtgcgtcttcgggctgctcatcagtttctttggcttcgcagccaggagagctgtatcggcgaccgcgttcaccgtgaccggggtcgtgaacaagttcctcaccgtggccatcaatgtcatgatctgggacaagcatgccagtgcgtatggttcggtctgcttgctgttcaccatcctcggtggggtgctctaccagcaatcggttacggtgaaaggaaacggtgcagttgtggcacagcgtgagctggtgcccgagcaacctgaggaggttgacgaggagaaacaaagcttagtttcttcagctaaataatacggtgcaacggatcacttgcaatgataggatccgtttgcaggtttattctttggcctttgaatgggctcgtttatgtgtctgcgaaacaaacatgagggaatactatactagtggaagtagcacttccgtcaatggaagccctgctattgtttgaatttgcatcaagattgcaacgttttgttcactgcgaatgtgtactttagctgataaaggtggttcttgatattgcatatttttttcctttacaaaaaaatatttttatgtgtctaatgcctcagtttatctagcgcaaatgtccgcctttcaaatttactttgtaaaattacttaagctacctccagcaacttatttatcctcgtaccaatattcaaactcaattatacaaacaatgtcatatataaacaaaatagtgtttttgtgatcatatggatgaactgttggacacggtcttagcgaggagtaatttacagta

SEQ ID NO: 143410 - DNA, 1655 bp, Zea Mays
ctcaagtggtgttcacgtataaaccaatcagctcccgtccccgtcccacaccacacacagagaaagagaaagagccacgcattgcacttggcttgcacaagcccggaggagccccaaacgcggcggcggacggaatgcggctgcgcctgcctcagtcagtgaacattctgctgtgatggcgaaggagtactacactacgagcagccttgtggttgggtacgcgctgtgctcgagcctgctctcgatcatcaacaagtacgccgtgacaaagttcggtttcccaggcctcctgaccgctctacagtactcgacatccgctgctggtgtctggatcctcggaaagctaggcttcctcacacatgaccccttcaacctggagaccgcaaagaagttcgcgccggcggctctcgtcttctacctagccatattcaccaacacgaacctcctctgccacgccaacgtcgacaccttcatagtcttcagatccctgaccccgctcctggtcgccatcgccgacacgacgttccggaagcagccatgcccttccaagttcacgttcctgtccctcgtggtcatcctgggcggagcggtcggctacgtgacgacggattcggcgttcagcctcacggcgtactcgtgggcgctcgcgtacctggtgaccataacgactgagatggtgtacatcaagcacatcgtcaccagcctggggctcaacacctggggcttcgtgctctacaacaacttcctctccttgatgctggcccccgtgttctggttccttacaggcgagcacaggtcggtcttcgcagcgatggagtccaggggcgaaggctggtttcaactggacgccgtcgtggcggtggcgctgtcgtgcgtcttcgggctgctcatcagtttctttggcttcgcagccaggagagctgtatcggcgaccgcgttcaccgtgaccggggtcgtgaacaagttcctcaccgtggccatcaatgtcatgatctgggacaagcatgccagtgcgtatggttcggtctgcttgctgttcaccatcctcggtggggtgctctaccagcaatcggttacggtgaaaggaaacggtgcagttgtggcacagcgtgagctggtgcccgagcaacctgaggaggttgacgaggagaaacaaagcttagtttcttcagctaaataatacggtgcaacggatcacttgcaatgataggatccgtttgcaggtttattctttggcctttgaatgggctcgtttatgtgtctgcgaaacaaacatgagggaatactatactagtggaagtagcacttccgtcaatggaagccctgctattgtttgaatttgcatcaagattgcaacgttttgttcactgcgaatgtgtactttagctgataaaggtggttcttgatattgcatatttttttcctttacaaaaaaatatttttatgtgtctaatgcctcagtttatctagcgcaaatgtccgcctttcaaatttactttgtaaaattacttaagctacctccagcaacttatttatcctcgtaccaatattcaaactcaattatacaaacaatgtcatatataaacaaaatagtgtttttgtgatcatatggatgaactgttggacacggtcttagcgaggagtaatttacagta

SEQ ID NO: 143411 - DNA, 1651 bp, Zea Mays
ctcaagtggtgttcacgtataaaccaatcagctcccgtccccgtcccacaccacacacagagaaagagaaagagccacgcattgcacttggcttgcacaagcccggaggagccccaaacgcggcggcggacggaatgcggctgcgcctgcctcagtgaacattctgctgtgatggcgaaggagtactacactacgagcagccttgtggttgggtacgcgctgtgctcgagcctgctctcgatcatcaacaagtacgccgtgacaaagttcggtttcccaggcctcctgaccgctctacagtactcgacatccgctgctggtgtctggatcctcggaaagctaggcttcctcacacatgaccccttcaacctggagaccgcaaagaagttcgcgccggcggctctcgtcttctacctagccatattcaccaacacgaacctcctctgccacgccaacgtcgacaccttcatagtcttcagatccctgaccccgctcctggtcgccatcgccgacacgacgttccggaagcagccatgcccttccaagttcacgttcctgtccctcgtggtcatcctgggcggagcggtcggctacgtgacgacggattcggcgttcagcctcacggcgtactcgtgggcgctcgcgtacctggtgaccataacgactgagatggtgtacatcaagcacatcgtcaccagcctggggctcaacacctggggcttcgtgctctacaacaacttcctctccttgatgctggcccccgtgttctggttccttacaggcgagcacaggtcggtcttcgcagcgatggagtccaggggcgaaggctggtttcaactggacgccgtcgtggcggtggcgctgtcgtgcgtcttcgggctgctcatcagtttctttggcttcgcagccaggagagctgtatcggcgaccgcgttcaccgtgaccggggtcgtgaacaagttcctcaccgtggccatcaatgtcatgatctgggacaagcatgccagtgcgtatggttcggtctgcttgctgttcaccatcctcggtggggtgctctaccagcaatcggttacggtgaaaggaaacggtgcagttgtggcacagcgtgagctggtgcccgagcaacctgaggaggttgacgaggagaaacaaagcttagtttcttcagctaaataatacggtgcaacggatcacttgcaatgataggatccgtttgcaggtttattctttggcctttgaatgggctcgtttatgtgtctgcgaaacaaacatgagggaatactatactagtggaagtagcacttccgtcaatggaagccctgctattgtttgaatttgcatcaagattgcaacgttttgttcactgcgaatgtgtactttagctgataaaggtggttcttgatattgcatatttttttcctttacaaaaaaatatttttatgtgtctaatgcctcagtttatctagcgcaaatgtccgcctttcaaatttactttgtaaaattacttaagctacctccagcaacttatttatcctcgtaccaatattcaaactcaattatacaaacaatgtcatatataaacaaaatagtgtttttgtgatcatatggatgaactgttggacacggtcttagcgaggagtaatttacagta

SEQ ID NO: 143412 - DNA, 1324 bp, Zea Mays
ctcaagtggtgttcacgtataaaccaatcagctcccgtccccgtcccacaccacacacagagaaagagaaagagccacgcattgcacttggcttgcacaagcccggaggagccccaaacgcggcggcggacggaatgcggctgcgcctgcctcagtcagtgaacattctgctgtgatggcgaaggagtactacactacgagcagccttgtggttgggcctcctgaccgctctacagtactcgacatccgctgctggtgtctggatcctcggaaagctaggcttcctcacacatgaccccttcaacctggagaccgcaaagaagttcgcgccggcggctctcgtcttctacctagccatattcaccaacacgaacctcctctgccacgccaacgtcgacaccttcatagtcttcagatccctgaccccgctcctggtcgccatcgccgacacgacgttccggaagcagccatgcccttccaagttcacgttcctgtccctcgtggtcatcctgggcggagcggtcggctacgtgacgacggattcggcgttcagcctcacggcgtactcgtgggcgctcgcgtacctggtgaccataacgactgagatggtgtacatcaagcacatcgtcaccagcctggggctcaacacctggggcttcgtgctctacaacaacttcctctccttgatgctggcccccgtgttctggttccttacaggcgagcacaggtcggtcttcgcagcgatggagtccaggggcgaaggctggtttcaactggacgccgtcgtggcggtggcgctgtcgtgcgtcttcgggctgctcatcagtttctttggcttcgcagccaggagagctgtatcggcgaccgcgttcaccgtgaccggggtcgtgaacaagttcctcaccgtggccatcaatgtcatgatctgggacaagcatgccagtgcgtatggttcggtctgcttgctgttcaccatcctcggtggggtgctctaccagcaatcggttacggtgaaaggaaacggtgcagttgtggcacagcgtgagctggtgcccgagcaacctgaggaggttgacgaggagaaacaaagcttagtttcttcagctaaataatacggtgcaacggatcacttgcaatgataggatccgtttgcaggtttattctttggcctttgaatgggctcgtttatgtgtctgcgaaacaaacatgagggaatactatactagtggaagtagcacttccgtcaatggaagccctgctattgtttgaatttgcatcaagattgcaacgttttgttcactgcgaatgtgtactttagctgata

SEQ ID NO: 143413 - DNA, 829 bp, Zea Mays
ctcaagtggtgttcacgtataaaccaatcagctcccgtccccgtcccacaccacacacagagaaagagaaagagccacgcattgcacttggcttgcacaagcccggaggagccccaaacgcggcggcggacggaatgcggctgcgcctgcctcagtcagtacgcgtctctcactccctctcccgttccttctccccgcaccgttcgccagatcgtctcttctctcgggacgggcgcgctcggtccaggatctggaggcaggcgctgcctaatcagttcttccttcgtttcctttttgtccttggcaacacgcatcaaagaaacctgcaaaaaatcaggcaggtttcgatttgggcccaaatctatcctgatacagttggtagctgactggccgcgtgcttggagcgccaatatttcccccaaacaatagcgccctccgtccgcttgttgaaatctttatccggtgtggagtggagctgccgttcaaacctgtcatctgattacttgggttgttttccttgccgttgagccttgtgatgtgcagtgaagccgcgaattgtttcattacatttggattttttttaaggcctggtgatcgaaacgatataatacttcatcttctatttggagtttcagctacttgggtgccgtttctacattgcaagatttgtcggtgatagtatattcacgttcgtacgcacataattctactgatatggcaatactcccgggcacataatgatgtcagtaaattgtctgaaatttcagagaattggcctgaaatcttgcatcctgttgaccattccaacttctccgcgttgttgatgttg

SEQ ID NO: 143414 - DNA, 1381 bp, Zea Mays
ctgctcgctctctccctctcgtcgctttctttcctggtcgcgccgcccttcatcaggtctcctccgccttagccggtgaagagcgaccaggcccaataaataatcaccatggctcatcaaaagcgtgaaggcagctacgccgatgatgatagtacatccaagcgcatcaaaggcaccgacactgcttctgaaacgggggacagtgtagagtctagtgtttcacagcaaatggatgctgaagctaggaggacctgccaaaaggaaagcgaagcaccatcggacaaatgcgtttcagatggggaatgcgctgcaaactctaaggttttgggtgagcagaagatggtattgactgttgtcgaggctgatgcggcggacgacaagggttgcaggcacactatggaggacgcctgggtggtgctccccaatgctggtgcagaatccccaggaagcttgaggtgcgtacattttgcgatttatgacgggcatggtggtcgcttggcggcagattatgcacagaagcatttgcatcagaatgtcatcgctgcaggattaccacgtgagttgatggatattaaagctgcaaagaaggctgtaattgaaggtttccgtagaactgatgaatctttactgcaagaaagtactaagggaaattggcaagatggtgcaacagctgtatgcgtttggatcctgggacagacggttgtagttgcgaatgttggagatgctaaagcagtattggctcgttctatttcaactgagggtgaaggtgtggttgatgagaccaaaagtcaactaaaggctattgttttgacaagagaacataaagccatcttttcacaggagcgctcccgaatccagaaggctggaggttctgttggctctaatggaagattacaaggtcgtattgaagtatcaagagctttcggtgatcgccagtttaagaaggttgggttgattgcaacaccagatgtccattcctttgaacttactaagaaagaccatttcatcattctagggtgcgatggcttatggggagtatttggaccaggtgatgctgtcgaatttgttcagaatcagttgaaggagacctcatcagccacacttgcggtgcgccgcctcgtgaaggaagctgttcgcgagaggcgatgcaaggataactgcactgctgttttgatcgtcttcaggcactagcgatcggcctaattcccttttgctttcgtcaggctggaaagaattagctgataaagaacaatgtttgaagtgtagcgagttgaacttggaactcttgctttgtctgttttgatttgatgtgacctattaatacaccatccatattcatttggaaattactctatccgtccaaaagacattgtttaagttt

SEQ ID NO: 143415 - DNA, 1414 bp, Zea Mays
ctttctgcttctcccgtattgccgtgccctcctccctctccctgctcgctctctccctctcgtcgctttctttcctggtcgcgccgcccttcatcaggtctcctccgccttagccggtgaagagcgaccaggcccaataaataatcaccatggctcatcaaaagcgtgaaggcagctacgccgatgatgatagtacatccaagcgcatcaaaggcaccgacactgcttctgaaacgggggacagtgtagagtctagtgtttcacagcaaatggatgctgaagctaggaggacctgccaaaaggaaagcgaagcaccatcggacaaatgcgtttcagatggggaatgcgctgcaaactctaaggttttgggtgagcagaagatggtattgactgttgtcgaggctgatgcggcggacgacaagggttgcaggcacactatggaggacgcctgggtggtgctccccaatgctggtgcagaatccccaggaagcttgaggtgcgtacattttgcgatttatgacgggcatggtggtcgcttggcggcagattatgcacagaagcatttgcatcagaatgtcatcgctgcaggattaccacatggatattaaagctgcaaagaaggctgtaattgaaggtttccgtagaactgatgaatctttactgcaagaaagtactaagggaaattggcaagatggtgcaacagctgtatgcgtttggatcctgggacagacggttgtagttgcgaatgttggagatgctaaagcagtattggctcgttctatttcaactgagggtgaaggtgtggttgatgagaccaaaagtcaactaaaggctattgttttgacaagagaacataaagccatcttttcacaggagcgctcccgaatccagaaggctggaggttctgttggctctaatggaagattacaaggtcgtattgaagtatcaagagctttcggtgatcgccagtttaagaaggttgggttgattgcaacaccagatgtccattcctttgaacttactaagaaagaccatttcatcattctagggtgcgatggcttatggggagtatttggaccaggtgatgctgtcgaatttgttcagaatcagttgaaggagacctcatcagccacacttgcggtgcgccgcctcgtgaaggaagctgttcgcgagaggcgatgcaaggataactgcactgctgttttgatcgtcttcaggcactagcgatcggcctaattcccttttgctttcgtcaggctggaaagaattagctgataaagaacaatgtttgaagtgtagcgagttgaacttggaactcttgctttgtctgttttgatttgatgtgacctattaatacaccatccatattcatttggaaattactctatccgtccaaaagacattgtttaagttt

SEQ ID NO: 143416 - DNA, 1710 bp, Zea Mays
ccctaacttagggtagggagatgtattaatagactcaggttgttgggcttgacccattacataggggtataagactatccgcaacggttccctttaaatttctccccctatatcactttttttttgtgtcacatcattaatagtttgttccctactttttcatctcccgcagcggtttcccctataccccactacaaccataaaatatcatttcctatacttttcatctactatcaatttttcatccactaacaattactcttggacccactactacaagaatgaacagtgatggagaggatgaacagtgaaccgctatatacggagggagagagaagagggccgacgcgtagggggccgaccaggggtcagcgctgcgggtctaggggcgctccctgtagccgcatgcaagaggcgggggctggcacgcggagaccgctgtggccagcctaactgtaattacaatgggctaaccctaaaaccctaaacgggtactctaacaccgtgggccgggtcaaaggggccactgtgcctacatatctgggagggagcaccggcgccatggacgaagacgaagggcacaacgcagatcgaagaagggcgttgttgctattagtggagacaaagggaacattgacgtctgcagctcttggaggggggaggcggcgactgcagcacttggttgtggcggcggtgtctacctctcgttgggggcagagctcggggaaaaatggtgcgagaaagaaaagaaacggctgcaggagaaatattgcacgtggaactgatagattgagatggcagttcttcgactggaattagagaactgtgccgatttttggtgttgccaaaatattgggctacgagttggatactgttggagcagtgattttttcgccttatttgccaaaactagttttgggggacatttattaggagctcttggagatgctctaatagtcagtgcaccggactggatggaaacacaagaaaatctctcataacctaaaatttcttgtatggtcacaattgtcaattatctttatggtaattgcgacatgcacgagtcatgcatttttattagcacaagaggttcacttgctgacttatgtgcagtgatggtggactgtactgtacagctttattagacaaaaagaaaggctgtcctgttgtagtgaatggcttttcatgcactctaaaaaggcccatactgtaaaggggaaaatactgacgttattttcttttccccgtctatgtgcattatcggtttgaacttaaaaacaatgcaggttgggttgattgcaacaccagatgtccattcctttgaacttactaagaaagaccatttcatcattctagggtgcgatggcttatggggagtatttggaccaggtgatgctgtcgaatttgttcagaatcagttgaaggagacctcatcagccacacttgcggtgcgccgcctcgtgaaggaagctgttcgcgagaggcgatgcaaggataactgcactgctgttttgatcgtcttcaggcactagcgatcggcctaattcccttttgctttcgtcaggctggaaagaattagctgataaagaacaatgtttgaagtgtagcgagttgaacttggaactcttgctttgtctgttttgatttgatgtgacctattaatacaccatccatattcatttggaaattactctatccgtccaaaagaca

SEQ ID NO: 143417 - DNA, 857 bp, Zea Mays
tttttatttagaaactggaagtgtgaatgtgaaatcaaagtgaatcccatagtacaatgtttcctcttaaaaattctaggttgtagttgcgaatgttggagatgctaaagcagtattggctcgttctatttcaactgagggtgaaggtgtggttgatgagaccaaaagtcaactaaaggctattgttttgacaagagaacataaagccatcttttcacaggagcgctcccgaatccagaaggctggaggttctgttggctctaatggaagattacaaggtcgtattgaagtatcaagagctttcggtgatcgccagtttaagaaggtttgctgatataagtatatttggtcgctacttaagtctgctcttttgtatctgtttatttggaaaaggtatggtgtttgattacctagttgaatatttcagcatcaataataaatggaggcattattttatgctgaaaataaagtacattttgagtgcaatgtacagaaacgattacaaagtctatttcctttggctatgcattctgttgatctagaccaaccagtgaagcgtccgatgacctttgctttgtatgctaaaaatgggggttttcctgattttgtgattgtatctactgttaagggcagtcctggtgcagtggtgagaactgtttcactgagtcaccaggtcgcggattcgaagcagcttttctgcacttgtggaaggcttgcctctgtttatccttttccagaccccactcatgtgcgagcctctcacactgggtctgccccctttatctactattaagaaataatataactgctgcttgaaacctttatagtcgataatgaggaactttgttagcttagtt

SEQ ID NO: 143418 - DNA, 3540 bp, Zea Mays
ttttaattcaataaaaatattatgttgtgtgttttctgagcgttgaaataaatccgcgtgaattacttaattctgaaatagaaaagctgatgtggctatagcctgaggctgtagcctgctgcagcctgtgcactggagcagcagaggcgagagtggaggcgagagctgacgtggcagtggcgagagggaggctgtgcactggactcagcctaatgctttccatccttcctccgtctataaagtggccgccagaatccgctcctcctactaaagtactactctgccctctcctggctcctctccttcctgcttggtttttgctttcagctcttgaaccgaatccactgccgcggcgcttagcattggggactagggggccgacatggctgccttaggggcgaagatggagcgtctgtcgtcgatcgacgcgcagctgcggatgctggtgccggggaaggtttcggaggacgataagctcatcgagtacgacgctctcctcctcgatcggttcctcgacatccttcaggacctccatggcgacgacctcaaggaaatggttcaagaatgctatgaggtagctgctgagtatgaaacaaaacatgacttgcaaaagcttgatgaactcgggaagatgataacaagcttggatcctggggactctatcgtgattgctaagtctttctcgcacatgcttaacttggccaacttggctgaggaagtccagatagcctacaggaggagaatcaagctcaagaagggagactttgctgatgagaactcggcaatcacagaatctgacattgaggaaacacttaagaggcttgttgttgacctgaagaagtcacctgctgaggtatttgatgccctcaagagccagactgttgatctggttttgactgcacatccaacacagtctgtgaggaggtcactgctccagaaacactcgaggatacgcaactgtttggttcaactctactcaaaagatatcactccggatgataagcaggaacttgatgaggctctgcaaagagagatccaagctgcctttagaactgatgagatccgaagaacacagcccactccccaagatgaaatgcgtgctggtatgagctacttccacgaaacaatttggaagggtgttccaaagttcttgcgccgggttgatactgcattgaagaacattgggattaacgagcgtgttccttacaatgcacctcttattcaattctcttcttggatggggggagatcgtgatggaaatccaagagtgacaccagaggttaccagggatgtctgcttgcttgccagaatgatggcatcaaacttgtactgctctcagattgaggatctcatgtttgagttgtctatgtggcgatgcagtgatgaactgcgcatgcgagctgatgtgctgcatctctccactaagaaggatgccaaacattacatagagttttggaagaaggttcctccaaatgagccatatcgggtgatactgagtgatgtcagggataaactgtacaacactcgtgaacggtcacgagagcttttatccagtgggcattctgatattcctgaggaagctacattgacaaatgttgagcagctgttggagcccttggaactatgttacagatcactctgtgcttgtggtgactctgtaattgctgatggaacccttctggatttcttgcgtcaagtgtccacctttggactctcccttgtgaggcttgacattaggcaagagtcagataggcatactgatgtccttgatgccatcactacatacctggggataggatcttaccgtgaatggactgaagaacgccgccaagaatggttactgtctgaacttaatggcaagcgccctctgtttggctcagaccttcccaagactgaggaaatttctgatgttctagacacattccatgttattgctgagcttccctctgacaattttggtgcgtatatcatttccatggcgacagctccgtcggacgtccttgctgttgaactcctccaacgtgagtgtcatgtgaaaacaccacttagagtagtcccgctgtttgagaagttggccgatcttgaggctgccccggctgcattggccagactgttctcaatagattggtacagacagaggatcaatggcaagcaggaggtcatgattgggtattcagactcgggcaaagatgctggtcgcctctcagcagcttggcagctatacaaagctcaggaggagctcatcaaggttgctaaggactttggtgtgaagttaacgatgttccatggacgtggtgggactgttggaaggggtggtggtcccactcaccttgccatcttgtcccagccaccagacacgatccacggatcactcagggtcactgtgcaaggtgaagtcattgaacagtcatttggtgaggagcacttgtgctttaggacactgcaacgtttcacggctgctaccctggagcatggcatgcacccaccaaatgcaccaaagccagaatggcgagcccttcttgatgagatggcagttgtggcaactgaggaatatcggtccattgtcttcaaagagccacgctttgtcgagtatttccgccttgcaacccctgaaacagagtatggtaggatgaacataggaagcaggccatccaagagaaagccgagcggaggtatcgactcactccgagcaatcccatggatctttgcttggacacaaacgcggttccacctcccggtctggctaggatttggagccgcattcaagaatgtcctccagaaggacatcaggaacctccacatgctccaggaaatgtacaatgagtggccatttttcagggtgactattgatctggtggagatggtgttcgccaagggtaatcctggcattgccgcactgtatgacaaactcctcgtttcagaggaactgcatccattgggtgagaagctgagggccaactatgaggaaacccagaagcttctacttcaggttgctgggcacagggatcttctggaaggtgacctctacctgaagcagcggctccgcctgcgtgatgcgtacatcaccaccctgaacgtctgccaggcctacaccctgaagcggatccgtgacccggactaccatgtcgcgctgcgcccccacctctccaaggagatcatggactcgaccaaggctgcggcggagctggtgaagctgaaccctggcagcgaatacgcaccggggctggaggacaccctcatcctgaccatgaagggcatagcagccggcctccagaacaccggttaaaccacgaagaggggatcttttttctcctcctgatcattggctctaggtccttcgtattttcgcggattgtaacttcggccacctctctacaccgtgaggaaataatggtggtttctgcaaaagtggtggtaaataaaagggcgacaactatcttgtttttcatagtaacttataactttacgatgcgataatggaacatggcttgcgttatctgtttctcgtgaagcatttttgcaggcaggctctgaattgga

SEQ ID NO: 143419 - DNA, 500 bp, Zea Mays
atttggaaaacatttgcatgaacattagaaacttacagagtacaagttgaagaagcaaatacaatggctttggaagcataaggatcaaatgaggatccttcgagtttagttaagatcaaaagctgtcagataagtcatgtctcttatctaaaaaaacaacaatgcctagagcaacccatcttgtgatctcccagtttttcttcagaaagtcatacatagcatcgaagctatgccactggaattacctgcaaaagaagtcaatggataagtacatgtactcaagaaaatgatgagacaagttacactatagtagtttaattcccaagacaaacaccaaacataatactcacatctttccagctatggtcaaagaaaatgcatgcagtaatagctacaaaaacaaacaggaaaaaaagaagggtaaaccaatcgcttctatgtccgagcagtgccaccaatcactatgttcgatgtgaacatagagaacgatccttcgtgcg

SEQ ID NO: 143420 - DNA, 1260 bp, Zea Mays
gccctcgccctcccccctccccgcaaatcttgtctcctcacccaacgccatcagcgctgccctccgctccatccctgcagcgcagacatccgccaccgtcaccgcccttcctcaccgcgcaatcatcgcccttccccacgcgcctcggccgccatccgcggcatcaccttccttccccatgcgccgaggctgccatccgcgccatcaccttccttccccacgcgtgcgccccctcctccgtgcgtgccccgcccccgtccttcgctcacccgatgccccgccacctccgccgcgatagcctcccccacgaagtgcccccgtgatgtcttccattcccttcctccctcattcttcccgttgcagcgattgctcccagcggctcggtggcaatggaggcaccacctgacccggccgtcccatcctgctcgacgagatcgtcggcgacatccacggggcagttctagattttcctttgttgattgtcagggctgtcaatgcagctcggcgagctagccccactgccagcttagctatcgtgacagccattggggctgctaacgccgttagtggggtgaaggcgacaactgacgagatgttggccgaagcggagaaggcaaatgtcctggctgcaaaaaaaattgatcgcctgcttcgtcgttgacctcccatgatgttggtttgtgctatgactttctgaaggagaagatgaagaacaggtcgacgatgaatttgatgaccggagactgtggagtgaggcagaagtaaagacgatagtacccgatgacgtcctgggcaaggctgaggtaacaatactactaagtgatactggacttccttggtggtttgcgttcatccatccaatatggaggctccaacacatctcttcgttatctgtatctggatttatctgtgtaatagcagtatggtgctcctaacttccaagcttcattaaacaaggaaactgaaagtgtcagaactacaattcatatatactagatttttatgatattgtaactaatgcattggtaagcattactttgaatgtctgggtttttctaggggttgagtggtatgttgtggtcagatttggcaatcaatgtatctgccatcatgtgctatatcgataaattatgatacaatgtggtcagattctaggtttagttactgtttttgcgcaacctgtgtgccatctgtttaccgacaactggacaaataggatatatcgcaatcagataaataacttggcactcttggtcaaaa

SEQ ID NO: 143421 - DNA, 209 bp, Zea Mays
aacaaaatttcccagagttattcagtacttgcaattacatcagagcaactcagcagttgcatccacactataccaatagttgcaattacaacacaccagcagttgcaatcattttgtttacatttttttaacagatatttgggtagaattatacagcagttgcaatcacacctaatgcggggttgcaatcacaccacaccaacagttgc

SEQ ID NO: 143422 - DNA, 711 bp, Zea Mays
aatcataatttaggcaaaggtcaattaaggtaatatgattttatacggaataatttgtgtaccactgtatgggggagatatattgtgctatatttatactgtaggggagtgagtcaaagatcgtattataaattgtagagtataaatatagcctgaagatatataaaattatttttcatccctacactctgaatttgagatagacttatatttgaactttagaacgtggtggaatattaaattccaagctaaatagtctactctattaagtagattctaatttcaccaaaatgaagggatccaaacgactctcggggtaaaaaaaacaagccatatatgaagacagttaaaatagttaatttactctctggttgatgcttatgatattttggcctcatgtgtcttcaggtttggaagatgcgcaccgggtcacgcctcctaaccatcccatgccccaaaggaagcaggatcttacaaccctcagcgaggctctctacgtcgtcgttctcaccttcgtattccccgctggaggtttacctgttcaatggagactctgggcaattgtcagttttgaataggcacatcggatgaatcatttgttcctttgttgtgttattaaattgttactgccaagtgttgtagagaattacttgtttcagtgtttacagttttgttaatcaagaaaaaaaagtgcgtgggtcaggattgaac

SEQ ID NO: 143423 - DNA, 1592 bp, Zea Mays
caaccttcttaattttctgaagcttgggcgggatctcggctcgcctccgtccatctctatggcgccacggggccaccacctggcggaggtggccctcctcgcctctgcttcggcggacctcgcagccgcaggcgccggcgagagggaggggtggttggacgaccccgccatcctcccctcgctcgggccccgcgcgcgatctctcgccgtggccagcgcggcgcactccgtgctcgtgatcgtcgcggtggcgggaggtggaggcggcggggtcacggtggagcctgcgctggggcccgacgagggccgaatctccgccgttgagtgggtcccgttcgccggggaggacgatgcagagggggaggagggggtgtccgtggtgatcggcacggacgctgggtggctactgttctactcgctcgcaggcgatctattgcacaagcaggtcgttcagtatatatcctgcaaagatactgaaactcaactttcgtgagaggaaggagaacgcttgggaagattcaggctcagatgaactttctgtagtgtttcctggtgttatcgcgcgctttgatggtgctgaccttcagaacgttcttaaaaaagcatttcaagatgtaaaatcacgcctgtggaaagataagtttgaagagcaagatgctgaggatgaggaaacttttggacgaataccctttcagatttggaatgtaaacaagttcagttcatgcgctgatgctgcaattgttggtctgatgccacctcccttgttagaacttcagtcaagtcagcgccactactgtgccatcacagttggagaggatgctgtagtttcagcatataggttatcagaagatagaaccaggtcaattgttggagcaattttgtcaagaggtgtagctgcaacattttcgacaatatcatctttgtccaaaatactatggcggagtgagccgtcaccacctaaaaagtcacggccaaagccccaatcctttgcaaaaacatcacccctcacctgcttgaaagactccccaaggaaaggagaacggcttacactctctccgagtggtacgctggctgctataactgattcacttgggcggatactactgctggacacccatgcgcttgtggctgtacggttatggaagggctatcgtgatgcttcatgtctatttgtggaaatgcttctgaacaaagacaaggcttcgtcagggtcgatgcacatagagtatacgaagagtgactattgtttgtgtttagcaatccatgccccgcgaaaaggcataatagaggtttggaagatgcgcaccgggtcacgcctcctaaccatcccatgccccaaaggaagcaggatcttacaaccctcagcgaggctctctacgtcgtcgttctcaccttcgtattccccgctggaggtttacctgttcaatggagactctgggcaattgtcagttttgaataggcacatcggatgaatcatttgttcctttgttgtgttattaaattgttactgccaagtgttgtagagaattacttgtttcagtgtttacagttttgttaatcaagaaaaaaaagtgcgtgggtcaggattgaac

SEQ ID NO: 143424 - DNA, 1585 bp, Zea Mays
caaccttcttaattttctgaagcttgggcgggatctcggctcgcctccgtccatctctatggcgccacggggccaccacctggcggaggtggccctcctcgcctctgcttcggcggacctcgcagccgcaggcgccggcgagagggaggggtggttggacgaccccgccatcctcccctcgctcgggccccgcgcgcgatctctcgccgtggccagcgcggcgcactccgtgctcgtgatcgtcgcggtggcgggaggtggaggcggcggggtcacggtggagcctgcgctggggcccgacgagggccgaatctccgccgttgagtgggtcccgttcgccggggaggacgatgcagagggggaggagggggtgtccgtggtgatcggcacggacgctgggtggctactgttctactcgctcgcaggcgatctattgcacaagcagagtatatatcctgcaaagatactgaaactcaactttcgtgagaggaaggagaacgcttgggaagattcaggctcagatgaactttctgtagtgtttcctggtgttatcgcgcgctttgatggtgctgaccttcagaacgttcttaaaaaagcatttcaagatgtaaaatcacgcctgtggaaagataagtttgaagagcaagatgctgaggatgaggaaacttttggacgaataccctttcagatttggaatgtaaacaagttcagttcatgcgctgatgctgcaattgttggtctgatgccacctcccttgttagaacttcagtcaagtcagcgccactactgtgccatcacagttggagaggatgctgtagtttcagcatataggttatcagaagatagaaccaggtcaattgttggagcaattttgtcaagaggtgtagctgcaacattttcgacaatatcatctttgtccaaaatactatggcggagtgagccgtcaccacctaaaaagtcacggccaaagccccaatcctttgcaaaaacatcacccctcacctgcttgaaagactccccaaggaaaggagaacggcttacactctctccgagtggtacgctggctgctataactgattcacttgggcggatactactgctggacacccatgcgcttgtggctgtacggttatggaagggctatcgtgatgcttcatgtctatttgtggaaatgcttctgaacaaagacaaggcttcgtcagggtcgatgcacatagagtatacgaagagtgactattgtttgtgtttagcaatccatgccccgcgaaaaggcataatagaggtttggaagatgcgcaccgggtcacgcctcctaaccatcccatgccccaaaggaagcaggatcttacaaccctcagcgaggctctctacgtcgtcgttctcaccttcgtattccccgctggaggtttacctgttcaatggagactctgggcaattgtcagttttgaataggcacatcggatgaatcatttgttcctttgttgtgttattaaattgttactgccaagtgttgtagagaattacttgtttcagtgtttacagttttgttaatcaagaaaaaaaagtgcgtgggtcaggattgaac

SEQ ID NO: 143425 - DNA, 1367 bp, Zea Mays
accctcttcctcctgctgctgctctggcgtcgccgcccctcccaagaacaccaggtaggcatccccccctgcatccatcgcctctgcaagtagcgctagctggcttcctggttcggttcggttcggttcaatccaatccaatccaatccaacaatccagcgcgtggttttctctgcagtttgctttttagtttcttcgccctgcaggaacttctttcggtccgaatctgaatgaggttgttttctaattctggtcgtgttttgggggttttgaaagttgtagactgaactctcagatagtagaatgaggtaataacaaattaatccgtttgtcatctactcaggctctaatttaatttaagcggagggaagcttgatcgatcagtctgacactgccctcgttaagttatagcaaatgcctcccgcttcgacggatgcaaacaatgcgatccagaagctgtacgacgtctgcagagcctcactgtccgagaaggggcctctatctcctcgtgactctctcgacaacgtccgtgctgcgttagacatggttaccccgtccgacgtcggccttgagcgcgaggctggagctgtgcgtgcttggaggagcccacgggcggccctgggccggaagagggttttccattccagcccagccatcagatatcgccatatataggagtgcgcaagcttctcgattgggatgttttgcatgccggcatcatccatcatcccgctccacaaccatcctggaatgaccgtgctcagcaaggttttgtacggcgcggcgcacgtcagatcataccgctggattgaatcagctggatcgtccattaacctgtcgaaagcgaggccagccaaggttgtaagggacggcgagatgtccgcgccgtgcggagcgatggttcttcgtccagaggaaggcggcgacgtccacgccttgagagccatcactccctgcgccatcctccacatcctgacgcccccgtactcctcgcaggacgggaggcactgctcctacttccggagacgcccaagatcacacccatcgggcgttttattgaaccgaacaggggggtctgagttcgtgtggctggaagaataccagccacgtcacaacttcatcattagaagggacctgtacacaggacccgctttaaagttatgatgacatcatgacaaacaggggggataattatttatatacgcttcccctttggcttcttattaagttatatcgatggacaatgcaagcacttagctatatgcttggcacttttttatttatatggtagtattaaaaagacagttgattatcctacgtacagggccgcctgctgccgaattttttatattttagccctttttttg

SEQ ID NO: 143426 - DNA, 1052 bp, Zea Mays
accctcttcctcctgctgctgctctggcgtcgccgcccctcccaagaacaccaggctctaatttaatttaagcggagggaagcttgatcgatcagtctgacactgccctcgttaagttatagcaaatgcctcccgcttcgacggatgcaaacaatgcgatccagaagctgtacgacgtctgcagagcctcactgtccgagaaggggcctctatctcctcgtgactctctcgacaacgtccgtgctgcgttagacatggttaccccgtccgacgtcggccttgagcgcgaggctggagctgtgcgtgcttggaggagcccacgggcggccctgggccggaagagggttttccattccagcccagccatcagatatcgccatatataggagtgcgcaagcttctcgattgggatgttttgcatgccggcatcatccatcatcccgctccacaaccatcctggaatgaccgtgctcagcaaggttttgtacggcgcggcgcacgtcagatcataccgctggattgaatcagctggatcgtccattaacctgtcgaaagcgaggccagccaaggttgtaagggacggcgagatgtccgcgccgtgcggagcgatggttcttcgtccagaggaaggcggcgacgtccacgccttgagagccatcactccctgcgccatcctccacatcctgacgcccccgtactcctcgcaggacgggaggcactgctcctacttccggagacgcccaagatcacacccatcgggcgttttattgaaccgaacaggggggtctgagttcgtgtggctggaagaataccagccacgtcacaacttcatcattagaagggacctgtacacaggacccgctttaaagttatgatgacatcatgacaaacaggggggataattatttatatacgcttcccctttggcttcttattaagttatatcgatggacaatgcaagcacttagctatatgcttggcacttttttatttatatggtagtattaaaaagacagttgattatcctacgtacagggccgcctgctgccgaa

SEQ ID NO: 143427 - DNA, 750 bp, Zea Mays
aagccataagtttactgatgggtggcggtgaaggcaagcgcattctgtgcagtaccctgattgttttgcatgtcatctctagtgcaatcttccaaaatgaacaaaaaactgtgtatctgctgggtgcagtactaaaataattcatttcatccacctaaggagtaaggactacgatgggcgaaagtgctccagagataactatgttgctggactccagacaaattgaggaaccatatcaaagatttgatctccaaatgaaagcctgtatgagcagaagcccgaagaaacagctcctgtcctgccatatcttgtttctctgcacttggttgcggcctgtggtactggtcgactatggcggcacaatgcctcagctacaagaaaatctttgtggactgctatatcttgcccgacagttcaagctctgcaaggtgaggtctgtttagtttggccagaaaggcatcccctacctgaacacctacgacggccgcaccatccgctaccccgatcctctcatcaaggccaacgacaccatcaagattgatctggagaccaacaatatcatggacttcatcaagttgtatttgcccatggacttcatcaagttatatacttagttaggctcaatgttagcacaaacagttgatgagcaagtttaaatttagagtacacttatgtatgagttatttgacaatgcttatttatgagatattgaatgttatttatctatattatattaattatagtgttatt

SEQ ID NO: 143428 - DNA, 195 bp, Zea Mays
atgatggactttgggctgaaaggaggtggtcgaggcagattcaacagcaacggcgtagggagcgggacggaggtggagacggctttaggcgatttggggaagaagaccaggatccgatttggttcagtccctggatgttgcttcaaaaataatgacgttctgacagcaagaccctcacaaagtctgcatccttga

SEQ ID NO: 143429 - DNA, 796 bp, Zea Mays
ggtggagaagtggtctaccccaaaacacaaggataattgtatgaagaataaacttaatcgtgaaaaagtatagtatcaacaatgcacatgatccagtcatatattgcaaaagcttatttactgaaacaagagaaatataaggatgttgaaccgagtgcaatagatcttttcaaggacatgcattgcagcaagaagaaaggtttttctgaaaatgtaaagaaagcaattgttgacatggaagcaatggtgacaacaccagttgacgatggacaacagcggacgtatcctatggaagttgtttctgaagtgctagggggctctagtttgtatctgtagaatgttggtctgcaagataactccaagaaaagctccacagcaactgtttctacaaaggtgcaagaacttcagaatcaattagagtctgagatgctagaaaaagatggacttcaggaagaagtagaaaccttaaaggctcagacacaggcctcaaaggcgaccatggacaatatgaacagatcgatggaagaaaataacagtctcctctgtcaactgttgagcttcaatcgaagccaagcgtccccatcttaagtctgctatagtatcatgttatattagttctggattgaggttttataaatttagaatatgtttaaactttcatactttgagttgaagttataggatttcctttggattttaagttacatgatctacaatcgtatgatttgaagttataaaattatctcttggatgaattgtgtgaatgttgaactaaataatgcaattttttagttat

SEQ ID NO: 143430 - DNA, 331 bp, Zea Mays
aactgtgggtccgagctcgcggcgttgtgggggataagaccctctgggacctccgcaaacccccgctcgccccgtattgctctgctccgccatcgggaggatccaccaccgcagcgcaacccgcaccatcgccatcggcgccgcgtccacgatttagtactcgggtgcctcgccgtgcttcggggataggaccggggcctcgctacgggagaagggcggccggtgacctcggatttcgtcgaccctggcggcggcgattgctcaccgtcgcggtgttgtcgccgcggaagcactgcgcgcgggagcagcttcaccaaccttcctaacgccg

SEQ ID NO: 143431 - DNA, 714 bp, Zea Mays
atggagctcggtcctcatggctggtgtgcgaggctggccagacatcatctccactgcacgataattcactttgagagggctgagaggatcaacgactccctcaccacgctcgagaaggagaaggatcggctgtcgacggcgctgcgtggtgctgagcttgattatgattcagtggattcagagttgcaagaggtgcttgagtctcgcattgctgcagaggaggaagatgctgccctcatggagcaatttgcgagggggagcattaggggggacattgctgcagaggcaaaagctcttaacttcgaaaaggacgagctgcatggtaatttggagaaagccgttgctgatctagagaaaatagaaaaggatattgtagcaaccacgaacaagatacaggaacgcgtcttcatcctctttccccaaggctacaactacagcgcttctcctcgaccatcattcttcattgtaacccgatggtgatcggcgaccgtgagcttccatgttattgtgttttgatacttgagacttttattatgactatgtatgagatattgtctcctattagtactggatgatgagatgtgtcttattatgactatggatgagacttttgtgatgtaattgatgagactatggatgagacttttgtgatgtaattgatgagactatggatttaaatattgttatttgattgtgtgtgagatgttttatgtg

SEQ ID NO: 143432 - DNA, 984 bp, Zea Mays
catgcatgacgatacaaaattacaaaccatggatgagatcatctggatgccagcctcgatgaagaggaagcggcggccgagacggtccacggcgaccatggagaggagcgcgccaaccacgagcatggagccggtgatgatggaggagtaaagcgcggcggaggagccgaacccaaggctccggaagatgacgggcgagtagaagaggatggagttcatccccgacagctgctggaacgccgggatgccgagcgcgccgatgacgagctgcgggcggttgcgcagggcgagcaggttcctgaacgtgcccgggacggcgcgcgcggcctcgctggcctccttgaggtcctcgaactcggcgtccaccttgcgcgtgccgcgcaccttctccagcacgcggcgggcctcctccaggtggccgcgctccacgaggctgttgggggtctcgggcaggaacagcgcgccgacgaagatggcggtggcggggcccatggcgagccccagcgagaggcgccacccccacgggtgcagccggtccgtgaagtagttgatgatgtcggcgacgaggatgccgaggcaggtggtgagctggaagagctggttcacggcgccccggatgcggtacggcgcgatctccgacaggtagagcggcacggcctggttgccgaagccgatgccgacgcccaggagcacgcggccgacgatgagcatggcgatgttcacggcggccgcgttgatggcgccgcccaggaagaagctggtggcgcccaccatgatgctggcgcgccggccgcggcgcttcgtcacgtaggacgcgccgaacgtagagaccaggcccgcgaagtagagagaggaggtgaagagcgtcagtagctggctgtcgtacctgcagtagtccgtctcgtgtgggtgcgcctgcttccgccggtacacgtccgggaagaactttctgaggaagtcgtccatggaagtcacgccgcctgc

SEQ ID NO: 143433 - DNA, 124 bp, Zea Mays
gccatatgatgtaattttatttttcttttatgtatttatgttggaactcttaatcaggggttttctctacggagatgtaattaacataatttttatgtaaatataagaattatggaagtatgag

SEQ ID NO: 143434 - DNA, 1651 bp, Zea Mays
ttcctcgcctccccctgaccccctctcgtccacgcctcctcccctaccattcgcagttttggacacttggttgtcgtttcgtcccgcagatccgcaagcaccgggccagtagagagagagagagagaggagggagggtcgcggcctcgcggggggtggaggagatgtctgtggcgaaggaggcggggccgagcagcagggcggtgcttgtgacgggcggggcgggatacatcggcagccacgccgtgctgcagctgctcaccgcgggcttccgggtcgtcgtcgtcgacagcctcgccaactcctccgagctcgtgatccgccgcctgcgctcgctcgcggtggaacacgccaaaaacctcgcgttccacaaggttgatatccgtgacaaagatggattggaaaaggtttttgcttcaacaagatttgatgctgttattcattttgctggactgaaagctgttggagaaagtgtacaaaagcctttgctttattatgaccataatgttgttggcacaataaatcttctggaagtaatggcagctcatggatgtaagaagttagtgttctcatcatcagctgcagtttatgggtcacctaagaactcaccctgcactgaagattttcctctcactccacataacccatatggcagaaccaaacttatggcagaggagatatgccgtgatatctaccattcagatcctgaatggaatatcattttgcttaggtactttaatccagttggggctcaccccagtggataccttggtgaagacccatgtggaactcctaacaaccttatgcccttcgttcagcaaattgcagttggcaggaggccatcgctaacaatatttggaaataactacgcaacaaaggatgggacaggggttcgtgattatattcatgtggttgaccttgctgaaggacatcttttcgcattaaagaagctttttgaaagctcatctaacataggatgtgaagcatacaaccttggaaccggaaaaggaacatcagtgttggagatagtcaatgcatttgagaaggcttctggaaagaaaatccctttgatcatgggccaacggcgtcctggtgatgctgagattctcttttcatcgccggcaaaagcagagagagagctccactggaaagcgaaatatggcatcacagaaatgtgcggagacctgtggaactgggctagcaagagcccttatggatacgcggcatctgagtctccgaagctgaatggtagttcacgctgagcaacgccgattggcccgtgtggactcacttgtacatgagactgtagtgccagccaaccaggataaatgtagatctagtcggtcggtcatacagagagaagttctataggcctaggaaagaaatgttatcctgttcctcagcataagctcccatagtggttcttccatatgcgtatagtctatgaaatttgttctaggaccattgctatagtcaaccagctaattcaattctatttcttgagttgcgttgcctaaaatagagcatgatatagatatcagcatcacaaaaagttgcagttcatacaaattttcttttgtaattgtattgtttctttgagacaatttctgtattattagtatttcttttgaaataaatatgtaatattggtt

SEQ ID NO: 143435 - DNA, 1623 bp, Zea Mays
caagacaactgtggggaaaacactgatgctgtaactgctttggagctccttgggtaaaacctccatcttctcacattttgttccatttgagtttgctccagcagtccagctccatgtaccaacttgcgttttggtggaatccagtttatcacaaactgtgaatcagttcatgaattctggtgacagtgagtaataccttgtactagtctgtccttgactccttgtattcttttgaaactgtgattaccctgttatttcacattattggtgcttctaatcatgagtacatttaacgatagatgttcatcaatatttctgcacattaccactagctaaaatgtgaaagagattaagaggttcttggatgtcatctagtagtggctactgccatttctcactattcttttctgacctaagtagtaatttggtattttgtctgtgcacatgataattagggactaatattgcaaaatgggacagcttgtttgcatgtttcaactccatttcaaagcattgatatttattcagcaactgatcactcttttagagtagtcaatgttgtattctggattttctacttgatcatttgttagtgagctcactcatagcagatcttacctttagttaatactccattccaaattataagttgttctggctttttagatacatagctttttctacgtacctaaatacatattatgcctagatatatagtaaaagttgtgtatctagaaaagccagaatgacatattttggaacagggggagtagtatagattcaatcacatagtttttccctcttccatagcatgttaaatgtaacatctaataatattgatgcaggtgtgctgcatctgtcttacgaagtatggagatgatgatgagcttcgtgagcttccttgcacacacttctttcatgttcaatgtgtagataaatggcttaagataaatgcggtgtgcccactctgcaaaacagagattgggggtgtggttcgatctttctttggcttgccatttggccgccgccgtgtcgataggatagcggcaagaggtgtagctagctcaagattcagtgtatagaacaatgctgtttttccgcataaagagctctgctctgttgcaatggtttgattgattgtcaaggaaagcgctgtgtgcatgacttgaagacaatgacacctggtgggagacctgatgcttgtaggggcaaatttctaagaaatgtaacggactgaaggtgctgctatactctgatgaacattttttttccaagtatgtaaataaggaacacgaagttcgcttgccaggtataatgcaactttgcaagcaacttcacaggtgctctagcatcggccttggtgttctttccttccttctggttctgtgattctcttcataacggcaatgcactgcatgcattgtaaggctgtcttcagtagcttactcattctagtttctatcatcatatattctattttaaacttcaccttgtaaacagtgtaatttataatataaaatagttatttataatataaaatggtgttttatgcgatcatatgcatgatttgttggagattgtctaaattgtgaaataaaaggcaatgacctatttatggaaccc

SEQ ID NO: 143436 - DNA, 2192 bp, Zea Mays
cgaaagggaccgctgctctgctctgcctgcctccccttcatcctccacttcttcctcttggtctggttcgggcagagcatccgcacctgctcggccgattaccccggcgttttctgttccctttcaccccgcgtgcgggcgctatccttcccgtggcgacgtctgggtgaccgctgccgcagccctacactaggttcctaggtattcgccgggcccttccccggcgacgagcacccaccatgtacatgagaaatcctttttcaaatttgtagcttaggctacctctgtggggatcttctgtgaagcaagagaagttacctagcacacaactcaaagttcagtagattattgaggatcaacatttcagccatctgtatgttagttaatatgatggccgatggtaacatctggttagaaagatagaaactcattattgcgctacatatggtagtgcccattcgacataagaactaagctggacattggtagatccaagttattaatggcgcacacttcctgtgatggtgtacatcatgttataagtgtagcacatggggaaactgcatcaacatcaaccagtcatcaagatatgtgcagtgactcggatgaaccacatcaggaagataggctatcaacaagcacacaaaccctgtcatcagagtcttcgccatcaatatcaccaactgcttatagcaccagaaatttatcttttcctagaagagatagtatatatggtcatggaagaagtccatggaattctggtttatggatctcgtttgaaattgtcatgtacattgctcaggttgtagctgctattgtcatcctcatcttttcaagacatgaacatccccatgctcctttgttcgcatggataattggatatacacttggctgcattgctagtcttcctcttatttattggcggtatgttcatcgaaacagacatttggatcaagaacctcagcagccacctacaacatatcctactttgactccttctcagtcatcagaaggacgcaaccatcgtaccagtggtattgttttgcatcttggatgtatctcaatttcttgcccaagtatttcatcagatgctcaggacgctcccaatatgtacaggttgtgtttggcattccttgcgcttagttgtgttggatatgccattccttttataatgtgtgcagcaatatgctgctgctttccatgcttgatttctgttttgcgtcttcaagaagatttgggtcaaaatagaggagctactcaagagctaatagatgcattgccaacctacaaattcaaaccaaaacgtgtcaaaaactgggggattgaccatgcttcaagctcagagcatcttgatgagggtggcattcttggcccaggaactaagaaggaaagagttgtttcagctgaagatgctgtgtgctgcatctgtcttacgaagtatggagatgatgatgagcttcgtgagcttccttgcacacacttctttcatgttcaatgtgtagataaatggcttaagataaatgcggtgtgcccactctgcaaaacagagattgggggtgtggttcgatctttctttggcttgccatttggccgccgccgtgtcgataggatagcggcaagaggtgtagctagctcaagattcagtgtatagaacaatgctgtttttccgcataaagagctctgctctgttgcaatggtttgattgattgtcaaggaaagcgctgtgtgcatgacttgaagacaatgacacctggtgggagacctgatgcttgtaggggcaaatttctaagaaatgtaacggactgaaggtgctgctatactctgatgaacattttttttccaagtatgtaaataaggaacacgaagttcgcttgccaggtataatgcaactttgcaagcaacttcacaggtgctctagcatcggccttggtgttctttccttccttctggttctgtgattctcttcataacggcaatgcactgcatgcattgtaaggctgtcttcagtagcttactcattctagtttctatcatcatatattctattttaaacttcaccttgtaaacagtgtaatttataatataaaatagttatttataatataaaatggtgttttatgcgatcatatgcatgatttgttggagattgtctaaattgtgaaataaaaggcaatgacctatttatggaaccc

SEQ ID NO: 143437 - DNA, 2288 bp, Zea Mays
cgaaagggaccgctgctctgctctgcctgcctccccttcatcctccacttcttcctcttggtctggttcgggcagagcatccgcacctgctcggccgattaccccggcgttttctgttccctttcaccccgcgtgcgggcgctatccttcccgtggcgacgtctgggtgaccgctgccgcagccctacactaggttcctaggtattcgccgggcccttccccggcgacgagcacccaccatgtacatgagaaatcctttttcaaatttgtagcttaggctacctctgtggggatcttctgtgaagcaagagaagttacctagcacacaactcaaagttcagtagattattgaggatcaacatttcagccatctgtatgttagttaatatgatggccgatggtaacatctggttagaaagatagaaactcattattgcgctacatatggtagtgcccattcgacataagaactaagctggacattggtagatccaagttattaatggcgcacacttcctgtgatggtgtacatcatgttataagtgtagcacatggggaaactgcatcaacatcaaccagtcatcaagatatgtgcagtgactcggatgaaccacatcaggaagataggctatcaacaagcacacaaaccctgtcatcagagtcttcgccatcaatatcaccaactgcttatagcaccagaaatttatcttttcctagaagagatagtatatatggtcatggaagaagtccatggaattctggtttatggatctcgtttgaaattgtcatgtacattgctcaggttgtagctgctattgtcatcctcatcttttcaagacatgaacatccccatgctcctttgttcgcatggataattggatatacacttggctgcattgctagtcttcctcttatttattggcggtatgttcatcgaaacagacatttggatcaagaacctcagcagccacctacaacatatcctactttgactccttctcagtcatcagaaggacgcaaccatcgtaccagtggtattgttttgcatcttggatgtatctcaatttcttgcccaaggcttagtgtgctggcttatcacttcaagacaggtgttgactgtttctttgctgtatggtttgttgttggcaatgtgtggatttttggtgggcgcagtatttcatcagatgctcaggacgctcccaatatgtacaggttgtgtttggcattccttgcgcttagttgtgttggatatgccattccttttataatgtgtgcagcaatatgctgctgctttccatgcttgatttctgttttgcgtcttcaagaagatttgggtcaaaatagaggagctactcaagagctaatagatgcattgccaacctacaaattcaaaccaaaacgtgtcaaaaactgggggattgaccatgcttcaagctcagagcatcttgatgagggtggcattcttggcccaggaactaagaaggaaagagttgtttcagctgaagatgctgtgtgctgcatctgtcttacgaagtatggagatgatgatgagcttcgtgagcttccttgcacacacttctttcatgttcaatgtgtagataaatggcttaagataaatgcggtgtgcccactctgcaaaacagagattgggggtgtggttcgatctttctttggcttgccatttggccgccgccgtgtcgataggatagcggcaagaggtgtagctagctcaagattcagtgtatagaacaatgctgtttttccgcataaagagctctgctctgttgcaatggtttgattgattgtcaaggaaagcgctgtgtgcatgacttgaagacaatgacacctggtgggagacctgatgcttgtaggggcaaatttctaagaaatgtaacggactgaaggtgctgctatactctgatgaacattttttttccaagtatgtaaataaggaacacgaagttcgcttgccaggtataatgcaactttgcaagcaacttcacaggtgctctagcatcggccttggtgttctttccttccttctggttctgtgattctcttcataacggcaatgcactgcatgcattgtaaggctgtcttcagtagcttactcattctagtttctatcatcatatattctattttaaacttcaccttgtaaacagtgtaatttataatataaaatagttatttataatataaaatggtgttttatgcgatcatatgcatgatttgttggagattgtctaaattgtgaaataaaaggcaatgacctatttatggaaccc

SEQ ID NO: 143438 - DNA, 2270 bp, Zea Mays
ctccgtgccaaaacgaaagggaccgctgctctgctctgcctgcctccccttcatcctccacttcttcctcttggtctggttcgggcagagcatccgcacctgctcggccgattaccccggcgttttctgttccctttcaccccgcgtgcgggcgctatccttcccgtggcgacgtctgggtgaccgctgccgcagccctacactaggttcctaggtattcgccgggcccttccccggcgacgagcacccaccatcttaggctacctctgtggggatcttctgtgaagcaagagaagttacctagcacacaactcaaagttcagtagattattgaggatcaacatttcagccatctgtatgttagttaatatgatggccgatggtaacatctggttagaaagatagaaactcattattgcgctacatatggtagtgcccattcgacataagaactaagctggacattggtagatccaagttattaatggcgcacacttcctgtgatggtgtacatcatgttataagtgtagcacatggggaaactgcatcaacatcaaccagtcatcaagatatgtgcagtgactcggatgaaccacatcaggaagataggctatcaacaagcacacaaaccctgtcatcagagtcttcgccatcaatatcaccaactgcttatagcaccagaaatttatcttttcctagaagagatagtatatatggtcatggaagaagtccatggaattctggtttatggatctcgtttgaaattgtcatgtacattgctcaggttgtagctgctattgtcatcctcatcttttcaagacatgaacatccccatgctcctttgttcgcatggataattggatatacacttggctgcattgctagtcttcctcttatttattggcggtatgttcatcgaaacagacatttggatcaagaacctcagcagccacctacaacatatcctactttgactccttctcagtcatcagaaggacgcaaccatcgtaccagtggtattgttttgcatcttggatgtatctcaatttcttgcccaaggcttagtgtgctggcttatcacttcaagacaggtgttgactgtttctttgctgtatggtttgttgttggcaatgtgtggatttttggtgggcgcagtatttcatcagatgctcaggacgctcccaatatgtacaggttgtgtttggcattccttgcgcttagttgtgttggatatgccattccttttataatgtgtgcagcaatatgctgctgctttccatgcttgatttctgttttgcgtcttcaagaagatttgggtcaaaatagaggagctactcaagagctaatagatgcattgccaacctacaaattcaaaccaaaacgtgtcaaaaactgggggattgaccatgcttcaagctcagagcatcttgatgagggtggcattcttggcccaggaactaagaaggaaagagttgtttcagctgaagatgctgtgtgctgcatctgtcttacgaagtatggagatgatgatgagcttcgtgagcttccttgcacacacttctttcatgttcaatgtgtagataaatggcttaagataaatgcggtgtgcccactctgcaaaacagagattgggggtgtggttcgatctttctttggcttgccatttggccgccgccgtgtcgataggatagcggcaagaggtgtagctagctcaagattcagtgtatagaacaatgctgtttttccgcataaagagctctgctctgttgcaatggtttgattgattgtcaaggaaagcgctgtgtgcatgacttgaagacaatgacacctggtgggagacctgatgcttgtaggggcaaatttctaagaaatgtaacggactgaaggtgctgctatactctgatgaacattttttttccaagtatgtaaataaggaacacgaagttcgcttgccaggtataatgcaactttgcaagcaacttcacaggtgctctagcatcggccttggtgttctttccttccttctggttctgtgattctcttcataacggcaatgcactgcatgcattgtaaggctgtcttcagtagcttactcattctagtttctatcatcatatattctattttaaacttcaccttgtaaacagtgtaatttataatataaaatagttatttataatataaaatggtgttttatgcgatcatatgcatgatttgttggagattgtctaaattgtgaaataaaaggcaatgacctatttatggaaccc

SEQ ID NO: 143439 - DNA, 1740 bp, Zea Mays
ctccgtgccaaaacgaaagggaccgctgctctgctctgcctgcctccccttcatcctccacttcttcctcttggtctggttcgggcagagcatccgcacctgctcggccgattaccccggcgttttctgttccctttcaccccgcgtgcgggcgctatccttcccgtggcgacgtctgggtgaccgctgccgcagccctacactaggttcctaggtattcgccgggcccttccccggcgacgagcacccaccatgttgtagctgctattgtcatcctcatcttttcaagacatgaacatccccatgctcctttgttcgcatggataattggatatacacttggctgcattgctagtcttcctcttatttattggcggtatgttcatcgaaacagacatttggatcaagaacctcagcagccacctacaacatatcctactttgactccttctcagtcatcagaaggacgcaaccatcgtaccagtggtattgttttgcatcttggatgtatctcaatttcttgcccaaggcttagtgtgctggcttatcacttcaagacaggtgttgactgtttctttgctgtatggtttgttgttggcaatgtgtggatttttggtgggcgcagtatttcatcagatgctcaggacgctcccaatatgtacaggttgtgtttggcattccttgcgcttagttgtgttggatatgccattccttttataatgtgtgcagcaatatgctgctgctttccatgcttgatttctgttttgcgtcttcaagaagatttgggtcaaaatagaggagctactcaagagctaatagatgcattgccaacctacaaattcaaaccaaaacgtgtcaaaaactgggggattgaccatgcttcaagctcagagcatcttgatgagggtggcattcttggcccaggaactaagaaggaaagagttgtttcagctgaagatgctgtgtgctgcatctgtcttacgaagtatggagatgatgatgagcttcgtgagcttccttgcacacacttctttcatgttcaatgtgtagataaatggcttaagataaatgcggtgtgcccactctgcaaaacagagattgggggtgtggttcgatctttctttggcttgccatttggccgccgccgtgtcgataggatagcggcaagaggtgtagctagctcaagattcagtgtatagaacaatgctgtttttccgcataaagagctctgctctgttgcaatggtttgattgattgtcaaggaaagcgctgtgtgcatgacttgaagacaatgacacctggtgggagacctgatgcttgtaggggcaaatttctaagaaatgtaacggactgaaggtgctgctatactctgatgaacattttttttccaagtatgtaaataaggaacacgaagttcgcttgccaggtataatgcaactttgcaagcaacttcacaggtgctctagcatcggccttggtgttctttccttccttctggttctgtgattctcttcataacggcaatgcactgcatgcattgtaaggctgtcttcagtagcttactcattctagtttctatcatcatatattctattttaaacttcaccttgtaaacagtgtaatttataatataaaatagttatttataatataaaatggtgttttatgcgatcatatgcatgatttgttggagattgtctaaattgtgaaataaaaggcaatgacctatttatggaaccc

SEQ ID NO: 143440 - DNA, 1010 bp, Zea Mays
cgaaagggaccgctgctctgctctgcctgcctccccttcatcctccacttcttcctcttggtctggttcgggcagagcatccgcacctgctcggccgattaccccggcgttttctgttccctttcaccccgcgtgcgggcgctatccttcccgtggcgacgtctgggtgaccgctgccgcagccctacactaggttcctaggtattcgccgggcccttccccggcgacgagcacccaccatgttgtagctgctattgtcatcctcatcttttcaagacatgaacatccccatgctcctttgttcgcatggataattggatatacacttggctgcattgctagtcttcctcttatttattggcggtatgttcatcgaaacagacatttggatcaagaacctcagcagccacctacaacatatcctactttgactccttctcagtcatcagaaggacgcaaccatcgtaccagtggtattgttttgcatcttggatgtatctcaatttcttgcccaaggcttagtgtgctggcttatcacttcaagacaggtgttgactgtttctttgctgtatggtttgttgttggcaatgtgtggatttttggtgggcgcagtatttcatcagatgctcaggacgctcccaatatgtacaggttgtgtttggcattccttgcgcttagttgtgttggatatgccattccttttataatgtgtgcagcaatatgctgctgctttccatgcttgatttctgttttgcgtcttcaagaagatttgggtcaaaatagaggagctactcaagagctaatagatgcattgccaacctacaaattcaaaccaaaacgtgtcaaaaactgggggattgaccatgcttcaagctcagagcatcttgatgagggtggcattcttggcccaggaactaagaaggaaagagttgtttcagctgaagatgctgtgagtatatttcacgtccttttgctgtgtaattgaagggtttgctttagtgatattcttt

SEQ ID NO: 143441 - DNA, 1194 bp, Zea Mays
atggtcggtgcgggcgatgtaggggcggatgggcgttggagccggcgaggcggtgggggcggagcgggcgccaatgggagcgagaaggccgtcagcgggcgcctacggtggcgggagccggtggcggggcggaaaacggcgggacgggcgactgctggggctggaggtgacgagcttcatttccaccaggcaaacggttcacacgttcgaaccccatatggctgaacccaagtcaaataatggcggggcggacgcgacggcatcgatgatgctccacggccgcgtagccattgtcaccggtggtgccggcggcatcggctcggccgtgtcgaagcacctgtcgtcgctcggcgcgcgcgtcgtggtggggtacatcggcgacccggcacctgctctgacgctggtagccgccatcaactcctccgagcaccccggcgagagccagcagccgcgagccatcgcggtcgaggcggacgtgtccgacgcggcagccgtgaaggcgctgttcgacgcggccgccgcagccttcggcggggagctccacatcctggtaacgttggcggcggtgctggactactcctacccgccgctggcggagaccagcgaggcgacgttcgacgccgccttcagcgtcaacacacggggcaccttcctgtgctgccgcgaggcggccaggcggctggtgcgtgacggccgcggccgaatcgtgacgttctcttcgtcgggagttgggtctctgcgccctggctactcggcatacgcagcaagcaaggccgcggtggaggtgatgactaagatcctggcgcgcgagctgcgcggcacggggatcacggccaacgtggtggcgccagggtccacggggacacccatgatgtacaccggcaagacggaggatgacatggagcgatacatcgccgaggcgccgctgggccggctcggcatgcccgaggacatcgcgccgctcgtcagcttcctcgctagtgatgctggccactgggtcaacgcgcaggtcctgcgctgcaacggtggcaccatctagctagtactgcgtgcctactttttatggttgattagatgtattttcctcggagcataaatttaagcttgtggcgcagttatcgcttggcagttcattaatttatttaaagattgtgtcgtttattctattgtgtgtatttataatcaggctctata

SEQ ID NO: 143442 - DNA, 1594 bp, Zea Mays
ggcgccgcgcgagcccgcgagacaggggctttaaaaggggcgcccggcaggcaccacgggaccctctctcaactctcgtttcgccggagtatttagcttgcttcagggagcacgtggcggtggaagcttccctaggggtggcggaggcggtggtggtgcttggttgatgtcgatggcgcaggtctgctgtgactcggccgtagcggcgacggcggcaccggtggttggtgcggaggcggaggccagggccagggcgcgcgccgagaggcggagccgggccggagagtctggggcgtggaagcacgcggtggccgctggcacggccgatgctacgaggaagcggagtctcggggcaggggagctgctggtggcgcggaagcacggggcggcgtcggtggccggccgcaggagggagatggaggatgccgtgtccgtgcgcgacgcgttctgcgcggagggcacggccgacggcgggaggcgcgacttctacggagtgttcgacggccacggctgctcgcacgtggccgaggcgtgccgggaccggatgcacgagctggtcgccgaggagctcgccgccaccgccgccgacagctcagtctccgcggcggcggcctggaccgtggcgatggaacgcagcttcgcgcggatggacgccgaggtgacgtcggccggcgggcgcgccgccgccgccagaagcagcacctgccgctgcgacgcgcacaggtgcgaccacgtgggctccacggccgtggtggccgtcgtggaggagcacagcgtcattgtggccaactgcggcgacagccgcgccgtgctctgccgtggggacggcgcgccgccgctgccgctgtcgtcggaccacaagcccgaccgccccgacgagctggagcgcatcgagtccgccggcgggcgcgtcatcttctgggagggcgcgcgcgttctgggcgtcctcgccatgtcccgcgccgtcggggacggatacctgaagccgtacgtgtcgtccgttcccgaggtgacggtgaccgaccggtccgacggcgacgagtgcctcatcctgggcagcgacgggctctgggacgtggtgagcaacgaggccgcgtgcgaggtggcgcgcgcctgcctccgcaggggccgggccaagtggtgtgccgaggccgccgcgttgctcaccaagctggccctcgcgaggagaagctccgacaacgtctcggtggtcgtcatcgatctccggaggaggaatcactagttctgtgcagttgtcagctagtactagtactccctccgaaggatggctggtcgcacaagggatttcgcgggggtgcctaattgggttttttttcttccattttcattcaaaaagttttttttttttttgctgtactctccctgaatcaaaaagttcagaggagcccttagattaattattgtggtagagccggaatttggtccggataccattcggagaggtggtcgcgtagaaaaaactcagaggagagacggtctcacaagaaaatcagtctgtgtattgtatcatctagacatctaatgaaatagcaaccgaaacaaacaccacctccggtgtctggatgttctcgaa

SEQ ID NO: 143443 - DNA, 102 bp, Zea Mays
aatttaattttagctaggcgtgagatgcacgttggaatgagaatgagctttgcggggagagggaatgagaaagacagtacggggagaaggaatgtaaatggc

SEQ ID NO: 143444 - DNA, 3292 bp, Zea Mays
ccttccaattctgtgacaaaaaggcaacccccaccctcaaaaactcccccacactccccgcgcgctctctccactcgcccaccacttccagtcatggatgccacccgctacatcctggagttcctggtgctgctgcttctgctcctcctcccgaccattgcgggcgcatcctccgacaccaagcacctcatcgccgtccggtccgccctccgcgaccccaccggcgcgctcgccggctgggacgctgccaacagacgtagctcgccatgccgctgggcgcacgtgtcgtgcgccaacaactccgcgcccgcggcggccgtcgctgggatcgacctgtacaatctcaccctcgccggcgccttcccaaccgcgctctgctccttgcggtccctggagcacctcgacctctccgcgaacctactcgagggcccgctgccggcctgcgtcgcggcgctcccggcgctcaggcacctcaacctcgccgggaacaacttctccggccatgtcccgcgctcgtggggcgccgggttccggtcccttgccgtgctgaaccttgtccagaacgcgctgtcaggcgagtttccggcgttcttggccaacctcaccggcctccgggagctccaactcgcctacaaccccttcgccccgtcgccattaccggcggacatgctcgtcaacctggccaacctccgcgtgctgttcgtcgccaactgctccctcaccggtaccatcccctcttccatcgggaagctgaagaatctcgtcaatctggacctttcggtgaacagcttgtctggtgagataccaccaagcattgggaacctgacttctttggagcagatcgagctcttctcgaaccagctctcgggtgctattcccgtggggctgggaggcctcaagaagctccattcactggacatctccatgaacctgctcaccggggagataccggaggacatgttcgcggcgccggggcttgtgagtgtgcatgtctaccagaacaatctgtccggtcacttgccgatgacgttggggacgacgccaagtctatctgacctgaggattttcggcaaccagctttcagggccgctgccggcggagcttgggaagaactgcccgctctcattcctggacacgtcggacaaccggctgtcgggtccaattccggcgacgctttgtgcgtccgggaaactggaggagctcatgttgctggacaacgagtttgagggccccattccggttgaactcggggaatgccggacactcgtgagggtgcggctgcagagcaacaggttgtctggcccagtgccaccaagattttggggattgcccaacgtgggcctgcttgagattcgcgagaatgcgctctcagggtcggttgatcctgccatttctggtgccaagagcctatccaagctgcttctacaggacaaccggttcacaggcactctacctgccgagcttgggaccttggaaaacctgcaagagttcaaggcttccaacaatggtttcaccggacccatacctcggtcgattgtcaacctttcgatactctacaatcttgatctgagcaacaattctctatctggagagatcccagaggactttggcaggctgaagaaactgacacagttggacctttcagataaccatctcagtgggaacattcctgaggagcttggggagatcgtcgagataaacacgcttgatctgtcacacaatgagctttccggtcagttgcccgtgcagttggggaatctcagactggctcgtttcaacatatcctataacaagctctcagggcctatacccagtttcttcaatggcttggagtaccgagacagcttcttgggcaaccctggcctgtgctatgggttctgccgtagcaatggcaattctgatggcagacagagcaagattatcaagatggtggtcaccatcataggtgtcagtgggatcatcctactcactggcatcgcttggttcggatacaagtacaggatgtacaagatcagtgctgctgaattggatgatggaaaatctagttgggtgctgacatccttccacaaggtggattttagcgagagggccattgtcaataaccttgatgagagcaacgtgattggccagggtggcgcaggcaaggtgtacaaggtggttgttgggccacagggtgaggccatggctgtcaagaagctctggcctagcggtgcggcgagcaaaagcatagactcgtttaaggctgaggttgccatgctaagcaaagttcggcacaggaacattgtaaagcttgcgtgcagcatcacaaacaacggcagcaggttgcttgtctacgagtacatggcaaatggtagcctgggggatgtgctccacagtgagaaacgccacatcttggattggcccatgaggtataagattgctgttaacgctgctgaaggactctcatacctgcaccatgactgtaagcccgtgatcgtccatcgagatgtgaagtcgaacaacatcttgctcgacgcggagtatggtgccaagattgcagattttggtgttgcaaggactattggggatggcccggctaccatgtccatgattgcagggtcttgtggatacattgctcctgagtatgcctacactctccatgtcactgaaaagagtgacatatatagctttggtgtggtgatccttgagctcgttaccggaaagaagccgctggcagcagagattggcgagatggacctggtggcgtgggtgactgccaaagttgagcagtacgggctagagtctgtgcttgaccagaacctcgacgagcagttcaaggacgagatgtgcatggttctgaaaatcgggctgctctgtgtctcaaaccttccaaccaaacgcccgtcaatgaggtccgtggtgatgctgctgctggaggtcaaggaagagaacaagccaaagctgaaggcggtggcaactctgcccatctgacctggaggaggcgaccccatctgatcaataataacaaataaaagtagtgtctgttcttcttgggatagtgtactaaaaaaactatttgcattatatctgatcttgagaagttcattcagggcagcagctagctagctaggtctgagaacattttcagcatagtgtttgctaaagcttatgactgtggtatccttttgctctaaatgagaaagtgctggttgctgtcaattttatccctggcaatctttttgttcatgattggctggccccatcaagggtgagtctacttccattcttttttgtgcctatttctgatcctgaa

SEQ ID NO: 143445 - DNA, 347 bp, Zea Mays
ttcgaccacttgccactaccccttcgcgctacctttcgcatcgcatccttgtcgactaaaggagtggtgcgttcaagatttagagaagctttcctaaagtatgttccctaacttatagcctcgcttggatctagagagtgtgggattcgatcctgacatatgctccatgtatggatgaattgttggtatcaagttcctcaacatttttgtgtttaaatcctctctatggaagaatgagccgacggatcttgagatcgacgaaatcactaaaccacgcggaggaggaggacgattatatatatggacataaattgggtctccttgctgcgtaaatgcttcaagaggta

SEQ ID NO: 143446 - DNA, 317 bp, Zea Mays
ttcgaccacttgccactaccccttcgcgctacctttcgcatcgcatccttgtcgactaaaggagtggtgcgttcaagatttagagaagctttcctaaagtatgttccctaacttatagcctcgcttggatctagagagtgtgggattcgatcctgacatatgctccatgtatggatgaatttttaaatcctctctatggaagaatgagccgacggatcttgagatcgacgaaatcactaaaccacgcggaggaggaggacgattatatatatggacataaattgggtctccttgctgcgtaaatgcttcaagaggta

SEQ ID NO: 143447 - DNA, 1261 bp, Zea Mays
ctcccgcgccccgagaagcgctgcgggcctcacctgcccgtcctcctgcctctcaggaaccgcggttcaggaaggaagggaagggcggaggacgactacgactacctcttcaaggtcgttctcatcggcgactctggcgtcggcaaatccaacctgctctccaggttcacgcgcaacgagttcagcctagagtccaagtccaccatcggggtcgagtttgctaccaggagcatcagggtcgacgacaaggtcgtcaaggcccagatctgggacactgctggccaggagaggtatcgggcaattacaagtgcgtactatagaggggctgttggagcacttgtcgtgtatgatgtgacacgccatgtgacctttgagaatgtggagaggtggttaaaggagctccgggatcacactgatgcaaacattgtcatcatgcttgttggcaacaaagctgatctgcgacaccttagagctgtatccgtggaggatgccaagggcttcgccgagagggaaagcacattcttcatggaaacatccgcactggagtccatgaatgtcgagagcgctttcaccgaggtcctaactcagatctatcgtgtggtcagcaagaaggcccttgacattggcgatgaccccgctgctccaccaagagggcaaaccatcaacgttggtggcaaggatgatgtctctgctgtgaagaagtcagggtgctgttcatcctaaatcacttatgaccatgaaaaggaaccatatactctccgatcatatgattggtaactgaaaataggactctcttgtgcttcctaacctgttggttatgagattatgttggtgctccagagaaatgattagatgttaagaatttgattccaagctgggacaagaacgttctttccgtggtgtcattgatattcatggtttctttctatggtttatagtgttccacactaattgacattagaatcctccccacacctcacagcttaacataccttgctaaacatgttgtaattggagctactgatgtttccttactgggagcaaagagtgtaactttttctttttatgtcacgagggattatgttccactcggtaaatgcccatctatcgttggtaggcagcaagtgttttagagtgttatatcatgtaattctcacagatgtacaaaatttgggttggaagtttatgttctgcaacagcttatttatcgacatgttcagacatatgcagacgtttatatttgctgttcatgatggtgaag

SEQ ID NO: 143448 - DNA, 1561 bp, Zea Mays
ctgaatatgtgatggttaccctcggccggcgtcctatgccgggtcggccgcatgtgcagatcagaacgagatgacaccaaggccgccgaacggcaacctgacacaggcggccagggccagggaggcagcttcggcgcggcgcaggccgcagcgcgcttgctatttttccgccggccccttggccctcgccttgctcctcttctttattatacgcgccaccacacgcatcgcgtccgcctcccaccacctcgccattctccccctcccgcgccccgagaagcgctgcgggcctcacctgcccgtcctcctgcctctcaggaaccgcggttcaggaaggaagggaaggcaagtgcctgccggggctcagcaccgatggcgtacagggcggaggacgactacgactacctcttcaaggtcgttctcatcggcgactctggcgtcggcaaatccaacctgctctccaggttcacgcgcaacgagttcagcctagagtccaagtccaccatcggggtcgagtttgctaccaggagcatcagggtcgacgacaaggtcgtcaaggcccagatctgggacactgctggccaggagaggtatcgggcaattacaagtgcgtactatagaggggctgttggagcacttgtcgtgtatgatgtgacacgccatgtgacctttgagaatgtggagaggtggttaaaggagctccgggatcacactgatgcaaacattgtcatcatgcttgttggcaacaaagctgatctgcgacaccttagagctgtatccgtggaggatgccaagggcttcgccgagagggaaagcacattcttcatggaaacatccgcactggagtccatgaatgtcgagagcgctttcaccgaggtcctaactcagatctatcgtgtggtcagcaagaaggcccttgacattggcgatgaccccgctgctccaccaagagggcaaaccatcaacgttggtggcaaggatgatgtctctgctgtgaagaagtcagggtgctgttcatcctaaatcacttatgaccatgaaaaggaaccatatactctccgatcatatgattggtaactgaaaataggactctcttgtgcttcctaacctgttggttatgagattatgttggtgctccagagaaatgattagatgttaagaatttgattccaagctgggacaagaacgttctttccgtggtgtcattgatattcatggtttctttctatggtttatagtgttccacactaattgacattagaatcctccccacacctcacagcttaacataccttgctaaacatgttgtaattggagctactgatgtttccttactgggagcaaagagtgtaactttttctttttatgtcacgagggattatgttccactcggtaaatgcccatctatcgttggtaggcagcaagtgttttagagtgttatatcatgtaattctcacagatgtacaaaatttgggttggaagtttatgttctgcaacagcttatttatcgacatgttcagacatatgcagacgtttatatttgctgttcatgatggtgaag

SEQ ID NO: 143449 - DNA, 2475 bp, Zea Mays
atggcgacgattcttggcgcagatggcgggcgagagagacagcagagaggagagcagggtcggacctttcctggatgtgttgattctccttccatgatggcgagcgagagatcagaggctgagataggacagcgggggcgagtctgttggcgagacagcgtgagagaggagagcgggcgacggcacaagccagaaccacagttcggaaaaccacccatgcttccttcccgccatctccgcgccgccgcgcggcagcgaagccacaggcggccgcccgcccctgccgacgcttgcattacgggcaagcctgatatggaggtcatccggcgcaacagagccatcacggcgcacatgcgtgcgggccgcgttccagacgccgagcgcctattcgccgcgatgccccgccgttccacctccacctacaacaccatgctcgccgggtacgccgccaacggacgcctcccgcaggcgctctccttcttccgttccattccgcgccccgattccttctcctacaacacgctcctgcatgcgctgggggtgtcgtcatcgctcgccgacgtgcgtgctctgttcgacgaaatgcccgtgaaggattccgtgtcctacaacgtcatgatctcatctcacgctaaccatggtctggtctcgctcgcacggcactactttgatctcgccccagagaaggatgctgtctcgtggaatggcatgcttgctgcctatgtccggaacggacggatccaagaggcaagggagctgttcgattcaaggacagagtgggatgcaatttcttggaatgctttgatggctgggtatgtgcagcgcagtcagatagaagaagcgcagaaaatgtttaataaaatgccacagagagatgttgtttcctggaatactatggtgtccggttatgcgaggagaggagatatggctgaggcaagaaggttgtttgatgtggccccaattagagatgtgttcacctggacagctattgtctctggatacgcacaaaatgggatgctcgaagaggccaagagggtgtttgatgccatgccagataagaatgctgtgtcgtggaatgcaatgatggcagcatatgtccagcggaggatgatggaggaggcaaaggagttgtttgatgctatgccctgtaggaatgtggcttcgtggaacacaatgttgacagggtatgctcaggctgggatgctggacgaggcgagagcaatttttggcatgatgccccagaaggatgcagtctcatgggctgcaatgctggctgcgtattcacaaattggtttcagtgaggaaacactgcagttgttcaaagagatgggacgttgtggtgagtgggtgaataggtcagcatttgcttgtgttttgagcacatgtgctgacattgctgcacttgagtgtggaatgcagctgcatagtaggttgattaaggctggttatggggtgggctgctttgttggaaatgcacttctagctatgtacttcaaatgcggaagcatggaggaagctcacagtgcatttgaagagatggaggagagggatgttgtttcgtggaatactatgattgcaggctatgcacgtcatggttttggcaaggaagcacttgaggtttttgataccatgaggaagacatctaccaagccagacgatattactttggttggagtacttgcagcatgtagtcattctggcttggttgagaaagggatttcatacttctattcaatgcaccgggattttggtgtggcaacaaaacctgaacactacacttgtatgatagatcttcttggccgtgctgggcgattggatgaagcagttaatcttatgaaggacatgccttttgagcctgactctaccatgtggggtgcattacttggtgccagtaggatccaccgcaactctgaacttggcaggaatgcagctgagaaaatatttgagttggaacctgaaaatgcaggcatgtatgtcttgctttcaaatatatatgcatcatctggcaaatggcgtgatgtggacaagatgagacatataatgcatgagcgtggtgtgaagaaggttccaggattcagttggattgaggtgcagaacaaagtccacactttctcagtgggtgattctgtgcatcctgaaagagaggacatatatgctttcctggaagatcttgacatcaggatgaaaaaggctggatatgtatcagctacagatatggttttgcatgatgttgaggaggaagagaaagagcacatgctaaagtatcatagcgagaagcttgctgttgcttatggtattctaaaaattcctcctgggaggcccatccgggtgataaagaacctgagagtatgcagagactgtcacactgctttcaagtgtatctctgcgattgagggaagactgatcatactgcgggattccaaccggtttcaccattttagagatggttcttgttcatgtggtgattactggtga

SEQ ID NO: 143450 - DNA, 1436 bp, Zea Mays
ctatagctcagaagatccggtccattttccagctctaaaactaaggcatagcggtaaacaccaccgaagtctcagcttctccgaggaaggggagcaattgttgaagcagccacttcaccttggggccatacagaaatggcggcttcttgcgcctccacactccctccactttccttcgtttcctcctccagttcaccccgccgattcaggcgctctggtgtggtggccatggccagcgttgggcagaaggtgtatgcgcccggtgtggcggtgtcggagggcaatggcgggctgccgaaaatcgacctcaaatccccgcacgggagcgaggctgagatttatctgtttggagcgtgtgttacttctttcaaagtccctaatggcaaggacctgctctttgttcgaccagatgctgtgtttaatggacagaaacccatcagcggtggaattccacattgtttcccccagtttggcccaggtcccatgcagcagattcagaagtcacagaaggagatccagctgtaactttggaactgaaagatgacacttatagccgttctatgtgggatttcagcttccatgcactgtacaagaagtggtatccttgtgctctgcagcatacgggtttgagtgtatttaaaaatatgtgcaggtttccctgcactctaaaagcttgtcaacaactctagcaataataaatacagatgacaagtctttctcattcaactcagccctccacacttatttcagtgcttccataactggcgtttctgtgaaaggtctaaaaggttgcaagactctcaataaggaccctgacccgaaaaatcctttggagggcaaagaagagagtatttaggttccctgcgttgcatcaatttcactgtatgtgactgggagcagaaagcaatatttgcaattagtgccacttttgtctaagggaagaggtgacttttccaggattcgtcgactgcgtctaccttggtgcaccaagtgaactcatcctggacaatggattgggtgacaaaattgccattgcaaattcaaattggtcagatgcagtcttgtggaatcctcacttgcagatggaggcctgctacaaagattttgtctgtgtggaaaacgccaagattgaaatggtacaactggagccaaaacaatcttgggtggcagaacagaaaattgaactagtctgatgataatgtcttgcagcaactgcatcaagtagagtgagacgcaaatggcgctcccccagtgtcattcttcatggcacatgtcatcacaataactatacatgtgatgttttctgttaaaaagaataaatgatgcaaatcatgaatttttttctagcagtctgatgtgtactgaattgcaaatgtacaatttgaactgcatggatctgttgaaataaagggagtgcccatttgatctttgacata

SEQ ID NO: 143451 - DNA, 1335 bp, Zea Mays
cacgcatcactatagctcagaagatccggtccattttccagctctaaaactaaggcatagcggtaaacaccaccgaagtctcagcttctccgaggaaggggagcaattgttgaagcagccacttcaccttggggccatacagaaatggcggcttcttgcgcctccacactccctccactttccttcgtttcctcctccagttcaccccgccgattcaggcgctctggtgtggtggccatggccagcgttgggcagaaggtgtatgcgcccggtgtggcggtgtcggagggcaatggcgggctgccgaaaatcgacctcaaatccccgcacgggagcgaggctgagatttatctgtttggagcgtgtgttacttctttcaaagtccctaatggcaaggacctgctctttgttcgaccagatgctgtgtttaatggacagaaacccatcagcggtggaattccacattgtttcccccagtttggcccaggtcccatgcagcagcatgggtttgcacggaatgtgaattggtctatcacagattcagaagtcacagaaggagatccagctgtaactttggaactgaaagatgacacttatagccgttctatgtgggatttcagcttccatgcactgtacaaggtttccctgcactctaaaagcttgtcaacaactctagcaataataaatacagatgacaagtctttctcattcaactcagccctccacacttatttcagtgcttccataactggcgtttctgtgaaaggtctaaaaggttgcaagactctcaataaggaccctgacccgaaaaatcctttggagggcaaagaagagagggaagaggtgacttttccaggattcgtcgactgcgtctaccttggtgcaccaagtgaactcatcctggacaatggattgggtgacaaaattgccattgcaaattcaaattggtcagatgcagtcttgtggaatcctcacttgcagatggaggcctgctacaaagattttgtctgtgtggaaaacgccaagattgaaatggtacaactggagccaaaacaatcttgggtggcagaacagaaaattgaactagtctgatgataatgtcttgcagcaactgcatcaagtagagtgagacgcaaatggcgctcccccagtgtcattcttcatggcacatgtcatcacaataactatacatgtgatgttttctgttaaaaagaataaatgatgcaaatcatgaatttttttctagcagtctgatgtgtactgaattgcaaatgtacaatttgaactgcatggatctgttgaaataaagggagtgcccatttgatctttgacata

SEQ ID NO: 143452 - DNA, 1161 bp, Zea Mays
ggtgcacacataaaacatcacagcacgcatcactatagctcagaagatccggtccattttccagctctaaaactaaggcatagcggtaaacaccaccgaagtctcagcttctccgaggaaggggagcaattgttgaagcagccacttcaccttggggccatacagaaatggcggcttcttgcgcctccacactccctccactttccttcgtttcctcctccagttcaccccgccgattcaggcgctctggtgtggtggccatggccagcgttgggcagaaggtgtatgcgcccggtgtggcggtgtcggagggcaatggcgggctgccgaaaatcgacctcaaatccccgcacgggagcgaggctgagatttatctgtttggagcgtgtgttacttctttcaaagtccctaatggcaaggacctgctctttgttcgaccagatgctgtgtttaatggacagaaacccatcagcggtggaattccacattgtttcccccagtttggcccaggtcccatgcagcagcatgggtttgcacggaatgtgaattggtctatcacagattcagaagtcacagaaggagatccagctgtaactttggaactgaaagatgacacttatagccgttctatgtgggatttcagcttccatgcactgtacaagggaagaggtgacttttccaggattcgtcgactgcgtctaccttggtgcaccaagtgaactcatcctggacaatggattgggtgacaaaattgccattgcaaattcaaattggtcagatgcagtcttgtggaatcctcacttgcagatggaggcctgctacaaagattttgtctgtgtggaaaacgccaagattgaaatggtacaactggagccaaaacaatcttgggtggcagaacagaaaattgaactagtctgatgataatgtcttgcagcaactgcatcaagtagagtgagacgcaaatggcgctcccccagtgtcattcttcatggcacatgtcatcacaataactatacatgtgatgttttctgttaaaaagaataaatgatgcaaatcatgaatttttttctagcagtctgatgtgtactgaattgcaaatgtacaatttgaactgcatggatctgttgaaataaagggagtgcccatttgatctttgacata

SEQ ID NO: 143453 - DNA, 1131 bp, Zea Mays
ttgccgccgcggccggagccattccgcttctggcttccctacagaagcagtgtagggtcatggaggcagcaaccaccgccgccgtcacctgtgctgtcgactatgccatcctcaccccgacctcagccaccttcaccgccaccaccaccaactccggtagggcctgtgcaccagaggccggcgccacacaccacggtggaagatatccctctccaagccgagccctctcacgaatcggacacgatttcagtccagagctcagactcgtcgcagctccgaggcggccgaccgtccacagctgacctggagttgacgctctccggcgccccgcccgccggccaggaacagaggtcgggcgtagacgacggcaaccgccgcaacgacaccaagatcgccatttccggcttcccgcggtcgcggctcttcgacggcgcacgcgcgccgtaccggcgggagatcgaggacgggctcaagagcttggccgcgcgcgagacgccggcgccgaggccggagagcggccacgggtaccgtgtcatcacgctcgccgggcacaatgtcggcgcgagtatggtccttggctatggcggcggcctcacggaagcgccagcgccactgccgagagccgcggagccaggggtgccggtgccgggtcccggttcgagaccgtcggcggtggccgcgaacgtgaacagcaacgtgcagagcgtgaacaactcgtcgatggaagagagcacgtgcaccgccggcaatcctggcgtgcacgtggacatcaagaacgcgcgcgaggagctcgctgcggtgacaccaacgccgattcagatggaagaagagaagccaaaggagcctgtgagaagaccgccgcttgctgtgacgccgcagcagaagagctcagcagcaggtggcgctgaggtggcaccggcgaggccaaggccgaggcggtgcttgcgcgcactgatgatggagaacgggagcaacacagaggctgcgcggaagccgaggccgagcgcctgccggttccagtgcgtgacggatcatgcaccgacggcgacggcgacgccgagcaacggcggtggcgctggcgataagaatgcagaggatggcgggaaatccagcacggaaggggcaagctga

SEQ ID NO: 143454 - DNA, 533 bp, Zea Mays
atggctgacggccaggaatcaaggaccgcatcgcggaaggtaagaggaggtttggccttctggagcctgctccttccagaatccggcgagggtgatgaggtcagactggagtccttccaccgctcaaaatggaagcggccacaagaaccaaaggggccaggctcagagaacaaaggggaggtggaaaccaacgtcgagagaaaagggggccaccgcaaaaggcaatcaaacaggacctcagacagagtcaacgcatacggtggtctaagacgagacgatgcgggtgatactatctaccatggctagtgcatcacttcttcagtcccgtagtgaatagtgattgagtagaggctggtggactcagttaaatccctcttatgcttttggtgaactgagatggttatcaaactagctatatttggacttatcttgttgtaagactttttaaatatgttgtttatctatcggatttggaacatgtaatatactagctacttatgaacctgaacttataaaataaatgtaatatacta

SEQ ID NO: 143455 - DNA, 1875 bp, Zea Mays
atggcgcacggttctgccaaacgcagacgcgtccatcccgccccgactgtcgcggcgcgaatcgcggctgtcgcatcctcccatcaataccgcggccgccgcttcctccgtccacacggtaaacctggtggcctcttcctcgccctgcccgcctgcctcttccccacctcgacgccgcccccgcccctgcatccagcgtgctccccgccccctcccccgcgccaccgagacaacgccgtcctcaccgtcgcacggttcagcgacgagatgagcgagctcgccgcgcccaccgacccacccttcccccaaaatccacgctggaaggaatcgtcgctggaagaaatcctcaccaaaatccacgctggatgggatctgtgtgggcaccgtgggtcgcctaaatcgatgccgcaccattggcaccttccatcctcgacgccttccatccatggatggaaatcgtcctttccatcggcggcacccttcttctccccacacagcgccctacctccccatcattctctgcatcccatctgcggtgcaaccgtacgcgctcacggtagagcaccgacgggggatccgacgcctgctcctgcatccctgcagcgaggcctcctcgtcctcgcccttggcggcaccctcattgggtggataaaaacaagctccgtagaatcagaaaatgtaagcaaggccctttatgaaactattggcaaactgtcaatccacaaggaggaggcaaggcttattgggcagctgtgcagtggcatgctggccaatctgatcggttgttgccgcgagagaggtggtccgaactgctctcttcgctccgtctcgagtttctcgccgacgtcgacgacgacaacgccgactcgtccgcatgcttcgttggccttgtctcgtattgttgttgctgaaaatttacctgaggatcaaaagcatcaaactctgatgaagattttctcagctgttgggaatgtgaaatctatacgtacctgttatccacaagatatttctctagcagcagctaacaaaacatcaaggattgagatgatttttgctaataagcttcattcttttgtggagtattcaactgttggagatgctgaaaaagcagttgctgaattcggtggtgggggaaactggagagaggggattagagttcgttcactgcttggatgtctgaaacatgggttaggtcaaggaagaaaaggtggggatgaggagtatgctgcagatgaagatggccctgacacaactgatcatccacgagactttggaacagatgttactgcccaaatctcagaagcacatttcgatcaccaggctgaagatggcacccatgacaagggtggaatgaggcagcaggggagagggaggggccgtggagggagaggcagaggccgtggtcagcattatggccacaacagccgagatggccaccatccgattggcactcccccgtcggagcatccagctgtgctgaagccgcccctgggcccccgcataacggatggcacaaaagggtttgttttcaagattttggtgctgaatatttttttggtgaatggttcaagtgttactgttgcgggagtcttcaacaggtcactcgccacatgcgccttccagcaggttgtgctcttgtgtctactggttataaacaataaatgctatgatggagctaagggtgatctgtgttcatgtggagtgattttctttgtcctcatggcggggtacctcccatttaaagattcaaacctgatgtcgctttacaagaagatcttcaaagcggatttcagttgccatcctggttctccacaagtgcaaagaagctcatcaagaagatacttgatcctaatgctaacactatgcttagattag

SEQ ID NO: 143456 - DNA, 676 bp, Zea Mays
agctcgcccctgccctaagttctcaaggcagcccctctgtgttttccatggccggcaccctccccatcttttgtagattggaagaaaggattcttgtgagtgtgagaagaagcaaatcccagcataacacatgctaggtgttcgacgaaatgttcgaattgggattgtcgttgatattgtggatctgagtcgcgctttgtattggttctgcacaacaggacttccaagcaatgtcaccgttgaggttggggatatgtctttccaccttcacaagttccctttactttcaaaaagtgcctttcttgaacggtcaattgaagaaaattctgaccaagaagaatgcatcatcaaactaaatgacattcctgggggtgccaagtcatttgagctagttgcaaggttctgctatggtgtgaaaatagagctttcacctgcaaatgctgtctacctacggtgtgcctcaaagcatctagaaatgactgaagaagtagctgaggaaaacctgattttgtgaatatataattgtgatgcttttgtgaatatataattgtggtgcttttgtgtttatgtgatggatctatgactgtggtatactgattaactgtgtgtgtctttatgatttgtgtataaaaatatgtgatttgtggtgcttaattaaatgtatattattattaat

SEQ ID NO: 143457 - DNA, 868 bp, Zea Mays
gcattcctctccctcttgctctctgttggccggagcggcagcaacacttaggattttctccctagcgcgcacgtcctggccggagttcctctgctcgatcctcggctggctgtcggtgctccctgcgtcgacctcccctgcaggctgctcccatggtgctctcccgagccgcgcccctgcgctcgccgagctgctccctggcgcttggcaccaggtcgccacgcccagtccatggcgcccagctccagcgctctagccaagctcgtctccatggcgcctgatcttcttctctagccgagctcgcgcagccgcccttccctctgattcttcctcgccgtagtcccaggccgctgcatcctgctccctgcgccggatcccctttcccctatgtttccatggccggagctcccttccgctcccagctcaccggcgctcatccatggccgaagcccctccctgctcggagcttttcccccagccgagctccatctcccatggaagctgcgatctgccgagtcccgtttttcctggatgcgcacgatgctcctcttttggccgcgccgtggagcctgcgcgctcggtccttcccatctcgccgcactcggattcagcgcagctcgtgtcctgctcgcctcctgtcttcaaccatggatgtcggccgtcctggatggttcacaaactccgccgctcaatgccgcgtctccagcaccagcgtccctgctccctgtttcctccatggctgcgtcgcgcgcgttccgttgttcctgcccgtgctgtcgcgaagctcactgttcagttctccttcgtcgcgttgttgtgcgcgcgaaactgctcgtagtcgacatcgagtccgtgacgtgcgtgttgg

SEQ ID NO: 143458 - DNA, 125 bp, Zea Mays
ttttttttttttctttctaatttctgttttccttttttatttcggatccaaattcaaatccgattttgaatgtaagcaaaagttaaatgcacaaatagaaatccagcatgatgtgcaaaatagaa

SEQ ID NO: 143459 - DNA, 473 bp, Zea Mays
acctacattttcatgagaagtcagatccacagtgcatgtagccccttgattaaccatctgtttactggatgcttcctgcttgatctttttcagcttgtggcctctattcattagtccaccacttggcattccaagaattttgccacttcgtaatctcctgtcagtactgtcagctccaatctttggagtcatcccttcagttgatagttctaatgcatctgtagtccaaagttgagaggatgtacagttaatagaaagagtaaccattccatgctcacttgaacagctgtgctttttctcttgctgaataccaacgtcttcctcagcctgaccacaacctactgtgctcctgtaactttcattcacaactgacataattttggatgtacacactacagatgtgtaagaatcattctctgtgaaagaatatctgttagaattggaaaaactgtcacttaagaacttctccatgt

SEQ ID NO: 143460 - DNA, 546 bp, Zea Mays
ctaatcattgatgacgaacatggcacgtgtgctggatgtgtgtaggaggcatcatcatcgtcccattcacccttctcttggctgtgtacaggagtcgtcgtcgaattttttttgaaaccttcaagcttcgacgcccgaccctttgcatttgtggtatagtgaagattgaactatcggggagaatgcagaaacaatttacagatgacaggtactacatatgacagatgaggcaactggccatggtgtatatgctgcttcgacctgtgcagtttatggatgaagacgaagctgacctacagatgtaagctttgttttctatggaccaggtcttgtatatccaaattgaatggattgttctgataaatatagcgtgaaaagataagttataatatttattcttgtgcgtcatcacaacgcattttggtggggtaatatgaactttgatctattttcccaattatattctaggctctaaccaactgatccaaaatgtcacattgattgatacgtggatgttgatacttctcaatggagatatatgttgtg

SEQ ID NO: 143461 - DNA, 1243 bp, Zea Mays
gtcaccgtcgtttttatcttctacgggcgtcggcgcttttctctaccgcaccctgcttctctctccctgagttcctcccctacgcgcgccggctgctcttccctggccgccgcgccctcccctgctagcagccaaagctcctgtgcgctcatccctctgctcggggcgcgccctgccgtattccctgcccatggcagccgtccgaccgagctccatctccagccgcgacgcccagttccctcccatggcgctcttccttgggccactgcttccccagccgcgagttccccctgctcagcacctcctcgagctcgtccatggtcgcatcttgctcggatcccatctctctgctcggatctcggccctgcctagctccctctctcctctctacatctccctatcgggcggtactcatctccctgctgcgcgcaatccttctcggctccatcccccagcgccctgctagctccctgctcgccgtgctctggagtcctccctgcaccaagccgtggagctcctacgcacgcgccgtgccgagctcgcccccgacctctgcttgccttgctgctgctcgcccatggcagccgcttcctctctgctcacgcccatcgtctttccctgccgtagaaatcctgtgcgcgcgcgtcctctgcgtctccaagctgtggagcccctttcccctcccctcttcttgccgcgcttggattcagccccagccgcgcccctgctctgctctctgtctgcgcgcgcgctgagctcggcgttctgcgcgccctcgagctcacctctgcctatgtcgccgcgctcggctgcacctccatctccctcatagtcgcgcctctggtgttttctctggcgcatctcctgtttctccagccgcgccgtcgatcctgcctgagccccttcgcgttcgtcgaagctccctggctcgactctgcccagtccgcgtcctgctcgcctttgcatcgcgcgtgtagcatttcgttgttcctgcgcgtgctgtcgcgaagctccctgttcagttctcctccgtcgcgttgtcgtacgcgcgaaactgctcgcagtcgacatcgagtccgtaacgcgcgcgctggacacggtgatacgctgcgtgtgcttgtatccgagcccgcccggttgcaacctcgctttgctctttgcgtcgctgttcgctgggtcaagcccatgttgccgcgtccctgtttcagtttgtcgtgctgcaccatcatcgcttctgtcgcaa

SEQ ID NO: 143462 - DNA, 1664 bp, Zea Mays
gactttgtgagtttgtgaccatcctgtcgcgtttctgcgttagtaatggctgcagactgcagtctcttcgtctccagaggctgagacccacacgctccctcacatcgccatattcccgttcctcgccaagggccacaccatcccgctcatccacctcgcccactacctccaccgctacggccttgccaccatcaccttctttaccaccgccggcaacgcaggcttcgtcctggaggggctgtccggtgcggacgcggccgtcgtcgagctcaccttcccgaccgacatcgcgggcatccctccgggcgtcgagagcgccgaggggctcacgtccctggtctcctttgccgtcttcgccgacgcaacgtccctgctccagccacagctcgacgcatccctcgctgagatgcagccgccagcgagcctgctcgtcaccgacccattcctgcactggacgaaagcgtcggcggcaaggctgggcatcccgaaggtgtcgttcttcggcatctcggccttcgcgcaagtcatgcgagaggtgcgtgtgcgccacgacccttgtgccacgctgcggcccgacaacgtcgacgccgatggccacccggccactttcacggtgccggagttcccgcacatcaagctcaccttcgaagacttcatggcacccttcggcgaccctgcgtccatggcgcccatgttgaagctcgatgctaagctgggcagggccatcgtggaaagtcaaggcctgatcatcaataccctccatggcctcgaggctccgtatcttgacttctggaaccagcatgtcgggcccagggcttggcccatcggacccctctgttttgcccaaccaacatcaatcggacccaaggcccggccctcttggatggagtggctcgacgacaaggcaacaactggtcaaacggttctatatgtcgctcttggacactagccgcaatcctagagtcacaattgaaggaggtcgcaaatggactagaggaggccgaggttcactttttatgggctgttaggcccgagaatgtcgacctaggtccgggctttgaagagcgtacaaagggcaggggcttgatggtgagagaatgggtagatcagttggagattctaaagcatagcaacataaaagggttcttgagtcattgtggttggaactcagtacttgaaagtgttgcatccggtgtgccgttagcggtatggccaatgcatgccgatcaacctttcaattcaaagttcttggttgatgagctgaagatcgctgttagggttcacacaagcgatagaactattagaggctccgtaagaagcgaggagatttccaaggtggtgaggatgctcatggtaggagaggaaggggtagaagcggcaaagaggatggcacagttgtcagctagtgctaaggaggccatgatagaaggagggccgtcatggaaatctctaaaggagatgataagccagttgggcctaaagtaggagaacggggatgaagaggtatgcctggagaagaaagtggatgcttgattattcgtgtgtacatactctgagttgttgttgtttattttcttcacaaataactgggtggatgtaaacaatctttggcaatgaattatatatatgtagggaagcactacttgtcttcgagggtgataaac

SEQ ID NO: 143463 - DNA, 585 bp, Zea Mays
tagtagtttcataaagccatcaagttcacacacaacagtttcacatagccatcaagttcacacacaaaagtttcacaaagacaagttcacacaatcagttcaatacagagatataagttcacatataagttgtttcacttccttagctgcatcataagccacctcttcctcctttccattgggagtgccatcatcgactcaaacttgcgtgcattagaggtgaggatgtcataaagctcaagttctgtgtcttcatcaagtccctcaacctcttgtaatgcggcgagaacttcggcggaagagggtagctttggaccgtcatctttcaatgcagatgtaagcatgtcgaacttatcacaccatatagagttaaatgaatcatctgatctttgtctttttaaactactcgaggaagatacagaatatggagcatccttgcctccggtatcattctcttttgccatttcctttgaactttcagctgctgttttagcaccctctccatttgcttggtctttattgtacactaggctgagtagatcccaaaacttcacaaccttatgtctatatccttttgcttcctta

SEQ ID NO: 143464 - DNA, 4554 bp, Zea Mays
atggacgacgccggggagatacacgcgctggggagcctgcggcgggacggatcggtgtggtcggccgcgagcgacaccgtcttctcctcgctgtcgtcgcgcgcggacggcggcgtcgacgacgaggaggccctgcggtgggcggcgcttgagaagctgccgacctacgaccgcgcgaggacggccgtgctcgccatgcccgagggcgacctccgccacgtgaacgtgcagaagctcgacccgcaggagcgccacgcgctgctgcagcgcctcgcctgggtcggcgacgaccaccagcgcttcctctccaagttcaaggaccgcgtcgaccgggtggggattgatctgcccaagatcgaagtgcggtaccagaacctgaacgtcgaggcagaggcgtacgtcggcagtagggggctgcccaccatcctcaacacatacgccaacgtgctcgagggcatcgcaaatgctcttcacatcacaccaagtaggaaacagaaaatatcgattcttcataatgtcagcggcattatcaagccgcacagaatgacactgcttttgggtcctcctggcgccgggaaaacctcactgctgctggccttagctggaacactaccttcaagccttaaagtaacagggaatataacttacaatgggcacacaatggacgagtttgaggcccggagatcagctgcttatgtcagccaacatgatctacacatgggagaactgactgttcgtgagacagtcaatttctctgcaagatgtcaaggaagtggtcatcgctatgacttgctagttgaattgtcaaggagagaaaaggacgcaggaatcatacctgataaagaaactgatacctacatgaaggctgctgctacaggagaccaaaaggctgatgtggtcacaaatcacattctaaaggtcttggggttggatgtctgtgctgacacaatcgttggaaacaatatgttgagaggcatatctggaggccagaaaaagcgagtaactacagctgagatgcttgtcaccccaggacgagctgttttcatggatgagatatcaactggacttgacagctcaacaaccttccagattgtgaactctatccgggaaaccattcacattgttggcggaacagcagttattgctttgctacaacctgcacctgagacatatgacctgtttgatgatataatcctcctgtcagatagtcaggttgtctacagtggtcctcgtgaatatgtccttgagttctttgagtcagttggcttcaaatgccctcagcggaaaggtgtagccgacttcctgcaggaagttacatcaaagaaagatcagagacaatactggaaacatggtgatgacacctaccgatacgtccccgtgaaggagtttgcagaagcatttcaatcgttccatgttggtgaggctatacgaaatgagttggctgtcccattcgacaagagtacgagccatcctgctgctctgaaaacatcaagatatggcgccagcgtgaaagagctacttaaagcaaatatcgacagagagatattactaataaaaagaaattcctttgtatacatattcaaggcagttcagctaacactcatggcactcattacgatgaccgtctttctccggaccaatatgcatcgtgactcaatatcagatggaaggatatacatgggtgccctgttctttggggtcctgatggtcatgttcaatggactggcagaagttggcctaactattgcaaagctcccagttttcttcaagcaaagggatcttctcttctaccctgcatggacatactccttaccatcatggatcattaagactcccctctccttgctcaatgtaacaatttgggttttcataacatactatgttattggatttgatcccaacgtagaaagactttttagacagttcctgctcctcttactaatgaacgaggcatcatcaggattgttccgtttcattgctgggcttgcaaggcatcaggttgttgcaagcacccttggttcattcggcattctgatatgtatgcttttgggtggattcctcctggcaagagagaatgtgaagaaatggtggatttgggggtactggatatcacccctgatgtatgcacaaaacgccatatcagtaaatgaattcctgggtagcagctggaataagcaagtaatccccggttcagcagaaccgcttggaaaactagttctagaatctcgtggactttttcctgaggcaaagtggtactggattggtgttggtgccttgcttggatatgtgctgctattcaatatactctacacaatctgcctcacattcctcaaaccatttgacagcaatcaaccgacaatttctgaggaggcattaaagataaaacacgcaaatctaactggtgaagttttagaagcatcatcgagaggacgggttgccagcactacaacaacaggtactttggacgagagcaatgatgaagcagcttccaaccatgcaacagtaaattctagtccagtcaacaaaggaatggtcctcccttttgtacctctctccatcacttttgatgatataagatacagtgtggacatgccagagcacgccgtagatgttggagctcgattgcgacagcaagcagcaggtcgccatgggacgagcatcagcgctgaggacctcggctaccgctgcacgccggagctcggctggggaggaagaccagcacagaggagcgaaggccctctactgctactgtggagctacgccggagaggacgaagaccagcaccgacgacctcaggcaatcagagcacaaggtgtcacagagacccggttggaactactgaagggtataagtggttcgtttaggccaggagtccttactgctcttatgggtgtcagtggtgctggcaagacaacactgatggatgtgttggctgggaggaagaccagtggatacattgtgggcaacattaccatatcaggttacccgaagaaacaagaaacttttgctcgtgtgtcaggatactgtgagcaaaatgatatccactcaccaaatgttaccgtctatgaatcccttgcattctccgcatggctcagattacctgctgatgttgattcctcaacaagaaagatgtttattgatgaggttatggagcttgtggagcttttacccttaaaagatgcattggtaggattgcctggtgtcagtggactatcaacagaacaaaggaaaaggctaaccatagctgttgagcttgttgctaatccttctataattttcatggatgaaccgacatctggacttgatgctcgagcagcagctattgtcatgagggcaataaggaatactgtggacacaggaagaacggttgtttgtaccattcaccaaccaagtatagatatatttgaatcttttgatgagctcttccttatgaaacgtggaggtgaagagatttatgtaggcccactagggatgcattcatgtgaactggtcaaatattttgagggcatcgaaggtgtcaacaagataaaagatggctacaacccctcgacatggatgctggaagtgactagtacaatgcaagagcagataactggtattaacttcagtgaagtatacaagaattcagaactgcacaggaggaataaaactttgataaaggagctaagcacgcctccagaaggttcaagtgacctatcctttccaaccgaatactcacaggctttcctcacacagtgtttggcttgcctgtggaagcaaagcatgtcatattggagaaaccctccatatactggtgtcaaatacttctacacgacagtgattgccctgttgtttggaacaatgttctggggtgtgggcagaaaaagggatagtcaacaggacctgttcaatgccattggttccatgtatgcctcggttattttcatgggagtacagaattctggttcagttcagccagttgtatcggttgagcgaacagtcttttacagggaaagggcggctcatatgtactcgccattgccgtatgccttgggacaggtcgtaatcgaactcccatacatctttgttcagtccttaatatatggcgtgctggtgtatgctatgatcgggtttgaatggacagctgacaagttcttttggtacctcttcttcatgtatttcaccctagcatactacacgttctacgggatgatggtggttggcctgactccgaactacaacgtctcctccgttgcttccacggcgttctatgccatttggaacctcttctcgggattcttaataccaagaactagaattccagtctggtggagatggttctactggatttgccccatcgcatggacgctcaacgggctggtcacttcacagtttggagatgtaaccgagacgttcagtgacggtggggtgcgtatatctgacttcgttgaggactactttgggtaccatcacgacttgctgtgggtggtcgctgtggtggtggtcgcgtttcctgtgctctttgccttgctctttggcctctcgctcaagatattcaacttccaaaagaggtaa

SEQ ID NO: 143465 - DNA, 1027 bp, Zea Mays
atgtcggtgccaagccgaccaaatcaggcaagaaggcgtcggtgcttgccgacgccaaggcaaaagccaatgcgaccgtcgtcagcaaggaggagtcagcgacggaggtgggaggttaaggaggacgtggtgttgaccaagcagccagaggaaggcaccaacgacctcatctccgagttccgggacctgcccagtcgactgcatgagacgctaatgccggacctggcgcgcctctcgcagtactccaaggcgttcctgtccgcggcgaacgccgggatcgctaacagcgtgcgcctgatcctcagtggtcgcctccacggtatcagtggcggtgctgctggtgctgccgctcttcatgctcaccgcgctggtgcggcgcatgggcccgtacctgccgctccaccggtgctgctgctggcgcagacgtaccttgccatctacttcgcgacgctcgcgctcaccgcggccgccacggggttggagccgctgcgctttgtccacgcggcctcccccgccgcctacgcctagacgcagccgcgcagtcactcggcttcatggcctacctcgtgctccagatggtggacctcgtcgccgtcttctcaggcaccgcctcccctgaggacgacggcaacggggacgccgccaaggccctcgagctcgcgcagatggtggtcggcctcgccgctggcgtgcactactacgcgcggtcttccaccatgccgcggcaggggctgcgccccgcgccaactggcgcgtgtacgcggcctgcttcgcaaatcgtgtgcgcctgcgtgagccgagaggaggaagaaggcctacctcgcgggcatcgaccgcgccgccgaggagtggaagaacagctgagctgatcgcgtcgggaacagagagagggaacttctctgggagaaaaaaatcccaatacggtggtcggtggaagcccaattgcccatgtgcatgaacgtaacccagaatttaggaagaaaaaggagggtataaaagtaaaagaatacgggagcaagctgtgact

SEQ ID NO: 143466 - DNA, 100 bp, Zea Mays
ttatatttttttcagccgcacaagaacagctctctgtttatcgatctgtctctcttccttctctctctgcgagttcgcctgtctctgtttttcagccgcc

SEQ ID NO: 143467 - DNA, 1806 bp, Zea Mays
cagttcaccatgaggtcaccggctgctccggggccttctcacgattccctcgactcatcaccgccggcgcctggttttcgtagttaccagcagacaaaactggcggagcttgatctggattcatccttgtcgccggccaccgcggcgccaggttcgcagcctactccatcggagtcgccgctgccagctccgacaccaacacctgcgcccgcggcgacagggctgctgataccaataccagcgcggccagtgcttgctccatattcccagccggcgtcttcatcgggttcacctgccgacaagtcagtggcgggcattgctgctggctcagctgctgcgggcgcccttctcatcgtgctactggtagcagttggtttgtatgtggcgtcgcctatttggaagaggcgcactgggcgtgaccgcaggggagcaggcagctccggtggcggcggtgcctcacaacatgaatcgcagaaacgccactctgctgttcaaatcgaggtcgaagtgacgccgccgccaacagcgtcatcatcgtcctgggctacttccagagacagccacaagccggacacgcacggcgacggagcgggaccgcgcgtgcaggtgcagcccgtgcctggagctggaggtggcgactacgaggtccggtttagaggcgcgttcacctacgagcagctggccgccgcgacggacggcttctcggagtccagcctcgtcgggcgcggcgggttcggcgacgtgcacgtcggcacggtggacggcgccgcggtggccgtgaagcggctgcgggcagggagccagcagggggaccgggagttccaggcggagctgcggatcatcagccgcgtgcaccaccgcaacctcgtctcgctcgtcggctactgcgttggcgacggcggccagcgcctgctcgtctacgagttcgtgcccaacttgacgctgcaccaccacttgcacgcattcagcacaacaggggaggttgaaacagtactcggttggccgactagatggaaaattgctgttggagctgcaaaaggcttggcctaccttcatgaggactgtcatcccagaatcatccaccgcgacatcaaggcagccaacattttgcttgaccctgacttcaaccccaaggtttctgattttggtatggcaaaattcgtacctagtagaggggatactcacattgcaacaaggatcgttggaactattggatacctcgcacccgagtacgccacatccggcaggcttagcgagaaatccgacgtgttttcttttggcgtcgtgctgctggagctcgtcaccggcatgagcgccgccctgtcgtcggatcgggaagaaggcactctagtaggctgggcacggccgttgctcaccaaggccatggagctccacgactacgacgagctcgtcgacccactgctgccgagcttcgacgccaagcagatggcgtgtctggtccggtgcgccgcggccgcggtcagcacgtcggcacgccaccgaccgcggatgagccaggtacgtcgtgtcgttgagagtttagtttggtttttacagatcgtcaagcacttggagggcgacgcctctacagagcccttgggtcagactggttccagtcacgggcccggcggggacacttcggcccagtttcatagctacagcaagataagggcgtcgagaagctcggacgcgacgcgagggcattgggtcaccgttctgagcccaatgcatggcacggtccctagtgatttagtacgacacggtcataattcaaatagtgccactgcccataagacacggatctag

SEQ ID NO: 143468 - DNA, 457 bp, Zea Mays
aactcctcgcgcagcctcaggcccccaacaccaccgacgcaggctcctcttcggcgctcccgttcgcccgcgcgctcaaccctggaagacaacctatactgacaccgcaaatttcattgtgtgttgtggggtgtgccagatcgacgctgccgatcaaaaggcaaggttcttataaaactaaaaaattttcaacttccatccaagtctgcaaatatgtttatactgaatgttctaatctggaattgtcaactatcatctggtaagcttcctgaatgtattaatatgctaggatgtatagtatcccatacgttggtttgtgttagaatagaatggtttggttaaagatggaatatgatttctgctttccatatacacgccttcctgtatagcattgattggtcacccggatcctatttctataaatctggttagaggagctgctatatattgtgatccc

SEQ ID NO: 143469 - DNA, 92 bp, Zea Mays
acaaaaaatcatatatacatatgtacaatttatattcaatattataaatacatgagcatgatgttctactggttagatagcttcgcacagtg

SEQ ID NO: 143470 - DNA, 2284 bp, Zea Mays
cttttgcggtacgcacggatattcgtttttttcacctgcaaatctgcaataaaacgccgccaccgccgcggcgccaccacctcaagatccgatctccctctctctccccaatcctccccgcctccccctaccaaatcagcaccacccaaggcgcatccgagccacggccgcgcaatgccgccctctgtcgatgcaatgccggcccccggcgacgccgcgggcgccggcgacgtgcgcatgatctcctccaaggagctccgcgctcacgcttccgccgacgacctctggatctccatctccggcgacgtgtacgacgtcacgccctggctcccccaccacccgggcggcgacctcccgcttctcaccctggcggggcaggacgccaccgacgccttcgccgcctaccacccgccctcggcgcgcccgctcctccgccgcttcttcgttggccgcctctctgactacgccgtctcccccgcgtccgccgactaccgccgcctcctcgcgcagctatcctccgcgggcctcttcgaacgcgtcggccccacccccaaggtccagctcgtcctgatggccgtcctcttctacgccgcgctgtacctcgtcctcgcatgcgccagcgcctgggcgcacctcctcgcggggggtctcattggcttcgtctggatccagtccggctggatgggccacgactcgggccaccaccgcatcaccggccatccggtcctcgaccgcgtcgtgcaggtgctctccgggaactgcctcaccggcctcagcatcgcctggtggaagtgtaaccacaacacgcaccacatcgcctgcaacagcctggaccatgacccggacctccagcacatgccgctctttgccgtctcccccaagctgttcggcaacatatggtcctacttctaccaacggaccctggcgttcgatgccgcctcgaaattcttcatcagctaccagcactggaccttctacccggtaatgtgcatcgccaggataaatcttctcgcgcagtccgccctgttcgttctcacggagaagagggtgccgcagcggttgcttgagatcgcgggggtcgccacattctgggcttggtacccgttgctggtggcttccctgccgaattggtgggagagggtcgcgtttgtgcttttcagcttcaccatctgcgggattcagcacgtccaattctgcctgaaccacttctcgtccgacgtgtatgtcgggccacccaagggcaatgactggtttgagaagcagacggcaggcacgctcgacatcctgtgctctccttggatggattggttccacggtggcctgcagttccagattgagcaccatctgtttccccgcctacctcggtgccaccttcgcaaggttgcaccggccgtccgcgacctttgcaagaagcatgggctcacttattctgcagccacattctggggtgcaaatgtgcttacatggaagacactcagggctgctgcattgcaggccaggaccgctacaagtggtggtgctccgaagaatttggtatgggaggctgtgaacacccatggataaatgggatgaagatacgggctaatggcaacttctggtgttcagcttggtgcccatgtgattgtctggatgcctttcagttatttagagatattgatcattcaacctgcctgagtcaggttggaattttcgtgttgacaagtggctgtctatccagttggagagttcatgcttcaatagtctggttgttcacgggatgttctgttctccctatcacggtaactatatgatgatgatccttgctttaattcatgaacacttgtttcaagattatgtccattacattttgcttgcattgtcaagattgtggattcttggtgttcatgacgttgtaatgttaatgaacggctggtaacgccatgtggtactggtacccctgtattttcagttgctgtggcaccttggctctctctttgaaaaaccagtatgtatatgacaatgatcaatttattcatattcctacttcattcccattttctgatttgttcttaacttagggggtgtttggtttctagggactaatttttagtccctccattttattctattttagtcccaaaattactaaatatagaaactaaaactctattttagtttccctatttatcaatttatgaactaaaatgaaataaagtggagggactaaagtttagtccctataaaccaaacacccctttactttttttttatcatgtaaagtgatgctatctttgtgttctcttat

SEQ ID NO: 143471 - DNA, 1809 bp, Zea Mays
cgcacggatattcgtttttttcacctgcaaatctgcaataaaacgccgccaccgccgcggcgccaccacctcaagatccgatctccctctctctccccaatcctccccgcctccccctaccaaatcagcaccacccaaggcgcatccgagccacggccgcgcaatgccgccctctgtcgatgcaatgccggcccccggcgacgccgcgggcgccggcgacgtgcgcatgatctcctccaaggagctccgcgctcacgcttccgccgacgacctctggatctccatctccggcgacgtgtacgacgtcacgccctggctcccccacccccaaggtccagctcgtcctgatggccgtcctcttctacgccgcgctgtacctcgtcctcgcatgcgccagcgcctgggcgcacctcctcgcggggggtctcattggcttcgtctggatccagtccggctggatgggccacgactcgggccaccaccgcatcaccggccatccggtcctcgaccgcgtcgtgcaggtgctctccgggaactgcctcaccggcctcagcatcgcctggtggaagtgtaaccacaacacgcaccacatcgcctgcaacagcctggaccatgacccggacctccagcacatgccgctctttgccgtctcccccaagctgttcggcaacatatggtcctacttctaccaacggaccctggcgttcgatgccgcctcgaaattcttcatcagctaccagcactggaccttctacccggtaatgtgcatcgccaggataaatcttctcgcgcagtccgccctgttcgttctcacggagaagagggtgccgcagcggttgcttgagatcgcgggggtcgccacattctgggcttggtacccgttgctggtggcttccctgccgaattggtgggagagggtcgcgtttgtgcttttcagcttcaccatctgcgggattcagcacgtccaattctgcctgaaccacttctcgtccgacgtgtatgtcgggccacccaagggcaatgactggtttgagaagcagacggcaggcacgctcgacatcctgtgctctccttggatggattggttccacggtggcctgcagttccagattgagcaccatctgtttccccgcctacctcggtgccaccttcgcaaggttgcaccggccgtccgcgacctttgcaagaagcatgggctcacttattctgcagccacattctggggtgcaaatgtgcttacatggaagacactcagggctgctgcattgcaggccaggaccgctacaagtggtggtgctccgaagaatttggtatgggaggctgtgaacacccatggataaatgggatgaagatacgggctaatggcaacttctggtgttcagcttggtgcccatgtgattgtctggatgcctttcagttatttagagatattgatcattcaacctgcctgagtcaggttggaattttcgtgttgacaagtggctgtctatccagttggagagttcatgcttcaatagtctggttgttcacgggatgttctgttctccctatcacggtaactatatgatgatgatccttgctttaattcatgaacacttgtttcaagattatgtccattacattttgcttgcattgtcaagattgtggattcttggtgttcatgacgttgtaatgttaatgaacggctggtaacgccatgtggtactggtacccctgtattttcagttgctgtggcaccttggctctctctttgaaaaaccagtatgtatatgacaatgatcaatttattcatattcctacttcattccc

SEQ ID NO: 143472 - DNA, 372 bp, Zea Mays
atgtccatccacaaaagtaaccaagatgtcatctgtcatacgttcaaacttcaggtttgtcgaggcttcctcaagtctgctagaattagaggagcgtcactcctacatattacagatgttcccatgaagccaacttctagctttgctatgtccatctccatctcttacttgttcgtttcagctagaacaacagctacaccaccactgatactcttgtttgctagctgcttcagaagagagccctgtgaatctccatgtggtgatggtgttggtcgacccactgcggcgtcgatgggtcaccacagaagaacatcgtcgcctccctcatctgcctacaccacacgccgacgcccccaccgaccacggagataa

SEQ ID NO: 143473 - DNA, 2342 bp, Zea Mays
ttcagataccgatcaggcattcaagaagtaaattcttcttctattgtgctgaatatatctgattctacatggctatggtgccaagtgattcatcacatcatggagctgtggacaatagccctaatggattcacccagggtcggcgtgaggaagctaggaaacttgggccatcatggtatttcagtagaaaggaaatagaagaacattctccatccaggagggatgacattgatttgaagaaagagtgtagccttcgaaagtcgtattgcagttttctacaagatttgggcatgaagcttaaagtgccccaagtgacgattgctacagctacggtattctgtcaccgttttttccttcgtcaatcccatgcaaagaatgatagacgaataattgccacagtttgtatgttcttggctgggaaagttgaagaaacacctagacctttgaaggatgttatcctggtatcttacgagcttattcataagaaggattctacagctggccagagaatcaagcagcagaaggaaatatatgataaacaaaaagaacttattttactcggggagcgaattgtacttgtaacacttgggtttgacctgaatattgaccatgcttacaagcccttggttgaagcaataaggagattcaatgttggtagtaaaagttcgcttcctcaggttgcctggaattttgtaaatgatggactgcgtacttcgctttgcctgcaattcgagcctcatcatattgcagcaggtgctatctttttggctgctaaatttctcaaagtgaagcttccatctgatggtgataaggtttggtggcaggattttgatgtcacaccacggcagcttgaagaagttagcagtcaaatgatggagctgtatgttcagaaccgtacaccacaggcacaacaatcacagggaagcgaagctgaggggagctctgctggtgtgcgtaatcaacattcatctgtaaaatctgaaggaaactccaaggaaccatctgctcatggatatcatccggcattcaaaccgtcgaatttgcatcattcatccttggcaggtgctccaggtgaccatgacagtgggcattcaaattcagacaagcatgtttctggccacaaaatgcttcaaaatgataatggtaaccatgtcggtagcaaagaaaagaacaagagtggaggtaaatcggatgctggtatggatagattttgtcatgagaaatccccacctggacatcattattccaaggtcagccatgagtctcataatccagtggaagaacaaaaaccacatcaatcacatgataaccccaatgaaagaatagatggcattcttggtggcaacgaagttcctggtgtgtcgacctccaggatcgatgcaatgaataaaattgacaagggtaaggtaaaagcagctttggagaagcgaagaaaaacaaaaggtgatattaccacaaaggtagacgtgatggatgatgatgatctacttgagagagagcttgaacatggtgttgaattggctattgaggatgagaagattaagcaggataagatgcagaacttgtcccatattaaggacaagaagattacgcaggataatatgcagaacttgtcccatattaaggacgagcaggataacatgcagaacttgtccgacattaaggatgagaagattaagcaggatgagaggcagaacatgtcccatgctccagtggatcttcaaaccactgaccaagtaatggagaatggtcaccatgtcgagcctagtgtaccaacaactgtggaagacacggggtttccattggacaacaaagaacatcctccatttgataagcaaaatgatgttcctgagcacgagtcccagcagcttgaacacacattgaagcacgacctccctcagctggtaggggggcctgagcaggatgatggaacagactgtaaaaggcctaagctcgaagagtaggttctggatgatgctcactttattttggacagttttcctggagactggtgaactgcatacaacttggcacggagttggtgagcatggctttgccggtgccttgctgtgctgtgaaatatgccctacggctgattgcagtttacaattcgagggaggtcgtgctagcaaatatttttacgttcaaacgaacattggaatatatggaccaaaacatgctcacgcttctgataacggttgcattcgttccttaaatatgtgttccatgaaagtgaagcaaatgattttcatcccatcagggttgcatgcacctcatctcaatagaaaattaaaaaaacagtatttttataacttttcaacaatattatactacaacttttg

SEQ ID NO: 143474 - DNA, 78 bp, Zea Mays
gggtactcgggttgttccctaaggggcttcttttgcctctcaggtttgtttgtactttcatttctcttaatgaaatga

SEQ ID NO: 143475 - DNA, 247 bp, Zea Mays
caagaaagacaaccggagcgccacctccattggtgagggattgccgccgccgtcgcccctacttcctccatcgttcggtgcctatgtggagactcgagacgtccaccggctcacgaaggatcttggcggatcttgcctatgctcggatgggtgcatcagtgctcgccgaagtgtactggagtctagaattcgttggcaagccgctttgggtcggggtcaatgtcgccgcggtttcggtcaccggtga

SEQ ID NO: 143476 - DNA, 1215 bp, Zea Mays
ataccacaccattgtggtgcaattcacaagaatctctaatctgttgttgtgcgctacgtacggatcatcatccatggccatggagaagctgctccactcgaccacgtcccgcacgtcccttccggactgcttcgtcttcccggccgaccaggtcccgccggcaacctccgctgccgtctctctacccgtcatcgacatgtcgtgcagccgagacgaggttcgccgtgccatgctcgacgccggcaaagacctcggtttcttccaggtggtcaaccatggcatctctgagcaggcgttgctggagatggcggcggtgggcgaggagttcttccggctgccggcggaggagaagttgcctttttactcagaggacgcaaacaaggccacccggcttttctccggcaccacctacgagaccggcggcgagaagtactggcgagactgcctccgcttcgcctacgacttcggcgccggtgatcgcatcaaggactggcccgacaagccccgcaggctccgggaggttgctgagaacttcaccgttctgacgagaggcttggcaatggacctgctgcggctactgtgcgagggcctgggcctccagcacgactacttcgaaggggacctcaccggcggcgacgtgaccctcgacatcaaccactacccgccatgccctaacccgagcgtcaccctcggcctgccgccgcactgcgaccgggacctcatcgcagtgctcctccctggcccggtccctggcctcgaggtcgtctacaagggcgagtgggtcaaggtcgtcgccgacccgaccgtgccgcacgccctggtcgtcaacctgggccaacagctcgaggttgtgacgaatggagttctcaggagcatcgagcaccgagtgatgaccaactcagccatggcgcggacgtctgtggcgttgttcgtcgcgccgaccgaagattgtctcgtcgggcctgcggagaagttccttagtcaggagaatccgccgtgctaccgaaccctcaagtttcacgaattcaagcgcacttacaatgtcgtcaaattgggatcatccattaatcaaagaactaatcttaggaacacgcaaaaggagatataaactactactacaatgctcgtatgaagcgaaaaataatgagaagaaaaatataatgtatgtatacattatatttccagctgatgatatgaaaaagctttttggttggc

SEQ ID NO: 143477 - DNA, 579 bp, Zea Mays
aaatccataagaggcacccatctcatgtctatcatgtgatatttcatatcgcgtagtactataggatggttatctgaagatgtgcagtgtacatttcctacaacgaaatgcactgacgacattctgccgtggcagaaaatcatctctacatttgttttgaaaattcagtgcccaaaattcatcttaagccaatccatgcagctagcctcccttcgaggaactgtcgctgctagaacctcttcggtcctacgcaccaaattgcatcatggaacccttctatccttgaattatcccacttctgcttgcggagaactgcacaccacatagctcacatcttcagcttccctgcttcttatgcatcgtacttgcaaaggtcctcaaaccccatgtactcatgtcgctcaatcttgtgaaccatgttagagacgccaaccccacctgcagaaatcgcgctgacaaagatcatgaaagccagtatgaagatgataagtgatgctcgccctagccagttgatcaacttcctcaccacatgctggccaatgatggcagcaacaaatgcaacaacgatgaaataaacag

SEQ ID NO: 143478 - DNA, 101 bp, Zea Mays
ttctttttcttttttggagcgaggctggatgatacattgcaatttgcagcacagacaaacggggagcatgttcagattgctcagagaagggacatccctac

SEQ ID NO: 143479 - DNA, 1690 bp, Zea Mays
gaacatcctacccgcccgtcacagcttctcgtggaccgagtccacagcacaccgaccgccatggatcgcgaggcgctccgcatgctgtgctcgccgcagttctggcggatggcagtcctctgggccctctccctcctccactcctacctcctcgtgttccactgcggccgggcggatgcccctcgccgccgccggccgcggccagccgaaggacgttgccccatctgcgttgtcaccggggcgacatcggggctgggcagggcggcggcggcggcgctcgcgcgggagggctaccacgtcgtgcttgctggacgttccacacagttattatatgagacagttcaagaaattcagaggcaacagccagatgcccatctcaaagagtttcaggtcgacttggcatccttcaagtcgattaagaaatttggaagttcactgaagcaatgggttcatgagaaaaatgtggagccttctattcagcttttggtaaataatgctggaatattagcgaagtcgcatcgaattactgaagatggccttgatgagatgatacagacaaactacattggtccatttatgctgaccaacattcttttaccattgctgaagaacagctcggtaccttctcgagtggttaatctaacttctttcacacacaggtgtgtgtcaggtcttgatgtatgtgaggatgcgctgagagggatgaaatttggtcggtgttcgataggggaaagttaccccttagcttctacttatgagtataccaagctttgtatgctgatgttctcatatgagcttcatcgacagctgcacatgtcatctggcgtctctgtaattgctgccgatcccggtgtcgtggagacaaagattatgcgagagctccctgaatgcctctcttggttcgcgttcttggctctgcgctcccttaaactcctgcaagaacctgacacgggggttggtgctgtcctcgatgctgctttggcgctgcctgaagagtctgggaagtatttctttggagggaaagggagaacgatcagatcgtcccgactgtcctatgacgccgaggtagccaagaagctgtgggcagagtcgtcagcagtgttcaaggagctgcagcttagaggaggcgattttggggatagttaaagaaaaacacagacaaatagatgagcctgacacccttgttttatgtatggtcctattttggcccttcgttttagcgtactcgaattttggtcctatatacgggaaaatatcctatgcaatcacttatcctggtgcaagcatgcaatcgagcgatctggtgcatccgatctagatctaatgatgactgttattttatatttaactccttccacctaaaacatagtacttattttacttttaacccctttcatatgaaaccgttggatctagattagatgctctgaatagtttgattgcacgcttgcaccaaaatgagtgattgcacaggatatgtcctccctatatacatgaggcagactggcagagcaagcaaggtcttgttctgtaggcggagccgcctgttaactgaaaaccagcaatgttacgagttacaagcttgtaatgtcacttccacttgtgtcgttgcttgcctccgttgtgaaaggaggcattggatacgggatgaacctaatagtagcgttgagcaaatgcagtatatgcacac

SEQ ID NO: 143480 - DNA, 179 bp, Zea Mays
gatctctttcgaatgcaagtagtcgggagattcggaatcccgcgcacgagttgggcctggccagctggcgtcgtagccacactctgggaggcccgtgggttcgagccgtagagggtaggtgtaggggcgggtttcagttgttggcctgttgctgtatttcgcgtggtgatggaatttaa

SEQ ID NO: 143481 - DNA, 3697 bp, Zea Mays
cgctgtagttgggaagagggctttccctctttctctctcctcgtcatccccagcgacgaaaagcgtctcatcgcctttctctctcctctctccggaccggagcctactctctccactagagagcgcgggacctagcacgagtagagggagaagttgagggggaggtcgtcgccgccgccgccgccgccgccgccgccgccgccgccgcgaggtcaccgtcgtcgccgccgccgctgcgatggctcgcctgttccgcgagtctcgccgcgactcgtcccactcctcctcgtccaacggcttcctccctccggcggcggcttccagcccctcttccgcctccgcgatcccctcgccattcccggacctcggggtcgccctctccgccgcagacctccgggaggccgcctacgaggtgctggtcgcggcctcccgcaccacgggcgggaagcccctcacctatatcccccagtcctcgtcggtggccacggggccgccggtgtccccggcctcctccgcgtcctcggcctcatccgcctcgctccagcgctccctcacctctgccgccgccagcaagatgaagaaggcgctcgggctccggtcctccgcctcctccaagggtgtcggcagccccgggagtggcgggaaggcggcgcccccgcggaggcccgccacggttggggagctcatgcgggtgcagatgcgcatctccgagcccgccgacgccaggatccgcagggggctcctccgcatcgccgccagccagcttggcagacgcgcagaatctatggtcttgcccttggaattcttgcagcaattcaaggcatcagatttccctgatcctcaagagtatgaggcgtggcggagtaggaatctgaagcttcttgaggctggtctacttgttcatccactcattccattgaacaaatcagacagttctggtcaacggttgcggcaaattatacggggtgcatatgataggccacttgaaactgggaaaaactctgagtcaatgcagggcctacgtacttctgtcatgtcccttgctggaagatctcatgatggaacttctgatggatgccactgggcagatggcttccccttgaatctccatctgtaccaagttttggtagaagcttgctttgataatgacgagggcactgtggtcgatgagatcgatgaggtgatggagcttttgaagaaaacctgggttattcttggaattaatgagttactccacaatctttgctttacttgggcattgttcaaccattttgttatgtctggtcaagtagatattgagctgctttctgcggcagagaaccagttagctgaagtagctaaggatgccaagagcacaaaagatccaaattactgtaaagtattgagttcaacattaagctcaataatgggctggacagagaaaagacttctggcatatcatgaaaccttcaatacatgtaatattgagtctatgcaaggcattgtctccattggagtgtcagctgcaagaatccttgttgaagatatatctcaggaataccgccgtagaagaaaagaagagactgatgtagctcgaagcagggtagagacatacataaggtcttcactaaggacagcttttgctcaaagaatggaagaagcagattcaaaacggtcatcaagaaaccctactccagttctttctatccttgcgaaggacattggtgacctagctacaaaggagaaaaatatctacagtccaatactgaagacatggcatccactcgcttcaggtgttgccgttgcaacccttcattcttgttatggaaatgagctgaagcagtttgtagctgggcttacagagctgacccctgatacagttcaagtacttaaatcggcagataaattagagaaggaccttgttaatatcgctgtagaagattctgtggatagtgatgatggaggcaagtcacttatcagagagatgccgccatatgaagctgaaaatgcaattgctaatctggtgaaagtgtggataaaagatagagtagacagactcaagggatgggttgaccggaatttgaagcaagagacctggaatccaggtgccaacagggataattttgctccctcttctgtggagatgcttcgggttattggtgaaacattggatgcatttttccaattgcctataccaatgcatccagctcttcttcctgatctgacagctgggctcgacagaagcctacaactttatgttgctaaagcaaaatctggctgtggaacacggaattcttttatgccccaactacctccactcacacgatgcgaggttggctccaagttattattcaagaaaaaagagaagccacaaaatctgcaggttcgagtatcacaaaatggagcagcaaatggaaatgatcccttgggccttcctcaactctgtgttcgcctgaatacacttcagtacatccgtggtgagcttgagaacatagagaagaagataaaaacaagcttgcgaaatgtcgagtcagctcaggcagatgtcactgatggattggacatcaagttcgagctttgtcaggcagcctgtctagagggcattcagcagatttgtgagacaactgcatataaggtgatgttctatgacttgggccatgttctctgggacaccctttatgttggtgatactgcatcaaacagggtggaggtactgttgagggaacttgaccctgtccttgagacgatatctggtatggtgcacaacaaagtgcggaaccgtgctattactgcactgatgaaagcaacttttgatggtttcttgctggtgcttcttgctggtgggcctttgcgtgctttcacccgccaagactctcagataatagaagatgacttcagggccctcagagatctgtatttagcagacggggatggtttgccagaggaattagttgacaaagcatcctcccaggtcaagaatgtcctacccctcttccgagcagactctgaaagtctcattgagcgattcagacgcatgatggttgaatctaatcggtctgcgtccaagaacaggttaccattgcctccaacaacggggcattggagtccaaatgagcctaacacagttctgcgagttctgtgctaccggagtgatgagacagctacaaagttcctcaagaaaacttacaacctaccgaagaagatatgacttgtgggatagatcacaaaccacatgtacattttcctgtcagtataaaaaggtttctctatgcctgtcacaatctctggctgaggaccgaggaaatacccactaaactttccacagcaaaggcgcctcctcaagtgattgtcaacaagaaggtttattctgtggtgctggagagatgtgactgggtgttttcggtggttcgtatcatggataggtttacttacagcttgatttgttcattatattatatatgtttgcctaatctagttcttttgctgaccttgcgctcatgtaatttgattcattctagtttgcgacagctatacccagcgtgtgaataagttgtgtactcgcgtgatactgtctggtgcctttgatgtgacaatatgaggagcatttgtatatttttactgcatcgtgcactccccactactttggtagttttctgtcatatccttgattccttgttgggttgaacgttctttggttatgcaactatttcaatttgca

SEQ ID NO: 143482 - DNA, 400 bp, Zea Mays
ataacgctgccttcccgccgttatcctttcccacgactcctctcccccgcgtgagaacatgccccgcgtccttgtccaggcaccattgccgccggccgctgcctcccttgcaccatcggcctctacagatgaagctcaaaggaagtgacttcaaattatcactcaagaatctcaagagcatttggtgaagagtgttctcctgattttgtggatgtccagtatgcagtgaacttctagaagtttttatttatgtatgcatgttttaaatactttgatcaatggatgcttataaagattctatggaatttctggaggagttatctgtctttgatctgttttttatcaacagattatgtgctacaatattctgtgaaaaatctgttgttacttgactcatcca

SEQ ID NO: 143483 - DNA, 459 bp, Zea Mays
cggatatcttcggatacgaatacgaatacgaattgtctcggttacggatacggattgtaacatatcgaatacggaacgaatcggatgcgaatatcttcggttacgaatattttcttcggatataaagacacatcattcattcatatatagcatccagattcaaatgtcacaaccgatcaggctaataaacagataaagctaagtaaataggcaagcagtcatgaccgtgagccatcagcattgctaaatgctaagtactgcgtacatgtcacaatagaactagctaccagctagcagccaaaatgacgtagcagctactagctagcgcaaaaatgtcacaatagtacatgcctctccaaaatagaactacattgtcattactacattaaggattaagtgtagcagctaccagctagcgctaaaatgttgaaaaccaagatttaagcatcatcttaggct

SEQ ID NO: 143484 - DNA, 112 bp, Zea Mays
gatcttgcccgggacaccagtctagccttgggaccatccctgtgggttgcactgatctcgaggggaatttcagtcgcgccagcgggcactgtgggtggcgtagaagaggtta

SEQ ID NO: 143485 - DNA, 285 bp, Zea Mays
atgtgacccaccccgtcagatcctcccctcgcaacgaaatcaccggatttggcggtggagcacgattgtcgcgtgagctgttgcgactacgactcagtccacgcctatatctatgaccacgatcccggctccatcccgtccacttcttggtactcctcgcgtccaccggaaggtcattgggtgtgtggccgaccagagtgcgcaaatttccccaccatcgatccgccattgccacctagagtcctcgacgtcgcgtctgtgcctctctctcccttcctcgccgat

SEQ ID NO: 143486 - DNA, 764 bp, Zea Mays
gtgtctatgtttatcattatccatttgaatatagacataaaaagaaagagataaaacggatattattttggaacggagggagtaacttgttgtcgctgtttcttcaggtactaccagaccggaaggctcagtgagagcagcgacgtgttcagcttcggagttgttctgcttgaggtagccacaggcgagtccccgacattgccaggccaaggtcacatcaatcagcgcgttaaacagaagattgccactggcaacgttggctcgatcgctgattcgcgacttggaagcgcctacgacatcagctccatgtggaaggtaatcgacaccgctgtgatgtgcacggcggactctactgctcagaggccaacgatggccacagttgtgatacagctgaaggagagcctggcgttggaggaaactcgtgaaaagggaagtagcaacagggtgagccgagggagtgatgtagaagctatggcgtccacacttggtccattcgcaagatgaagctgtgcctgtacctggattcagttcatggttgacgctcgtgaactccttgtcatgtgaagacaactagtagcgtataattgtgggctgttttgaaccagcaattgcttgtgtgtgtatggactttgacaaaggtttggtgtgagcttgcagcttctccagaatccagatgtcatgctctgtatgtatctttgacaaagatttcccgtgtctatatataactgcatggtactaataacataaaggattgactttgtttg

SEQ ID NO: 143487 - DNA, 1886 bp, Zea Mays
tttctctttccaccggtccccgagctgcagcacaagaagcgattccagctgttgtcttgcatctcccttgtgctatctcaccccatgttcgcacaggaaactgaagaagaggggtcagggcacagaccgcttcacgcagcagcccgcccgcggtcgcgcgtgcaaaaggagcgcacttgcgaaatgagctagaagatggcgatttagtggaggcgaaaagctgcgatggggctgggtcgtcgatggagaagtgctggcagcgtgccctagctctgggatttatcttacaacaagttgagcggatcaatacctgattccctgccaactttgccttccctacgagttctaaatgtatctggcaaccagctgagtgacgaatccctatgtaaaaattatactggaccacttattttcagacgtgattttgatggctcagtatgcaacaaaccttcacccagcccgtcaagaaataaagtagctatcatagctatttcagtagtggttcctgtgttagtactaattgtactacttcttacatatttcatctggtggcagaaaagaaagcctattgtgcaaccagtacccacacatggctcaacaagagatccagaacctgataatgcttcaggaatcaaaaaaagttatggctacaacctgaatataactgagaatcgtcagttcacatacaaagagctggagaagttcactaataatttcaagaagttcataggacaaggaggttttgggcccgtctactatggccgtttggaagatgacactgaggttgctgtcaagatgcgttctgaatcatcgtcacatgggcttgatgaatttttagctgaggttcagagcttgacaaaggtgcatcacaggaatctagtgtctttgattggttactgctgggaggaagatcatttggcgctggtttatgagtacatgcctcagggcagtctttttgatcatctgagaggtaaaaatggtgtttctgaagccttgaattggaggaaacgtgtacaggtagtgcttgaagctgcacaaggtctggattatctgcacaagggttgcagtttgccaatagtccaccgtgatgtgaagaccaacaacattctcttgggtcaaaatctgcaagctaaaatagcagattttggactttccaagacatatctgagcgacacacaaactcacatatcagtcactccagctggcacagctggttacatggaccctgagtactaccagaccggaaggctcagtgagagcagcgacgtgttcagcttcggagttgttctgcttgaggtagccacaggcgagtccccgacattgccaggccaaggtcacatcaatcagcgcgttaaacagaagattgccactggcaacgttggctcgatcgctgattcgcgacttggaagcgcctacgacatcagctccatgtggaaggtaatcgacaccgctgtgatgtgcacggcggactctactgctcagaggccaacgatggccacagttgtgatacagctgaaggagagcctggcgttggaggaaactcgtgaaaagggaagtagcaacagggtgagccgagggagtgatgtagaagctatggcgtccacacttggtccattcgcaagatgaagctgtgcctgtacctggattcagttcatggttgacgctcgtgaactccttgtcatgtgaagacaactagtagcgtataattgtgggctgttttgaaccagcaattgcttgtgtgtgtatggactttgacaaaggtttggtgtgagcttgcagcttctccagaatccagatgtcatgctctgtatgtatctttgacaaagatttcccgtgtctatatataactgcatggtactaataacataaaggattgactttgtttg

SEQ ID NO: 143488 - DNA, 1354 bp, Zea Mays
atttctctcatgtagagtttgaatcaattatctatatacttttgtcttactgtagttgtgcaaatgtttcagggatttatcttacaacaagttgagcggatcaatacctgattccctgccaactttgccttccctacgagttctacgtgattttgatggctcagtatgcaacaaaccttcacccagcccgtcaagaaataaagtagctatcatagctatttcagtagtggttcctgtgttagtactaattgtactacttcttacatatttcatctggtggcagaaaagaaagcctattgtgcaaccagtacccacacatggctcaacaagagatccagaacctgataatgcttcaggaatcaaaaaaagttatggctacaacctgaatataactgagaatcgtcagttcacatacaaagagctggagaagttcactaataatttcaagaagttcataggacaaggaggttttgggcccgtctactatggccgtttggaagatgacactgaggttgctgtcaagatgcgttctgaatcatcgtcacatgggcttgatgaatttttagctgaggttcagagcttgacaaaggtgcatcacaggaatctagtgtctttgattggttactgctgggaggaagatcatttggcgctggtttatgagtacatgcctcagggcagtctttttgatcatctgagaggtaaaaatggtgtttctgaagccttgaattggaggaaacgtgtacaggtagtgcttgaagctgcacaaggtctggattatctgcacaagggttgcagtttgccaatagtccaccgtgatgtgaagaccaacaacattctcttgggtcaaaatctgcaagctaaaatagcagattttggactttccaagacatatctgagcgacacacaaactcacatatcagtcactccagctggcacagctggttacatggaccctgagtactaccagaccggaaggctcagtgagagcagcgacgtgttcagcttcggagttgttctgcttgaggtagccacaggcgagtccccgacattgccaggccaaggtcacatcaatcagcgcgttaaacagaagattgccactggcaacgttggctcgatcgctgattcgcgacttggaagcgcctacgacatcagctccatgtggaaggtaatcgacaccgctgtgatgtgcacggcggactctactgctcagaggccaacgatggccacagttgtgatacagctgaaggagagcctggcgttggaggaaactcgtgaaaagggaagtagcaacagggtgagccgagggagtgatgtagaagctatggcgtccacacttggtccattcgcaagatga

SEQ ID NO: 143489 - DNA, 1151 bp, Zea Mays
gaagaaagagagcgctttggctccagccatacgccaacccattaactcctcccttctagctgccaacaccaccgcatcgctagggttacaattataaaaaacacacctatttctatgtttccacaaagaccatgaacccaaaatgactagagaattgaatcccttggataaaggtttgcccaccctggcagcactattcctccaccaggtttcaaaacagacgtcaacatgggaagggcagagctcctggaaaccacctgtctgcagaaggctgaaccaaaactgttttgcaaaactgcactgaaccagcaaatggttgatagtttcttccatctggtcgcataaagggcaagactccgggtgatccaggccacgcttagcaagtctgtcagccgtccaacatctatcgtgctccacaagccaaaggaagaatttacactttcctggagcccaggatttccaaatgcgttcagcaggctcaaagctaacagagccaagaagcaaagtcctgtaagctgaactagccgagtattcacccgattcactgaacctccaggcatgcacatcgggaacatccggctgaagaaccatcccttctagcaagtcacaaaggtccatgagattagcaagggctgtaacagaaatagcccccctcagatcagccaaccaattgaggtcaggcaaggcgtctttgaccaggcgcctagaagcaatgcgcttgggcaccatacccaagacagcaggtgccacctccttaatacatttgccatttagccaacgatccttccaaaaaagagtatcagacccatctcccaaatgagtgataacagccgcagccaccaagctttgcacaatgtcgcaagtttgaatctgaaagtctgaccatggcttagtcctatcagatttttgcagccaaggccacctagcccgcagcgcccagctcatgatccgaaggtcacttatgcctagacccccaggtccttgggtctagtgactttgggccaagtcagcagacaatggccaccattcacctccttcctccctctccacagaaagcctcatctaatcttatcgattactttaacagcccaaggagggatgtccagcgccagagcagcataaattattcttgatgtcatcacaaattgaac

SEQ ID NO: 143490 - DNA, 1388 bp, Zea Mays
atggcgctcgcattcctggttttgctgctgttatttgctcctgtcgccgtcagccagcaaggtttcctgagcatcgactgcggcctggacgccgactccagcgggtacacggacaaggtcaccggcatcgtgtacgtctccgacggctcctacgtcgacgccggcgagaaccacaggatagcgcccgacctggagggcacgttcgaggggagctctcagacgctgaggagcttcccgtccgggcagcggaactgctacgcgctgcccaccgtggctgggaccaggtacctggcgcgggccaccttcgcgtacggcaactacgacggcaagaacagctcggcgctggagttcgacctgcacctgggcgccaactactggcagacggtctacccgaacgcgcggagcagcaacgcgcacgaggcggtcttcgtcgcgtgggccgggtggacgccgtggtgcctcgtcaacaccggccgcggcacgccgttcgtgtccgtcttggagctcaggccgctcggagccgcgctctacccgctggtcacacccggcctggtcgtatccacgtttacacgcataaacatggggggcagcgtttcgactacgcggtatcctgacgatccatacgaccgtttctggtgggcgatggacgaagctagcccacggtgggtgaacctgtcgaccacgcggcccattcagccggacaccagctcctacgccgtgccctctcgtgttctgcagacagccgtcgccgcggcatcgaacaatggcacggcggcggcgctcaccgccatgaactggcagtacgacaccaagtactcgttcatgatattcctgcacttcaccgacttcgtgcacagtcagattcgacagtttgatatcctcatcaacgagaacgaatccggaccgaagttcacggcgtacaacgacacatgctacctgattccaacccatgtgcacactgaatcctacagggctgccggcggcaagtacaatgtcactcttgcagcaaccaaagcctccgtgctgcctccgatgctcaatgcgctggagatctacgttcgcgtcccttatgagagtccgacgactctccctcaagaccttgacgccatcatggctatcaaaaccgagtatggagtcaggaaaaactggatgggcgatccatgttttccaatcaaatatgcttgggatggtgtgaaatgcagcaatgcaagtggtaacacatcgaggataacatcactagacctctccaacagctctttgcatggcacaatatctaatgattttacactgctcacagcactcgagaatttgtaagtgctatctaactgcaggccaacgtcctctgctctttcattatttatgtcccaagatttcacgctgaatgactg

SEQ ID NO: 143491 - DNA, 2051 bp, Zea Mays
cttgacagcatcgtacctcatcacgtcagcatggtaccccttgcctcgcatctcctcgagcagcgcaagcgcgtctgcgacgatgggctgctccagcggttgctcgacctcgtccatgacaagcgcctccatgcccggcccgtacatctcttcagcggtggggtagtagttcttgtccgcagcgagcaccacggcctgctgcgacgaatcgccatcctcgtcgtcatcgtagacgtcgtagacgggttcactattgaggtggaagatgtcgacgctgtcgtagaaggggacggagggcgtcggggtggatccggggacctccatggcgcttgctgccgccatggacgcggtcttcccctgggaaccgaagtcgatgggcagctcgtcgtcgaagacaggtccctcgtcaaagactggcgtcgtggtattgcccgcagatcgaacgaactgaggcagaacgggcagatcctccgccgcttgctgcgccaccgctgctgctagatctgcctgaccccccaccaacgactccatcttctggaccagacaactcagcttcttcataaccaactcccagcgcgcttcatcccgttgtgccgcctcagccatcgtcgcgagcaccaaggacgaaaccgaggaaaatgtcgagaatcgactacctctgataccaactgtcacgtccccgtagccgccgatggtgagccgggacgtgaggagctggtgacgcaccgatatgccgctccgtggaggaagacgagcgaagggacgaaccctgtttccgatttctgatttgtcttcaatacctctcctgccgttgtggtcctgcctttaggctgctccgagttgggccatgcgacatcgaggcccatcacgtggtgagccagtgtcgggtgttacaccgccgtggctgtcggggatggcatggatcctgtggggcagcgcggccaccagaccagcccgcgacaccttctcctccggcgagagcccgttcaccttcctggcggctaccttctgtagcttgaccaccacctccaggagccgcgccttggtccgccgtacgtcggcgtccagggtcaccgaggccgcccggttcttcttcttcttcgcggccctcgccgatttctgacgcacggagtcaccgtgcatgagtggccatggtttcaccagtggcggcaaaccgtctttaaggcagccaagggaagaccaagggaggggagaccggagacctcgatggcggcgtcgatcccggcgtccacggcagcgtagaggcgcgagaaggggtcgccgtgcttgtcggtgtcgtaccgctcgtacttcttgcagatggcgtccacccgcgtgatcacgtcgatcatgctcatcttgcgggcctaccgagatttccgaagtggagagaggctgcgagatgatcggtggttaggttaatgatgactggttggcagctaagtttagctgattgccccgattctccctcccgggtttcagtgaatcatcagtgcgtgctcatccccgtggcctgctccatttttaggaaaaagccgagcgagcatcgccatggctggaggctggagccgttcactcgtccctgccagaggccacttcgtgcgagtagcaagtcggcatccaaaacaagcccctctaaaagaagaatccatggggattttcaactagaagtttcccaggaggaatggtactgctctgccgcttcagataagtattccagcatgaactttaaactacaacacagattataaagtacgctctaataccggtaacctgctaacaaaggctggattcaaatgatgaactacacttggatagttggatttcaagtgttttcggccgtcttgaaagccagctttttctctgacctcagctgaaaaaagggacaatgttagaacaagaagaaatccagtgaagaatgaagagaaattcaggacaacaagcatgagctgtcagcagctgagatttgttgagtacatttattatgcaagtttgatgttgttggcatttttatggtcaaatactaactctctctaggcttgcgtgtggcg

SEQ ID NO: 143492 - DNA, 1554 bp, Zea Mays
gccaccgtggctataaagcctcttttgaccaaacccttctccctctcacaaaaccctagctttccctcctcccctgttttgcggcgcgccacgaactcgcgacgctctcgagagatccatggatcggcgcaagggcggcaaccgcgacgccaacggcagcctggtcgaggccacggcgtcgcggctgagggtcgaatccgacgaggaggcggaagaggtggggatggaggtggaagagagcttcgacgcgggggtggaagacgagcaggcggcggcggaggtgattggaagcgaaaagaccagcgccgactactacttcgactcctactcccacttcggtacactgcaggaaatgctaaaagatgtcgttcggacaaaaacatatcaaaatgttatcacccagagtagctttcttatcaagaacaaagtagtccttgatgttggtgctggaactggaattctttctcttttctgtgcaaaagcaggagctaaacatgtctatgcgattgaatgttcccagatggcagacatggcacaggaaattgtaaaatcaaatggatattcagatgtcataactgtaataaaagggaaagtggaagaaatagaacttccagtcccaaaagtagatgtcatcatctcagagtggatgggctatttcctcctgttcgagaatatgttgaacactgtcctatatgcacgtgataaatggcttgctgatggtggtgtggtcctgccagacaggacttctttgcgtcttactgcgattgaagacgcagaatataaggaagacaaaattgaattttggaataatgtatatggatttgatatgagctgcataaagaaacaggcgatgatggagccactggtagatacagtggatgcaaatcagattgtcactaactgccagttactgaagacaatggatatctccaaaatgaccccaggtgacgcgtcctttactgtaccattcaagctggtagcagagcggaatgattacattcatgctcttgtcgcatactttgacgtgtcgttcaccaaatgccataagctgatgggcttctcaacaggcccgagatcgaaagccactcactggaagcaaactgttctctacctggaggatgttataactatctgtcagggggaaagcctgagtggttccatgacagtcacacccaataagagtaaccctcgagatatcgacattaagctcaagtactccataaatgggcataggtgtcaggtatcaagaacacagttctacaagatgcggtgacaatggaacaaacaagagttgcttcaaagctcattaaattttgtttaacgagtatcttgtttgacagaaattgtgctatttttattgttcatgtactatgcatcaaatattagattctttggaatctagcaaaagtagggagtagattaaactggtctgctgatatgagattgatgtagtgcaaaactgtcatattgccacaaggccgttggtggttgtatgcatttgaagtcggttgcaaattattgctttacgcattccaccattaatccttgccttag

SEQ ID NO: 143493 - DNA, 1611 bp, Zea Mays
aggttgtgagcctgtgactgttgtgagctgctgaatccaggatgggcagatatttgcgccaccgtggctataaagcctcttttgaccaaacccttctccctctcacaaaaccctagctttccctcctcccctgttttgcggcgcgccacgaactcgcgacgctctcgagagatccatggatcggcgcaagggcggcaaccgcgacgccaacggcagcctggtcgaggccacggcgtcgcggctgagggtcgaatccgacgaggaggcggaagaggtggggatggaggtggaagagagcttcgacgcgggggtggaagacgagcaggcggcggcggaggtgattggaagcgaaaagaccagcgccgactactacttcgactcctactcccacttcggtattcatgaagaaatgctaaaagatgtcgttcggacaaaaacatatcaaaatgttatcacccagagtagctttcttatcaagaacaaagtagtccttgatgttggtgctggaactggaattctttctcttttctgtgcaaaagcaggagctaaacatgtctatgcgattgaatgttcccagatggcagacatggcacaggaaattgtaaaatcaaatggatattcagatgtcataactgtaataaaagggaaagtggaagaaatagaacttccagtcccaaaagtagatgtcatcatctcagagtggatgggctatttcctcctgttcgagaatatgttgaacactgtcctatatgcacgtgataaatggcttgctgatggtggtgtggtcctgccagacaggacttctttgcgtcttactgcgattgaagacgcagaatataaggaagacaaaattgaattttggaataatgtatatggatttgatatgagctgcataaagaaacaggcgatgatggagccactggtagatacagtggatgcaaatcagattgtcactaactgccagttactgaagacaatggatatctccaaaatgaccccaggtgacgcgtcctttactgtaccattcaagctggtagcagagcggaatgattacattcatgctcttgtcgcatactttgacgtgtcgttcaccaaatgccataagctgatgggcttctcaacaggcccgagatcgaaagccactcactggaagcaaactgttctctacctggaggatgttataactatctgtcagggggaaagcctgagtggttccatgacagtcacacccaataagagtaaccctcgagatatcgacattaagctcaagtactccataaatgggcataggtgtcaggtatcaagaacacagttctacaagatgcggtgacaatggaacaaacaagagttgcttcaaagctcattaaattttgtttaacgagtatcttgtttgacagaaattgtgctatttttattgttcatgtactatgcatcaaatattagattctttggaatctagcaaaagtagggagtagattaaactggtctgctgatatgagattgatgtagtgcaaaactgtcatattgccacaaggccgttggtggttgtatgcatttgaagtcggttgcaaattattgctttacgcattccaccattaatccttgccttag

SEQ ID NO: 143494 - DNA, 1596 bp, Zea Mays
gccaccgtggctataaagcctcttttgaccaaacccttctccctctcacaaaaccctagctttccctcctcccctgttttgcggcgcgccacgaactcgcgacgctctcgagagatccatggatcggcgcaagggcggcaaccgcgacgccaacggcagcctggtcgaggccacggcgtcgcggctgagggtcgaatccgacgaggaggcggaagaggtggggatggaggtggaagagagcttcgacgcgggggtggaagacgagcaggcggcggcggaggtgattggaagcgaaaagaccagcgccgactactacttcgactcctactcccacttcgatatttgaagtcagtatgcctatgcagtggagatgccaattatttgcatgtgctgactgcaggaaatgctaaaagatgtcgttcggacaaaaacatatcaaaatgttatcacccagagtagctttcttatcaagaacaaagtagtccttgatgttggtgctggaactggaattctttctcttttctgtgcaaaagcaggagctaaacatgtctatgcgattgaatgttcccagatggcagacatggcacaggaaattgtaaaatcaaatggatattcagatgtcataactgtaataaaagggaaagtggaagaaatagaacttccagtcccaaaagtagatgtcatcatctcagagtggatgggctatttcctcctgttcgagaatatgttgaacactgtcctatatgcacgtgataaatggcttgctgatggtggtgtggtcctgccagacaggacttctttgcgtcttactgcgattgaagacgcagaatataaggaagacaaaattgaattttggaataatgtatatggatttgatatgagctgcataaagaaacaggcgatgatggagccactggtagatacagtggatgcaaatcagattgtcactaactgccagttactgaagacaatggatatctccaaaatgaccccaggtgacgcgtcctttactgtaccattcaagctggtagcagagcggaatgattacattcatgctcttgtcgcatactttgacgtgtcgttcaccaaatgccataagctgatgggcttctcaacaggcccgagatcgaaagccactcactggaagcaaactgttctctacctggaggatgttataactatctgtcagggggaaagcctgagtggttccatgacagtcacacccaataagagtaaccctcgagatatcgacattaagctcaagtactccataaatgggcataggtgtcaggtatcaagaacacagttctacaagatgcggtgacaatggaacaaacaagagttgcttcaaagctcattaaattttgtttaacgagtatcttgtttgacagaaattgtgctatttttattgttcatgtactatgcatcaaatattagattctttggaatctagcaaaagtagggagtagattaaactggtctgctgatatgagattgatgtagtgcaaaactgtcatattgccacaaggccgttggtggttgtatgcatttgaagtcggttgcaaattattgctttacgcattccaccattaatcc

SEQ ID NO: 143495 - DNA, 394 bp, Zea Mays
ctatgttgaactctgtgtatcatctcaatctgcaatacaaatttgagaaaaaaatctattgtaatgcttacagtcaaacaaagagttctatgttgaactctatgttcaggttgctttaaaatataataattccacaaattatactgatcaattatcataatctgtagaagtccatgtattagctgctatatcattatattatggtgttcaacggtgagtagagaccatttagtaacaacaaattacatctagtctggtaaagaacatgtcactgcctaactgatctatagtaagttccatgtcaagaaatagtcgacatcggggcatcgccatcatcccggcatagctcctccaattcagtcatgaaatcacccccatcggtgccagctgaatc

SEQ ID NO: 143496 - DNA, 669 bp, Zea Mays
gatcgctcttctctccgtcccctgctacatataaggtacctccggccccaaactgcacgagctctctctagcattacccggcggcggaagcgtaagcgcaaaacgaagcaagcggccgccatggtgaagggacgcacgggacagcgcgtcaggctctacgtccggggcaccatccttggatacaagaggtccaagtcgaaccagtacgagaccacgtctctcgtgcagatcgagggggtgaacaccaaggaggatgtcgcgtggtacgctggcaagcgcatggcgtacatctacaaggccaagaccaagagcaatgagacccgctacaggtgcatctggggcaaggtcacccgtccgcacggaaactcgggcgtcgtccgtgccaagttcatgtccaacctcccgcctgagtccatggggcgcaaggtcagagtgttcatgtacccgagcagcatctaaggttttgttggagtaaagatggactagaaatggccatgtgtttatttctcacttttctctgaacttaaaatgccttgtgttggtaacttagattgttcaagtgctgaacctgtggaagttgtgccaaaatttgttgtcgaacggatgaactattgtcgtaatgttatgccagcagtgctgaaaagataaggaaaacaaaaaaaacaaatt

SEQ ID NO: 143497 - DNA, 902 bp, Zea Mays
gatcgctcttctctccgtcccctgctacatataaggtacctccggccccaaactgcacgagctctctctagcattacccggcggcggaagcgtaagcgcaaaacgaagcaagcggccgccatggtgaagggacgcacgggacagcgcgtcaggctctacgtccggggcaccatccttggatacaagaggtccaagtcgaaccagtacgagaccacgtctctcgtgcagatcgagggggtgaacaccaaggaggatgtcgcgtggtacgctggcaagcgcatggcgtacatctacaaggccaagaccaagagcaatgagacccgctacaggtgcatctggggcaaggtcacccgtccgcacggaaactcgggcgtcgtccgtgccaagttcatgtccaacctcccgcctgagtccatggggcgcaaggtcagagtgttcatgtacccgagcagcatctaaggttttgttggagtaaagatggactagaaatggccatgtgtttatttctcacttttctctgaacttaaaatgccttgtgttggtaacttagattgttcaagtgctgaacctgtggaagttgtgccaaaatttgttgtcgaacggatgaactattgtcgtaatgttatgccagcagcagatcttaatttgccccgttacatcgatgtctgattgcagtatcttcaaattgaaaggagttccgtttggtatgaatgtgtaatgttctacgctgctctgggatgcttctttcaatatcatttctgcaaaatttattggcacaagaggctctaatttatgggcacagggcctttgtgtgtgggtctagtttacttttttattcagtaaacagttgtggaagatactatctagcgtaataagtgcataatcccgttagcatcctaaaa

SEQ ID NO: 143498 - DNA, 2040 bp, Zea Mays
tgaacatgatgccttgtcagctgtccttatcaaaaaatgctggaaaaggcatgatgatgcagtcaggcacaggcatcgatgaagaatgtggttacatcgaaccgcagaaaggaactggtgcgaaacttgatgtaactacctcatatataccttttatgtactgcccctctgatggctcatcatatgtgagaacaccttcaactgcagctccagtggcatcatgtggatctctggaccaactatcagcttccaaattgagtaaagagaaaggtggttgtgtagtcaagttggctccagatttacctcctgtgaaccttcccccttctgtccgtgtcttatctcaggtggcatttcatccgaacgcaacacactttcatggcacctcggacaatgcagcaaagaatatgtatcctgtgccaccactggcctttacagagaatgcttatagacagctaaatctgttccccgaagctaattctaggttgcagcagaatgggatcaccaatgataatgctacagaagatggttctgagcaagatttgcagatgcatcctttactgtttcattatcctcgagatgtggtttcgtcatatagtcatccggttcaaaatcttattaatcagtcaagaaaatatgatcttttcccctttgagaaagttcaagttgagagaagtaacaaccagactacaggttccaccaaaaatggtactgtaaatgctaacactatcgacttccatcctctcttgcaaagaacagaagttgatgtgcataatgatgtaccagaatatgatagtaaccttgattaccatcagtctgataataacatgagcaaagttccagtagatgaccagtcaacggctgggcaagcatccacaggcccttctgagagggagacaagtattgacttgaacattcatttatgttctccaacggtcataaaagattcaaatgacttcagaagtagttttagcagatcaaatgttcaagatgaagtttctaggaaggacaaatctagtgttccagggctcgagattgtaaattcctattttcatcattgcattcaagaacctaatgaagaatcaatgcaaggaattgtaatggagcaagaagaattaagtgattctgaggaagatagccagcatgttgagtttgaatgtgaggaaatggatgattctgaagaggagcaagttcagggtccagaagcctctccaattcaaaataagggtatctcagcatcagttgtttgtggggaatttcatgttagcaatgaccagagtcaaatccagcaaggatctgttcaaaaggataaacagggtgcaagctcgatgcagaaaacgcaagttccttctcggtcagtgagggctaagctgaagccagaaactgcaaagcgcacaggatctaggacgtccacttctcgcacagttgaaactagccggagcaaaaccagaagttctaaagtgccacagggacagtcgagtgctgaatggaagtccaatgattcgagaagaactagaaaaattccggccccaagatgaaggccaatttagcattttattcctgtgctgcatgtgccataggcagagtggctaagttcagtctgttgtcactgcgttgttgggttgattatcatcaacgtctattcagcgcatgctggagaaagcaaccaagcgaacgtctgtggtcatttagctcgaattgtcatgtgaaaatagcagtgggagcaatgtaccaaatatatgaatttctccagttagatagatgagacgaattcataatgttgttggtgactgagtaaagcattcccatgaatagatgagacgaattcctcgggagttttgtacgacgtcctcaaaggttatttgtaatgtgccttgtaatttcaaccaccaaccaggttagttgctgtatgcgcattcgttttgtgtactgggtagagaaatgaatccgggatacatcaactaacctggattcttaactgatcgttaatacatgtggcactagcaactcctgcaatagctgaatgaatgttgttcatgcctt

SEQ ID NO: 143499 - DNA, 2030 bp, Zea Mays
atggaggatgctgacccttcgtcttccctcgctgggccttggaacgaccgcttaccaggaaaagaggactatacagatgagcctaagaagacaggggggagggaacccagtgtcgccatgggggagggaaggaggggtggttgccggcgtgggcttgtggtgggaagggtgcattggcaagttgatgatgacgtggaggaggatgacatagattttaaccctttccttagggaaggatctccgtctgagacctcatcaagccttacctcagaagcagaatgcgaggaacatagttctgaaaatcaaccaagtaaccatacatatcagcagaatactgtagttaatgaaaatacaagtgacagtgcacttcctcaaaatagattgtcgtctcaagatgctgttaacgaaatgtttccagaagaaacgtctacccaggttaatattgagaatgatggtcacttgaatggattggaaaaagacgttttagcaagcgaagctgcttgctctccaacagtgcaagaccctcatcatctatctctcgaaattagtgaggaagatgcaatttgcaaacggacaagggcaagatactcactagcaaactattcactcgaggaattggagacctttctccaggaatctgatgatgatagtggtctgcaaaatgttgatgaagaagaggaataccgcaagtttcttgctgctgtcctgtctggtgtaggcaatgacacacaaacattccagggggatgaaaatcaagatgaagatgataatgatgcagactttgagctcgagattgaggaggctctagaaagtgatggtgatgaaaatgttgagaactatcacaacacaaatcctagaaaagagaaagatgtccgtaggcctcagactaggcagaggcggccattaactgggatgtctggggctggtagtgatcaccaggaatccaataaaactcatttaagaccaattgtgccatatattccgtctgcattggtgactcctgcgcatgcttttggatggcaatatgctaaccagaatgcctttttcccttcatccttggtttcactaacacgtccacctttagcatgtggatttacttatcagcaactcgggcaattgcatgtgttgatatatgagcatgttcagctccttatccaaacattttccctatgtgttcttgattcatctaaacaagatgtggctaataatgtcaaaaagatgatagttgagttggttggtgctcgtgatcaagcattggccaggagctctcctcaacggcatatcttctttgaaacccaacatctctcatctagttttgtttcttctgataatttggaacgccaatggattccgttaatcaagagtcctattatatccgtccttgatgttgcaccgcttgagttggtcctcgactatttaagtgacgtctttacagctgtcgtgaagtatagaaaaagtcatgtggatggtactgctgacaaaacccgcaggaaagagcccctgtttccttcagcagcgattaacagttgcaaacaagtgaataatgtttctcaagatagatcaaatggtgtgcctacagcatcacctccatctgggcagttgcagcagaagaaatcgttggctgctaccctgcttgagaatattaaaaaggatacaattgctcttgttcctgctgacattgcaagattagcacagagattcttttcacttttcaattttgcactctttcctcataagtcacctccttcacctatggccaatagggttcttttcactgatgcagaggacagattattagctctaggaattctggaatataataatgactgggcagcaatacaaaagcgctttcttccttgtaaatcaaagcatcaggtattttttttgttactccttttgattgcaaatttgattcaagatccattttttaaattttcttttatgatttatcaggcttaaatcaatagttcttatcatctatttggtgaagattgacatggagataatttatttctatcataatctagcag

SEQ ID NO: 143500 - DNA, 505 bp, Zea Mays
ccgtgctaggcgtacgcgctctaccgcgccggcttcgcgggtgtgccgctcgatctcacggccatcggtgacctcttcgccatcagtcgcgcacgccaacaacctctccaccacggtcgcgccggccaacgggcagccgctgctcgtgctgctccagtgtggctgcccctctcggtcccccagctcgtacgcgccgatgcagtaccagatcggcccggaggacacctactggatcgtctccaccaccaagctgcacaacctcacgcagtaccaggccatggagcgcgtgaaccccacccttgtgcccaccgacctcgacgtcggcaccatggtcacgttccccgtcttctgccagtgcccggccgccaccgacaacgccacgacgctcgtcacctacgtcatgcagcccggggacacgtacgcgtccgttgccgccgccttctccgtcgcctatccatatccacagttaaagacacgatgcggcgatcgcctgtgcatgcactga

SEQ ID NO: 143501 - DNA, 918 bp, Zea Mays
gaacaaaaagcgccggcatctcaaacccgacggcgctctcttctctatcctctgtcccctccaccaaaaccgacggcgacgtcgctctcctccaccggtgcttggcgctctccctccaccggggcggtccaccgacgctcggcgagctccaccggtgggcgctggtcagatccgcttggcagtcatccacctggcacatcgggtagctcacgcctccgttggcagtcccaccgccgcccggccctcccccagcgcccccggtgatccggaccgcacccgcttgctcggcctaacgaccggctcctgccccgccgcagccgaagctcccagcgtcctcctgcaggccgagctgaaggttcagcgcgccggtggagttcgacgacgaaactccgtcacgtcatacctctccgcctcccgtcttccagacgtctccaatcggggctcccagcgtctcggagaagaggagcagcacgacacggcggctgtggcgaggaatgctcctgtcccatcccaacccagttagcagccgcccaaggaggaggagatccaatcggcgtgcgggcgtccacggtccatccatcgatccaattccaatctgcaggtgagcagctcggttagattcccaatcaacagctcgaatcgcctgctctcccatcctattgaatgaaactatgatatagaattgatttgcctagttattatctcgaattaatttgtaaagatctccactttggttcgatttgattgtttcttcaactagtggcatattggtctgcttcttacgtgattcaactagtggcatattggttcgatatgaatatggccatttgcagtttttctagcgtttgctaatgaacgcctctaaaggtggctgttgcacttgcagtaggattacatttgtgtgaaatcgaatggttg

SEQ ID NO: 143502 - DNA, 95 bp, Zea Mays
tgataatggtcagccaaaacctgcacttatgattctgcttaaagttcttcctgtatctttacataaagttccatttgtgaaaaaaagatacaaat

SEQ ID NO: 143503 - DNA, 929 bp, Zea Mays
ccctcgatgtccagcttggcgacatcattgaccatggtgtcgacgagctccgcctcctgcaccccctccgcctcctcgccccttctgctgaggtccgcgtcggcgcattcctgccatagtcggcaaccaataggagcataaaactggagctagggattgcagatgttgcaggtacatgtcatacatgaatggacatgaacaggcactcccactgagggcgcttcttggcttcgtctgcagaggcttgctgatacttggcataggatattgttaattccagtgactggtggagtagttgtgggaatgctagatcttgatagcgagacaacgttcttcggcgtttttatggtcatggaggtaatcacaatatgtgctttttatgttccgttgaattagactgcctacgaggaataccattatgccaagtatttatagaacctatctttaacatttcacaacctcataccattgctttacttaggaagagtagctgtcaaattctatacagaatacccgcataatcaagttctcaaaagtgaagcctattaagttggtgacctaggtcctactgtcataataaagcttaaatatttattatatgtatacaacaaacacaaagttgattgtgtaaatgttctgttgatagtggctttctaattgaacatatatccctataactgcatatatgtattgagtatgataatgctatctgcatttaaatggatctgtggataagactcatatgaatgaacagtcgtacagatgtcattttgtatttacattaaagatatccgaatctaatgaggtagaatggaacattcacaattatcataccaagatctaccaaaatataatgttccttatgctctctttcagactggcgataatccctttttagataaatattttgcatgctaagtaactaatcc

SEQ ID NO: 143504 - DNA, 126 bp, Zea Mays
ggaaataggacttctcattttccaaacatttattccgattttagggcaaacttgcagaaattctagaggacgcgtcattgtacaaaaaaatctgaaacttggtgtgttatcttcttatgtgttgct

SEQ ID NO: 143505 - DNA, 1766 bp, Zea Mays
aatcttggacacttggcgtgcatgctcattcgtgcgtgcactaaacacaaactaggcagtagtgcactctacctatagctctctccgatccatgcagagctcggtggtcatgttgtcgagcacggtggcagcggcggccatggcatcgctgcgcaccctcccgctgccggtgctggtgcccctcgtcgcctcggggctcgtcttcctggccaccgtgctccgacgcttgctaaggcggcagcggccggtgtacctcctgaactacagctgccacctcccggacgcggagcggcaggtgaacctggaggtgtgcgagtacttcggcctcaagtgtcgccgctactccgacgacatcgccgacttcatgcggctggtgtacagcaagtccggtctgggccaggagaccttcgcgccgcccttcatctactcgggcaagttcgagaagacgctggcattcgcgatccaggaggccgaggagggtctgttcgccgtcgtggagcagctcctggcaaagtcggacgtgagtcccagcgacatcagcgtcctggtggtggcctgctccatgttctccccgatgccgtcgctggcgtccatgatcatgcaccggttcaatatgcggccggatgtgaagtcgtacagcgtggccgggatgggttgcagcgcggggaccgttggcatcgacacggcggcgcggtcgctgcgctctcggcggacgcccgggtacgcgctggtggtggtgacggagaacacgagcctaaactggtacttcggcaagaacaagcacatgctggtgaccaactgcatcttccgcgtgggcagcgcggcggcgctggtgacggacgtcccgtcccggcgcccggacgccaagtacgagctggtgcgcacgctgcggacgcaccacggcgcggacgacgcggccttcaacgcggcgctgcagatggaggacgaggagggcaacctgggcgtggcgctcaccaaggacctggtccgcgtcgccggtgcggcgctgcggaggcacatcaccacgctgggtccccaggtgctgccggtgtccgagatgctccggtacgcgtggcgcgtggcgcgcgcctacgcggccgggaacagcaaggccgcggcggcggaggtgcccgacttccagcgcgcgttcgagcacttctgcatccactcgggcgggaaggcggtgatcgactcgatcgcgcggctgatggggttcgggccctacgtcgtggagccggcgcgctccacgctgcaccggttcggcaacacgtccagcagtctggtgttctacgagctggcctacttcgaggccaagcgccgcgtccgggccggcgaccgcctctggatgctggcgttcgggacggggttcaaggcgtgcagcaacgtctggcgcgcgctccgcgacgccgcgcccgacgccgacaacccatggaacggatgcgtccaccgctacccagtgccgccgccgccaccgtccaagacgcacaagcatgcttgatatagtactatgtgctcctccgtcgccgcgtctcgtgcctgtgtctgcgtcgattgtttgataagcaacatcaacgaaggcgtatgtatcctagctagggaccgggtcagttgtttgatacgcttggatgcatgatgatcagctgtctcattggctccaagaagacctatggattgtttgatttctgtgtcagtgatatgtcatatgacaacatgagtatccctgtttggaaagtgaaatatataagaaatttaaatattaattcact

SEQ ID NO: 143506 - DNA, 1151 bp, Zea Mays
ataggctcattgaaaccctagcggtcgcattatttggataggtagtctcacagaggcggccaaaccctagccgccgccgccccaccatccaccacccttcccctcgcagtcaccagagtgggctgccgaagaacgtgcgggccctaggatggtggcggatgggtctctttgcctgttgacgttgtttgcgcttggatctaggcgggagaagggtgcggcggccatgggtttgctcggagggtcgacagcgtgctagtgcgggttcaggcgacgtgatggcctgagattcggtggcagacttggtgccgccgctgctctcgtcccgcttcctcgatgcagcttcctgcgtgctctatgtcgtcgtgcgcgcggggctggctgtgggtgtgctccaggacgccaccgccgctccctcctcccctacattcccctcatcatcaccggagggccccaatggcgacgacagtgcgtgttcttctctgcggggttgggtgcccctggatccggtcagagccggtgtgtggaggccgacaatagcggggttacgtggcgggagatacggctgtgtggaggcttgcttgtggaggaggcggcggtgtggaggccccggctcaggcttcgtcgatggtgtcccctccctccctggtcgttgctcggtgcctgtcgggctggtggcaacgtgcaagtgctcagtctttgggcggtttgttgttacggcagttgcggtggcggttaccagcttctccctaaggaccgtaacttctccttgtagcttggtctttattgtttgctaatgttgtccatacctatttttgtcgattagggtcaccttaacattgactcacggattcgcttattgaggtgacacgttttgtttagatgaactctacagacttgatgactgtgttcctattgcttagttcacaaatcagtcatcgtggggtttacatctatagaatgttcagttgtcgtaaagtttgtggtcgttgatattggctaagactaagtggtatgggagcacttgttcagcttgtaggtggtggcaactctaggattcttagatgtggtgatacgcatgtgtatccattcctacgtttttagggagaaattcttaggtctggcctttgttggttgtaccttgcaatggtctt

SEQ ID NO: 143507 - DNA, 1478 bp, Zea Mays
tatatagcaacggtgcatccgcattcattcagttaaaacctcagagcaaacatccgccaagcaaactccgatacctacaccaccctttttcgcctatatccttttactttgtgcacatgtcaatctacagcacacacatcaatgcaatgcaatgcaaatgcacggcccgaaccagtcacccccaacaaaccaggtttcatccaggggccgtgccttccagccggcagaaaaccgcgcctccaccactccgctcacttcacgttaggcttcggcgagtagcggaacggagacgcgcggggcccgtcagagaggctcctcacgggaggcggctgcccatgccgcccaaacgggctctgcgtcttgaagccgccgttcatgctgctcctcccgttcatgctgctcgagtgcgccatccgctcggcctgcatcgtctggaagaagtaggaggcgctcgccatgtccttgaggttctgcagcggcttcaggacctccaccacctggctcatcaggggccgcgccttggggtcccggctcaggcacacgcgcgctagctgcgccgccttctgcgcgcccttcaccgagaagttgccctccaggcgagggtcgattagcttgtagaaccgctgcctctcgcctaggagggggcgcgcccattccaccaggttgtgctccccgttcgggcggttcttgtccatcgacctgcgccctgacatcatctcaagaagcaccaccccgaagctgtagacatcactctttgatgtcagatgacctgaaaagtggaacagaaagacaaaagtgcatgtcaagcaaagaccagatgtgtaaacagtagagtaaaagggtgtttgaatcttaagagagcaaggtagtcaaattattctttcaatattatggatttgaagccaatccaaacctaggtaagcactaagcacttcaccccaaacaaattctatgtaaacataaatgattttatcttgggatatgtgattgctggggtcaactcactgagaatacctacattctacatgaactacccatgcccatttccacagttaatttagctgataaaccttttcaatttgcccctgccagtgtgttttaagcttccactacataaaggtcttgtagcacaaagacacatgtaaagttgcaagtgtggtaactacgtgttccgcgtattcctgtgtatattaggattgtatggttctgaacaaacccctctgcccgccttagacagatatggtaaacatcattacctcggtacaaacataccactaatggaaacttatcatattatccaaacaagtatggcatgtaacgtaaagcattacaacgtctcccaacaagcatagcttccaaccttaaatgtcttcaatgaagcatcaaataatggagaactgattatatcccagcatacttaaacatcgatttggatacgcaacaagcagataaagctgaatctagtgaatggttcgttg

SEQ ID NO: 143508 - DNA, 180 bp, Zea Mays
aacctgctcatcgttctgtggatcaccaggcaatggtaccgtgactccgcggagctgagagaggactggaggatggagtacctggacgcttggaaccagttcgggttgtcggtgacgcgcgagccgcagccgctgtgcgctacttgcgcgatcagaagcctgcgtagcctgtgcccttga

SEQ ID NO: 143509 - DNA, 832 bp, Zea Mays
ataaaaactaccgctctacttggcctttccgcgatggctgagactagggtttcagtggcgacggttgcacgacatgagggagcgcagcgaagccagcacaaccgcggtggacaagcgtccccatagacgagatccatggcggagcgctggaagagcgtcttctccgtgccgaaggccgagaacgcgcggccgacgggacgatggccggcggcgaagcccaaggcgtcggacctgctcgcccgcagccttgactgcagcctcgaccgcaaggactccatcctcgccgccatccacctcttccgccgctctatggccttcgactccacgacatctctctcgtcgtcggacccagccgctccagacctctacgcgtcctctgacaccgacatcgtctcctctggtagcaactcggtagccagtgatccgccgcgtcagggcatcagcgtgccggcgaggttctggcagaaaaccaatagccgcatgctacatgcaagctcaagaattgcaataagcggtaggtctgattttggaagcaggagtcgttacatcacattggatgcacctggctcatcgtcgttactcttcacctggcacagtggcacctaacacgtgtgcattatgttgagtcttcaagaagaacgtcatcagcaccgaggtggatgtcctgcaagtgcagtgcaacatggcgctctggactattcaagattcaagtcaaattaggctaagatgtttacaatgccgagacgattggaagctgcaatttgtgaatttttggtccataacttctatagttgtttacaagcacaaaagagcaaataattaacgaatctct

SEQ ID NO: 143510 - DNA, 599 bp, Zea Mays
ataaaaactaccgctctacttggcctttccgcgatggctgagactagggtttcagtggcgacggttgcacgacatgagggagcgcagcgaagccagcacaaccgcggtggacaagcgtccccatagacgagatccatggcggagcgctggaagagcgtcttctccgtgccgaaggccgagaacgcgcggccgacgggacgatggccggcggcgaagcccaaggcgtcggacctgctcgcccgcagccttgactgcagcctcgaccgcaaggactccatcctcgccgccatccacctcttccgccgctctatggccttcgactccacgacatctctctcgtcgtcggacccagccgctccagacctctacgcgtcctctgacaccgacatcgtctcctctggtagcaactcggtagccagtgatccgccgcgtcagggcatcagcgtgccggcgaggttctggcagaaaaccaatagccgcatgctacatgcaagctcaagaattgcaataagcggtaggtctgattttggaagcaggagtcgttacatcacattggtgagtattgaatcttatctattaaaactccttgtcattttctt

SEQ ID NO: 143511 - DNA, 1290 bp, Zea Mays
gcggcagcgctccaatccgacttcatccctgctcggctggccgctacattgctgctgaaccctagccgccgcgccgctacctgctaccatcgctccacccgccgtccgccgcgacgccgcccatcgcgtcaccatcgtccggaaactgggcaataggggttgcggccgcccgttgccaccaggtcctctgcgcctgctgctacgggctgtccgcggcaccgcgcgtcacagtcgtcggaggcgcgttgggcggccgcctggttggccagccggcgactgcgtgtctctgtgctccgtggtccctttccttctgcgagaattgcagagcaattggggtacacagcacaggcacatgaatacaacacaacagtttgctctctgattcgatcgatccaactagcctccaagcatggtgttcggccggagcaaatcaacttcgtcgacgacgccatccgcgccctcaaaggcggcggctgcgtgctccgagctgcgcaccgcgtaccacgactgcttcaaccggtggtacgcggagaaattcgctaaggggcagtggcagagggacgactgcgccgaccactggcacaagtaccgcgcctgcctcgaggaacatctggaagacaagcatctgaggcaaatcctactggatgcagaaacttctgcattttatgccatgcctgaggccaaccctcccacaggacaaggaactacaaaatgacaatccacctgattggttacccgcacggccgcaccatctcatcttggatcaccgtatgcgtcgactttatttgagattatgtttggttgcttgtatgtgggagtcataacctgcatgagtgaatgcaaaataagtcaatttaatgttattaacctgcatccacccatacgttcaaaattatcttatctggctgaccaggacggcggcagcctgcgcatggacgcgcagccatccaatcaggctgatatctccttcaccatatgccatatcggacttcattcaatcaggatatatagaaccttggtagatgaattagaaactccttggatcttgacaattgttaggcccctggatcatgtaacacttaacaagcaaaatttgcgtgtgtcagaatggtgtgtgccctgctatctggaaaccttgcaacagttgagaatagaatcagctgtagagctgtacatgttgaagaacgttgtgtttcaactgtggcttagcttttagcagagtttgttgagtaatatgtttcggacatggtattggtttcaatacattagtttctgatgttgttaaggttt

SEQ ID NO: 143512 - DNA, 1030 bp, Zea Mays
attattttcagtttgcttgcatggaactcattatttttactagctctgttttatttaaacttatagtagcacatgtgtccattattgatattgattaatctagctcctatcattatgttcactatattgaattagttttgacaaaaaccctggtaagctggaatcacattgttttgtagatatttttcttcaatataaatgcttaaacttaacctgataaattcatctacatgctctttcaaatggcaagcccactattgttgagttttatgcaaattggtgtgaagtctgcagggaacaagctccatatatctacaaagttgaacaacaatacaaagactgtggaattgtgaggtctgtccatgctgcctgctagaaatgggaaaatatgttagcagtagcaacaagtgtttttggcctttgatcttctggaggtcatgtggttgcagttctaccgatacttgttctacttgggcaaaattaggacaattcagttggagtacactgatgctaaagaaagcctcctgcaagttgctcgtaaggcaccaacaacagcccatggttttcggatccagtgcaacaaatgggttatcatagagaggctgctgcttggttggaacagaacaagacattgtgattttctttgactgttttgtaaggaatcagtgaaggaggctgaattgtggaatactattgtgatgaacatagtgaagcaggctgagttgttgcgtgcttctggttctggtctcagggagttacttggaaggggtttgtctctccgactctgctactgctttttaggcactgcttttttttgaagcacacattgttgtagctgaaacctccataatttcttcaccggttttatttaatctcttgttgcaattataggtgtacacaaaaactaatttttcatttgcttgtattactaaacttaatttcacaatcagccttgtagcactttgagattctgttgtttatttcttgtattagatattcttctgagtactggaataaagtcaatttatca

SEQ ID NO: 143513 - DNA, 1025 bp, Zea Mays
gaacgaagatcatgctgttgaaagaatataaattgcaggctaccaagatggttctgtgagtatatgggatgcaacatttcctgttctaatgccaatgtttgtcttggatggttgctgatgttaatttggatggagctaatgcttctgtatgatctctagccttttgttcattaagcatgactttagctgttgggacaacaagtggtctgttgtgcatctataaactccgagaacacattggggattcaagcttccattttgtgagtgaatttaagcaagaagtctgcagggaacaagctccatatatctacaaagttgaacaacaatacaaagactgtggaattgtgaggtctgtccatgctgcctgctagaaatgggaaaatatgttagcagtagcaacaagtgtttttggcctttgatcttctggaggtcatgtggttgcagttctaccgatacttgttctacttgggcaaaattaggacaattcagttggagtacactgatgctaaagaaagcctcctgcaagttgctcgtaaggcaccaacaacagcccatggttttcggatccagtgcaacaaatgggttatcatagagaggctgctgcttggttggaacagaacaagacattgtgattttctttgactgttttgtaaggaatcagtgaaggaggctgaattgtggaatactattgtgatgaacatagtgaagcaggctgagttgttgcgtgcttctggttctggtctcagggagttacttggaaggggtttgtctctccgactctgctactgctttttaggcactgcttttttttgaagcacacattgttgtagctgaaacctccataatttcttcaccggttttatttaatctcttgttgcaattataggtgtacacaaaaactaatttttcatttgcttgtattactaaacttaatttcacaatcagccttgtagcactttgagattctgttgtttatttcttgtattagatattcttctgagtactggaataaagtcaatttatca

SEQ ID NO: 143514 - DNA, 763 bp, Zea Mays
ccccactctgtctcccgcaatcctcgccttctcgccccaaattgtcggggctctcggtcctcgcccacgctctctatggaaggagatcgcctccgctgcaccccagcactcttgccccggatcgtggtcgggagaggaggcgacatccgaaacacggtgagtggagaggatcccgtttggcccctgggtaggtcggcttccttgtgccccgaatctcggtcctcgcccaccctctccatggaaggggattccgtgtatcgcgagcggatcatggtcgggagaggaggtggcatccaaagcgcagcgagtggagaggatctagtttggcccctgagtaggttggcttccatgtgccccggatcccggtcctcgcccaccctgtgccctggatctcgatcctcgcccaccctctccatagaaggggatcccgtgtatcgcaagcagaccgtggtcgggagaggaggcggtatccgaagcatgacgaggactcctgtttctgtcagaggctatggggatttacgcatgaagggtcaaatcaatggtgctcagggggattctggtgcagatcaactaaatactactattgatgacagtgaagaagtgacacacttctatgggatatgactacaaaatcctccagacaagagaagcaaagtgatgtttcatctaatgttgttaagctacaactagtctcagggagtagtaggctgcctgttattgtcttgcattggtctgctgggtcagcagtacattctaataaagg

SEQ ID NO: 143515 - DNA, 79 bp, Zea Mays
ggtcaggatcacgtaccgttccgttaaacctggatctaatcttgcacgtccaatttggatcgtgtggttcagacgcgcc

SEQ ID NO: 143516 - DNA, 1778 bp, Zea Mays
ttctcatttgacgctacataaatgatacgtaaaaattgtatttattaattttgaaagtaataaaatcgaaatatgttttcttctcatttgacgctacataatataatatcgttcgcaaaatatgttttcaaatggacaagcttgcaccgtaagccagtactcttcttcgagaagccatagcctagcttcccttgcacgacaagcgcatggcttctatccgaagcgtacttggtttataaataccaagcgagccttccatacttcactcaaccttgcctttacaaactccacaaccatgaatccctacttagaaaacaattttcttgtgcggttgatggaagaaatggaagaggaagaagaagagttgcagttggcgaggcacatggtcaataggaggcgacgtgcacgcaatgagcgtcgtcatggtggttcgattccagggcgtgttaggattcatcgtgatcacatgagcggcgatgcaagaatccgagcggactactttggagcgaacccgatgtacacggatgctcaatttcgtaggaggttccgcatgtgtcgccatgtctttgagcgccttgttgatgttgtgcaacaagtggatccttattttattcagcgtccaaattgtgcgggtgagattggtctttctgctctacagaaagttgttgctgctgttcgaatccttgcttacggtattctggctgatgtcgttgacgaatacgtacgtattggggaatctactgctcatgaggcattgaaacacttttgcacggccgtccaaaccgcgtttgctccgtattatctctgtgcaccaaatgcagaagatatcgcacgccttctccaagttggcgagtcacgtgggtttcctggtatgcttggtagtgttgattgcatgcattgggagtggtgtaactgcccaagttcatggaaggggatgtttacagggcgtggtaaacatcctaccatgatcttggaagctgttgcgtcgtatgacctgtggatatggcatgcatattttggtctgccaggtagttgcaacgacattaatgttcttcaccgttcaaaccttttcgaaaggcatctgagcggtgacacacctccagtttcattcattgtgaatggtcacatgtacaatatgggatattacctagcggacgggatttaccctgactggcccgcatttgtcaagacaatccgtaacccctacgacgttagaacccaacactttgcaacaattcaagagtctgctcgaaaagatatagaacgagctttcggtgtactccagaagagatggggtgtggtccgtggacctgcatacggttggagtcctgaacacattggggacatcatgaaaacatgcataatattgcacaacatgatagtagaagacgaaggtccattgtctttgaacacaacctttgaaaacatcggagtgctggcagacacaactcaaggttcaatggaagaacgcaacgacttcgtcaatcaaaggtacaaccaactgaaagaccgcaacaaatatactcagctacaggtagatctgatacaccatcactaggcgcgacatggatccggagttgcataggaggcaatgaaacaagttctgtcatggctgttcttatctactgtcgaactgtctttgtttactttacattgttctactgtttgttttagtgtcatgtctgttcttatgaagtgtgtgtactatgtgtcttagagtcgaagtgtcgtagtgtcatgctgctgtttcaattcaataacaaggagtactactgtca

SEQ ID NO: 143517 - DNA, 345 bp, Zea Mays
atgcaggacctaagtaaaaaggagaaagaactgcaggcaaaggaagctgagctaaacaaacgggaaagggtccgaaagctaaagcaactcagtgtgctaactctggcagagtcaactaagatactaccatatgatcagctcatgcaagagttggatgtttccaacgtaagagaactcgaagattttctaatcaatgagtgcatgtattcaggtattgtcagaggcaaactagatcagctgagaagatgctttgaagaggcgacaaccaccggcgtagtttcaattaagcccttacaaatctctcccacaatgggaactgctgataccttgattgagacattttga

SEQ ID NO: 143518 - DNA, 1231 bp, Zea Mays
aagcccagcccaacccgctgtcgctttcacttttctgtcgggaactcggaattgtccccgtcttccctgatcccttcgctccccgaagcaaaagcgcagagcgcatcagcgcagagtaggacagccatggcgacggcggcggcgcagtcccatccggcatcgatggacgcgcgccggtgggacgagtcatcgtaccgccgcggcatcctccgtgcccgcgacctctcgtcccgcaccctcttccgtgccgtcttctttgaccacagcgacgacccggataccgacatcctactcgccgccgcctccagcgacggctccctcgcttccttctccctttcatcctgcatctccgcatgttccgctacctcccaggtggagaccgccgccactctggtagatcctgtctgcatcgtgcaagcgcacagcggacctgcctacgacgtcaggttttaccccgatcaacagcagccgctgctcttcagctgcggggacgatggccgcatcaagggttggaggtggcacgagatgcagagctgccttgtcccgctctccctgcaaggggatcatctggaaccagcacttgacttggtcaaccctcagcacgagggtccttggggtgctcgatctccagtacctgaaaacaatgccattgcaattaataaacaggatggatccattttggcagcagcgggtgatgcatgtgcttactgctgggatgtggagaccagtaaatgtaaaatcacattcaaggggcatgctgattatttgcacagcattgcagttcgtgagtcaaaccgccaggttgtaacaggatcagaggatgggacagctcgtatctgggattgcagaagtgggaagtgcactcgggttatacagccaggaaagagcaaggcatttgaaagctcatgggtcagctgtgttgctattgatccaagtgaaagttggctggcttgtggcacgtctagcggtatatcagtttggagtcttctctcaaatgagtgcatctttaatttggactgtcatgctcctgttcaagatttattgtttgacaagaatcatattttagcagttggcgctgaacctctgctctcccgtctcacaataaacgggacagtcctttcacaagtaaaatgtgcccctcagtcggcgttttctgtctccatccactcaactggggtatgtgcctatcttgctgctctgctcatttcttggctgtgttctcccctgtttc

SEQ ID NO: 143519 - DNA, 936 bp, Zea Mays
gaggaatatacccattgtttcgtccgtttcctttgcccgaacgtgcgctgtctctcgatcctgcatctctgcacctgctcgcctccccagggaggcagggacaatcgacttcgccgggcgccggctagccccaccggcgacgacaggcacagtggaccacggaggagaaagtactctgctttgaatgggaagtgccatgaacaaagacaaagttcatgacaaggagactcacggaacaagtagtgatataactgagaaaacacctgtggaaacggtgaagggtcccaatctgcttgagcgagcaaaggaagagatcgaggcccttgccggagctgttcatactaagatggagcaccattccagtccccacgcgaagaaggatgaatcacataaggaaggcaaggaggggagcctgcacaaaataaaagcccacacggatgaaactcacggaacaagtgctgacataaatgagaacacaccagttgacaaagtcaaaggtccgaatgtgtttgagcgtgccaaggaagagattgaagctattgtggaagctatccatccgaagaatggatctgacagtaagtgaagactgaaacccctggggctgttttgccttaactggctgcaaaagccttaacgtgaggccatgtgctaccagatagataaatgctgtcaaagacgttcacccaatagtctttttatacgcgctctggagctgtaaaagctaagagcggacttgtttttatgctacactgttttccgttgtatcattgtggtttgtttgtccagaggtgtgtagaaatactcaacatggaattgtgatgcttaaattgttgagcttgacaggacattatattgtgccaccaactcgccatggtctggaagttgtaataagagtgatcatgaaacagggcataaatctattgctagtactttttt

SEQ ID NO: 143520 - DNA, 2859 bp, Zea Mays
gccggctacatataaaccagctccaatacaacgccactagccgggtcgagaggtggggagcagagggttcaagggaggggacaggtcgagcagctcacctttctctgctcgagaacgagaggagctcccgtcttttgcttgctgtgccgggcgctgctgaaggttcagctcagtccgatggcgttgagcggcagagctctgctcttgttcaagctgctgctgctgctgctggcgtgcctgctcttcctcttggagctgtcccgaggcaaggaagaagcattcagcctgaggaacctcccgcccttccacaaggccagcagctaccccgcggggtgcccgacgacgtacgactacatcatcgtcggcggcggcaccgcggggtgcccgctggcggcgacgctgtcgcacaggtacagggtgctgctgctggagcgcggaggctccccgtacggcgaccgcaacgtctcctacatgcagaacttccacatcgggctcatgaacatggcgccggactcgccgtcgcaggccttcatctccaccgacggcgtcatcaatgcccgggcgagggtgttgggcggtgggacctgcatcaatgccggcttctacagccgggccagcccaagctttatccaggaggccggctgggatgaagacctggtgaacaaatcatacccttgggtagaggacaagattgtccagtggcctaagatcgcgccttggcaggcggcgctacgggatgggctgctacaagcaggtgtagcccccttcaatgggtacacctacgatcatgtctctggaacaaaggtgggtggcaccatctttgacgagactgggtaccgccacacagctgccgacttactagcagctggagatgctagcaacctgaaggtgctgctccacgctagtgtgcacaagatagtgtttggctcgcgacaaggacgactgaaggcaagagccatcggagtcgaattcactgatgaggatgggagacaccaccaggcattcttgaacagcaacagagacagtgaagtaattgtatctgctggtgcgatcggcaccccccagctgctgctgctcagtgggatcgggcccaagaacgacctcaagaatcataacattccagtggttctccataacagatatgtgggtaaagggatggctgacaaccccatgaactccatattcataccaacaagaagccctcctcggcagtctctcattgaaactgttggaataactgaagaaggcgtgttcattgaggccagcagcgggtttggtcagtcgtcggagagtgtccactgccaccatggaatcatgtctgctgagattggacagctgtctaccattcctccgaagcaaagaaccctggaagcagcccagaaatacgcccataacaaacttaatctgcccaaagaggtattccacggcggttttatacttgaaaagattgatggtccgatgtccacaggccatctggtcctcacagacactgatgtccggaacaatccagcagttaccttcaactacttcagtcatccacaggatctcaatcgctgtatctatggtatcaagaccattgaaaggatactcaagacaaaccgtttctctgaactctctgctgatggtgctgggttatcgatggaaagggtgctcaatatgagcgtgcaggctaatgtgaacctgataccgaagcatacaaatgacacagaatccctggagcagttttgcaaggacactgtgatcaccatctggcattatcatggtgggtgccatgtagggaaggtggttgaccagcattaccgggtgcttggagtttcaggtctccgggtggttgacggctcaatattttctaaatcgccagggaccaaccctcaagctacagttatgatgatgggcagatatatgggagtgaagatcctaagggaaaggctgggacgagcagctggagtgtagtcgattcctggacattagctttttattatgtgtggcctaggaaagaaattactaattttttgtgggatccagaatgaatcgctgaagaaaaacaagccatgtgtttcatctgtacccagtaatcatttgtctaatatgatatcgcagactaaatggttgactgagcccctctttcttctttttttcttgtttattaagtggatttcaagaaacaaactcccatgaactgctccctcattaaaggaagattgagattgtttaacaatatcacaccaaagtaccagacgaaataaaatccatggaagagtgttgtatatcaacaaaagagaagaaaatccattcacaaaatcaaataatctgactttattacgtcagaaagtatttggtataactctgctacataagtttcctctctgagggggaaagaatgaaaagtaaaatcgcactgcatcgagagctcatcagattacatttacatctggtcatcattttactcagttcgaactaaagagactctgaaatcatcaattagcagcacccaatacataaatattttttccaaaaaataataataattctagagccttacaggtatcctgagaccgtcatagctaagctggatgtcaagaccgtctgttccaatcagcctggcaagatcactgtttactttctcatggtccatcaaatgcatcattcctgaagataccattcaatacaactcaatcattggcaagaccagacaaactgtataaacaatgaaatatgggacattagcctagtaatgaaatcgggtcaaataattataagcatcaatgtctataaacaagaaaagatatcgcttgatcttcgaatgctttaatgatggggaaaaggggggaatcattgaatgctaacaacagtaagctc

SEQ ID NO: 143521 - DNA, 471 bp, Zea Mays
aagaatgcatccgccagctctgtcgcagcgttgctccgtccacctccggcctctcccgactcatcagcgtcggaccatcgagctcctccccgctcaggacctctgacaccgagctccgcatattctactcggcgctgcccagcattgccaggtcttctccagcgccatgttccaacgtctgcctaggcgtcgtgcggccggtgccgccgtgccgaggtgcgcccccgctccctgcccgagcctagtactctcctctgcctagctcctgttcggcggtgttccgcccgtcccgctagccgcctagagcaaccagcaagaagcaactaaaagctctacggcctccaaagattattagtattattagttcatccgataggttattagttcattctagaacacccaacccgattgattctcagaatattttgcttgggggaccatgttggtggccttgcttgcctgattttttga

SEQ ID NO: 143522 - DNA, 117 bp, Zea Mays
atggaggctgaccttgaagatgctgatatggatgaggaggaggaagacccagaggagattgagggtgtttctgagttaaccaccgagagtggagcaccactgccaccagtcgactga

SEQ ID NO: 143523 - DNA, 474 bp, Zea Mays
ttcatcactcgtcaccacctatacctacatctccatctaccgaacatcaggtatgcaaattcatcatcatttacttgttgttagttatattatgatgtaacttagcaaatgtcatttatacatgtatattaaacccctccagctaccttgccgacgcatgaacaagaagacgggttaaactttgtcgaaaccctcttcactagtggaggtatcgaccatcactcgtcactgtaacccgatggtgatcagcgaccgtgagcttaaatgttattgcgttctattacttgagacttttattatgactatgtatgagatattgtctcttattagtactggatgatgagatgtgtcttattatgactatggatgagacttttgtgatgtaattaatgagactatggatgagacttttgtgatgtaattgatgagaccatgcatttaaatattgttatgtgattgtgtgtgagatgtttt

SEQ ID NO: 143524 - DNA, 1023 bp, Zea Mays
gttgatgggcaggtaacacagggaggaacaactgaacaagttcatacacgccgaggctttggctaacggtgagaaacataaacaaattaaacaaaacaaacatgtactacattggtatgctaacatttcaaaactggatttgacaagttgagtgttaagaaccaattagattagagttagtagtctcagctgacagattaggaactaggcattagaactaactgtctgtttaatcatatatgcatacatgtgcaagatcgatcaatggaacatcgttcattcatttcttgttgtgagtcctctttccgttcaaacaccgatatcggcatgcagcccccgcgagttaagacggcaatgcggcaacagcagtgacaattttgcattcgaaaccattccagcgttgcacaacataaataaataagctaaaatcctgatcactgctcaggttagtgaacctgaaacctctactaaactgattaggagaaattactctggaaacttatctcttaactgaagtacaacagtttctccaataaaggggaccagaggggaaaagctaacctcaaagtatagaacatacatcactatattagagatctactatcagtgaagaggcacccagctgctgcttgatgctccggttcatctttacatcatgtctgaagttcctgtacagttcgaccggtatacatgccagtgtgcatgttgatattcactggagtgtttatggcctccagccatgcataattatctgggttaccagctaccttcgtgcgtccagctgctgctgtcgaggagcatcaaatgaccatgacaaaacaaatagcatgagaaaacaaatagcctctttggttgtatacctaaagtgccaaaaattgccacattttttctactacacttgcctaagatttagcgctcaaattcttcgccagattttgacatatctatgggaatcttgcacacttaggtaggtgcccgtgcgatgtcatggaacataaattgcgaacctacaatggacttcat

SEQ ID NO: 143525 - DNA, 722 bp, Zea Mays
ctagccatgcatattgatgacttaagggctttagcacctctgtggctctcaaaaactgaagaagtgaggcaagataagtcccattggtcaaccaatattactggcgatatatatggcatgggttggatcagtgagatgtacgggtattcatttggtgctgcagaagtaggtctacgacacaagataaatgatgacataatgatctacccaggttatactcctagacctggcattgagccacttatcttgcactatggtttgccatttaaagttggaaactggtcattcagtaaattagaacaccgtgaagatggaataatttatgattgcaaccgcttgttcgatccacctccttttcctagagagatgatggaatctgacccaaatataaaacatggcttatttctaagcatagagtgcattaacaccttgaatgaaggactcttgttgcatcatgcatctgctggatgttctaaaccatagtggtcaaaatacctgagttttcttaaaagcaggaggtttcagagcttacaaaaccaaaatactggaagggcgaacaggttgacagcataatgaccatgcaacatgttgcattgtccaaggcaaacaatgaatatccaaaaatacacacccttttctctatcgaatgttcatcatattttgactggcaaactgttgggcttatgtacagcggacagcctggtaacatcacacgcttattg

SEQ ID NO: 143526 - DNA, 342 bp, Zea Mays
agtgttctttgcacaacagaccgaggatgccattggggttacgacgatgacacctagcattgtccacaaccgtccaagacctgtccaagtgataaataaaaaatattagtttatattatgattttgaacacataatatgaacaagaatgaagaacataaagttatattatgattctccatccggccgaatcagcggtcgcctgtcccgaagtatgggacgatgagggagactcgcgggatctcgcaggtagacgctcctcgaacctgaggcgccagaacctgaggcgtcctgctgagcgtcatcgtcatcctattgctggtcgtcgtcaccctgctgtgcca

SEQ ID NO: 143527 - DNA, 1997 bp, Zea Mays
acacaggcataacagcacctctcgagtctcgacacatagcagctgcttgcctctgcacacgcgctcagtcaggcacccccataagtcatatcataggatcgagctcctgcgcggctccacactgcgtggatccggccatgggctgtccaccgcggctcctctgctgcctcttcctgtcgctgtcgctggcagcggtggtcgcgcgcgccgccacgcggcaccaggagtgggagatcagctaccagttcaagagccccgactgcgtgcggaagctggcggtgaccatcaacggggagacgcccgggccgacgatccgcgcgacgcagggggacaccgtggtggtccgggtgaagaactccctgctgaccgagaacgtggccatccactggcacggcatccggcagcgcggcacgccgtgggccgacggcacggagggcgtgacgcagtgccccatcctccccggggacaccttcacctacgccttcgtggtggaccgcccgggcacgtacatgtaccacgcgcactacgggatgcagcgctccgcggggctcaacgggctcatcgtggtggccgcggcgcccggcgggcccgacgccgagccgttccgctacgacggcgagcacgacgtgctgctcaacgactggtggcataagagcacctacgagcaggccgccgggctcgcgtccgcgccgctcgtctgggtcggggagccgcagtcgctgctcatcaacggccgcggcaggttcgtcaactgctcggccgccggggcctgcgacgccgcgcacccggagtgcgccacgcccgtgttcgccgtcgtgcccggcaggacctacaggttccgcatcgccagcgtcacctcgctgtcggcgctcaactttgagatcgagggccacgaaatgacggtggtggaggcggacgggcactacgtgaagccgttcgtggtgaagaacctcaacatctactcgggcgagacctactccgtgctgatcaaggcggaccaggaccccaaccgcaactactggctcgcctccaacgtggtcagccgcgagccgggcacgccggcgggcaccgccgtgctcagctactacggcgggcgcagcagcccgcgcaggtcgccgccgacggcgcctcccgcggggcccgcctggaacgacaccgcgtaccggttccggcagagcgtggcgacggtggcgcacccggcccacgtcgagcctccgccgccgcgcgccgaccgcaccatcctcctgctcaacacacagaacaagatcgacgcgcacatcaagtgggcgctcaacggcgtgtccttcacgctgccgcacacgccctacctggtggccatgaagcggccggggctcctggacaccttcgaccagcgcccgccgccggagacgtacgcgcaccgggggtacgacgtctacgccgtcccgcccaaccccaacgccaccaccagcgacgggctgtaccgcctgcggttcggctccgtcgtcgacgtggtgctgcagaacgccaacatgctggcgcccaacaagagcgagacgcacccgtggcacctgcacggccacgacttctgggtgctgggctacggcatcggccgcttcgacccggcggtgcacccggcgtcctacaacctcagggaccccattctcaagaacaccgtcgcggtgcacccctacggctggacggcgctgcggttcagggccgacaaccccggcgtctgggcgttccattgccacatcgagtcccatttcttcatggggatgggcatcgccttcgaggaaggcgtcgaccgcgtcgctccgctcccgccacagatcatggggtgcgggaaaaccaggggtggccactaactgatgttgttcagaatctgaactcaaccaccgttgatccatttcgttcttttgtttcttattattacagtccatctaataagatttgtatgggcattttttttatcacaatcctatacgattcgggaacaatgccatgtgcatcttttt

SEQ ID NO: 143528 - DNA, 215 bp, Zea Mays
ccccagtgtcacctagggtttctcttaaaaagccacaccaagagccattacttcctgtgaaccaaagtaagcatgagcatcaaaataacttaagtgataaagaattcaccaagtatatgtttaaaagtgtcatgatcaaaacaattgagtccttgaaaagataagaatgtgcaaccctaattaagaactctaagtgaaccccatgaacaaaattc
